United States Patent Application Publication US 2022/0102000 A1 - sequence listing, part 12

SEQ ID NO: 2406 - DNA, 4461 bp, Unknown
  16S sequences of unknown bacteria
ccgacgtgggagcgattccggtgaatacccttgtttcgctttcgttgggggagaaaatctcaatcttgccgaggcgtgagagcgggaaatcgagccttgccggacccgcgtcgatgaatacgggaatgccctcttcgtttgcgcggcgtgtggcttcaatggcggcttcatccggaatctcgaactggagatataccgcgtcggggtagcaggtgaatccgtcctcgatgtcgtcagctgtcattgtcatgttcgcgccgggataaactatgattctgttcttgccgttgtcctcgacgaggatggaagcaagaccagtggcggagttttcgtcttccttaatatatcttgtgtcaattccttcacgctgatagaaggagataagtctttttgcgttggagtcgcgtccgagcttgcactggaaaacacagtccgcacccattctcgcgaaggcaacggcactgtttgcaccctttcccccgggaacgtaagaatatccaagctccggttcgcatacggtctcacccgaatacggcatccggcgcattctttgaacaaagtcgatgtttgcgctcgacactacaagtattctctgttttttcataaaaaacctcttaaaaccatattttataactatactttctttcattctacattatatcacgatatcatagcaattgcaaacggtattttcataaatttttctgaagaagaaaatcctcttgacacacgcggactgaaaaaggtataatatacacagaacatgaaaaaataaccgaaaatataccgaaaggctcaatgatgtactaccaaaaggatatagaatgcgcctcacccgagcaaatacgcggatggcaggacgaaagacttgtcaaaaccgtaaaaagggtgtgggacaactgtgaatactacagaaataaaatgaaagacaagggcgtcgagtatggggacgtaaaatccgcagacgacctgtggaagctcccgtttgtgacaaaggacgacctccgcgaggcttatccgtacggacttatgtcagcacccctgtccgactgcataagaatccactcgacctccggcacaacgggaaagagagttatcgcgttttatacccagaacgatatcgacctctgggaagactgctgtgcgagagctattgtagctgccggtggaacccgagaggatattgtgcagatatgctacggctacggcttgttcacgggcggattcggtctcaacggcggttcacagaagctcggcagtctcactctccccatgtcttcgggcaacacggaaagacagctccagttcatgaccgacctcggctcgaccatactctgctgtaccccctcatacgccgcgtatcttgcggaatccatcgaagaaaacggactccgcgacaagattaagctcaaagccggcatattcggagcggaagcgtggacggaagaaatgcgccgcgatatcgagaataagctcggaatcaaagcatacgatatatacggactgacggagctttccggtcccggcgttgcgtacgagtgcgaggaacagacgggaatgcacataaacgaggaccacttcatcgccgaaacgatagatcccgctacaggaaaggttcttcccgacggagaaaagggcgagatagtgttcacgtcggtaacaaaagaggctttcccgctcctgagataccgcacaaaggatatagccgtgcttcaccgtgagaaatgctcatgcggacgcacgtttgtgaagatgtcaaagcccatgggacgaagcgacgatatgctcattataaagggcgtcaacgtgttcccgtcgcagatagaaggagttttaatccgtctcggacttacgtcaaattaccagataatcgtagaccgtctcggaactaccgactcgatagaggtgcttgtcgagatgacgccggaattattcggagacaccgtaactcacataagccgcatcgaggaagaggtaacaaacgcgctcaagtcagtgctcggcatattcgcaaaggtttccattgtcgagccgaaatccatcacacgcagcgaaggcaaggcggtcagagtaatagacagacgtaagctgtacaattaagttaaaattattataaaaaatacatcggaggaagcaaacaatgtcagtaaaacagttatcagtatttgcggaaaacaaaaacggttctctttttgcgataacggagatactcgcgaagaacaatatcgacattcgcgcgttcagtatcgcggacacacagtcctacggcatactccgtctgatagtgagcgatccgagggcggcggctcttgcactctcgcaggaaggtaaaatagtcaacgtaacggatgttgtaggcgcgcagattcccgactgcaagggcggactttctcagcttctcggagtaataaacaaggctgacgtggctgtcgaatacctttacgcgttcacatccaccgaagagggcaaggcgtttgttgtgttcagagtggagaacaacgaagaggttgaaaagctgctccgcgacaacggaataaacgtgctgtaataattaagtaacgtgaggacagacggcatgggttaaggaagctcccgattaattcagggtatccttatggcttgatgcggtctgtcttttctatggagctaaaatgataaaaataatcaaagcatacgacgaatgccgtgattttgtctcggattttctgcgggaagaacctgtgcaggacgacatcacagaacggctgacaagacatattgagaatcccgacaaaaaccgcgtcatcggagtatttgccgaaggaggcatgactggcttgttttctttctttgttctgcccgacgagaaatatatcgaaatgctcgaatgcttctcccgcgaaaaagaaggctatgccgaagcgtttcgatatcttgcggacggtttccccggatacgacgcggactttgtgtttgacccgcaaaattccgtcttaaaagagctgcttgaagaatacggcgcggagtttgacacggaacagcagaaaatggtgcttgaaaccgttgtctccggcatagacacaacaggtgttgaacctctttccgaaaaatacgcggaggaatactgtgcgattcacacaaaggacgtgtactggacgggtgagagggtgcttgaagcgcaggatcgtttccgcacatttctcgcggtgaatgagggcaaggttgtcggatatattgacgtgacctatacctatgacgaaaacgagccgtttgatttgcttgtgcttgaagactgccgcagaatgggatacggaagaaagctgcttgcgaaggcggtagaggaaaacaagccaaacggaatggcgcttcatgtggacgtggacaacgctccggcaatacacctgtacaagtcgatgggttttaagaggacagtcggcggaaacacactgacctcacacctgacgctgccggagaaaaattaatttatagctctcatagcaatttctattgacaaagagcgatgtatattgtacaatgattacgtttataaatctaaaatagctgtgtaaagctgaaaggtaaagacgtggacattttatacaaaaacctgcttgacatggatttccgctacattatcatgtggataatcggcggagtgctcatctacctcgcgataaagaaggacatggagcctacgcttcttcttccgataggcttcggtacgattctcgtaaaccttccgaactccggtgcgataactcaggtgctctcaaacggatccgtagaggaaggcgcgctcacgacactgttcgacatgggcatagcaaacgagctgttcccgctgatattgtttatcggtatcggcgctatgatagacttcggacctctgctctcgaacccaaagcttatgatattcggcgcggcggctcagttcggtatcttcttcacgctgtgccttgcttcaatcttctttgatcagagcgacgcggcgtccattgcgataatcggtgcggctgacggtcctaccgctattgtcgttgcgaacaagctgaaatcacagtttcttgctcccattatggtggcggcttactcgtacatggctctcgttccgataatacagcccccggtaatccgtctccttaccacaaaggaagaacgcaagatccgcatggaatacagcggcaaagaggtttcaaagctcacaaagatactcttcccgataataatcaccgttgtagccggacttatcgctcccgcctcggtttcccttatcggattcctcatgttcggcaacctcattcgcgagtgcggcgtgctgaattctctctcagagacggctcagaaggtgcttgcaaaccttatcaccatcttcctcggaatcacaatcgcctcccagatgaacgccgagaagttccttacatttaatacgatactcatacttctgctcggtcttgtcgcgttcgttttcgatacggcaggggg

SEQ ID NO: 2407 - DNA, 12761 bp, Unknown
  16S sequences of unknown bacteria
agggcttacacgaccgattcctgccttaccttcaccaccaccgtgagggtgatcgttagggttcattacggaacctcttactgtaggtctgatacccatgtgtctcttcttgcccgctttaccgatcttgatgttttcgtgatcgagattgccgacttcaccgatcgtagctctgcactcgatacggatctttctcacttcgccggacgggagtctcacctgagcgtaatcgccttccttcgccatcagctgagcgccgtttcctgcggatcttaccagctgagcgcctttgcccggcttgagttccacattgtggatcaccgtacctaccggaatgtttttcagcggaagagtgtttccgattttgatgtcagcgtcagggccggatacgatagtatcgcctaccttcagcttgttcggagcgatgatatatctcttttcgccgtcagcgtagaagatgagagcgatgtttgcacttctgttcggatcgtattcgattgcggaaaccttgcccggaataccgtccttcagtctcttgaagtcgatgattctgtacttcggtctgtaaccgccgcctctgtgtcttacagtgatcttacctctgacatttcttccggaatgttttttcagagtaacggtaagtgacttttcaggtgtagtctttgtgatttcgtcaaacgcagaaaccgtcatgcctctctgacccggcgtgatcggcttatacttcttaatagccatcagtcgtttcctcctttataatccctggaagaattcgatttccttgctgccttccttaagcgttacgatcgcttttttggaatcaggagttcttccaactgttcttcccattctcttgactttacccttaacgttcatgatgtttactttagcgatttcgatatcgaagatttcttcgagcgctaacttcacttctgtcttgtttgcgtcaggggcaaccttaaatgtgtattttctcatcgccgcgtcgtccatgctcttttcagagataaccggctttataattacgtcgtaaggggttttcattatgaatacacctcctggattttttctaccgcgtctttcgttacgatgaagctcgtagcgttgacgatttcgtaagtgttcattgcggaaacgatggacgtcttgactcccgggatatttgccgcggatcttactacgttttcgttcttttccgcagttacgatcagagcctttttcgcagccttcacgtttgccagaaccttgatcatttccttcgtcttcggttcgctgaattcgagagaatcgatgacgatgatttcgctttccttcaccttagaagagagagcggacttgagcgccagtctcttaaccttcttaggaaccgtatagctgtaatctctcggcttcggcgcgaatacgacaccgccgccgatgtggcttggagaagttaagcttccctgtctgccgcggccggtacctttctgcctgaaaggctttctgccgcctcctcttacttcgcctctcgtcttagcggactgtgtgccctgtctctgattggcgagatagttctttattacttcatgcactgcgaattcgttgatttcgattccgaagatttcgtctttgagttcgatatcacctacagcttcgcctgccatgttaagcatggttactttagccattattcattcctccttccgaaactcttactggtcctgtccttttacggcataactgattctgaggagtccgcctttgtttcctggaacggaacccttaacgagaagtacgtttctttccgggataacctttacgagttcgatgttctgtaccgtaactgtctcgcggcccattcttcccggaccgtcgttacccttgaatactctggaaggataagtacctgctgccagaccgccggcaagtctcttatgctttgaaccgtgacccataggacctctgtgatggccgtgtctcttgatgttgccctgtgttcccttacctttggaaacgcctgtaacatccagctttttgccggcctcgaagatctctactgtaaattcctggttgagctgatattccgaagcgttttcaactctgacttcctggagatacttcttaggagctgcctgagccttttcgaagtgacccttgagcggcttggaaactctgtgagctttttcatccgcataaccgatctgaatcgcttcgtaaccgtctgtctcagcagtcttaatctgggttacgacaaccggacctgcttcgattactgttacaggaactgcagcgcctgtttcggaaaaaatctgagtcattccgactttttttcctaaaatagtgttcatactttctttcctccttttactcttacagcggattgcttttcgcaatcatactaagcggagacttttctgcagcggggtttcactgtggaaatccttgcgtaagtacgccatcatttgcttccaataatgcaactctttcgcaaactgacgcaccctttcgaaaaatctatattaatcttagtaactgactgtctataacttgatttcgatatctacgcctgcaggcatatcgagtttcatgagagcgtccactgtcttcggagccggatttaagatatcgatgagtctcttgtgagttctctgctcgaactgttctctggaatccttgtacttgtgaacggctctgaggatcgttacgacttccttttctgtaggaagaggaatcggaccggacacatctgcgcctgtcttcttcgccgtctccacgatcttcgctgcgctctgatccagcgctttgtgatcatacgcctttaatttgattctgattttctgactgctcattcgctttcctccttgattttcgtacgttttcgctatttctgtacgagggatttttcttttaacactcttccgggtgtttcttattttcagaccataaaaaaaatgatctgccatccctgcgcccgcttcggtgaacggacaattctccgcagaaattatctgatagctcagtaacttcccgcttcatcgcatcgcgcccagacgatgtaatcattgaaatttcaacgtcttttcggatggctgtgtccttcagaagggcataccactccccgaacacgctcattaagtatacatgatgcaggaagaatgcgcaagtattatttcaaattaatttcctgttttttcaggatttttatcaatgaaacaccgctgatttcaatgcttacgaagatccatttcagacacacatccgggtgtttcatcatagagcgcattatgtatacacgcttgtcaaaacaggcttcggagatatcgtctgccgcttatccgcagcagcccggagaaaaccggactgcgtgccgccccgccgccggtatgaaagacagcgcaaacgtggcagatctccggaggcctccgcaggaggcgaagacagagcacgaggtttatgttagaataacagaacagaaaaacgtatctccgccgaattcatcgccggccgggcgcgttatttttcaaaaaattttcagagaggccgcacctgcggcattctcataaaaatcaggagattttcacatgatacagacacttcaaaacgtcacggaatacagagaggatctgatctattccgccctttgtaaaagctttgacgacttaaatatagagcaggatctcagacccggcatgaaagtcgtaataaaaccgaatctcgtcatggcaaaaagtccggagttttccgccacgacccatccccttgtaatccgcggagtaatccgttatctcagagaacacggcattacagacattaccgtcgcggaaagctccggcggtctttataacgcggaacacatgaaccgagtctaccgcacttgcggcatggacagtcttcaacccgacgcccgtctcaatacggatttcacctcccgcacggtcagctgtcccgccggatttgcaaaccgcagctttaacctgattactcccgtcacagaagccgattatatcgtcaatatctgcaaactgaagacacatgctatgaccggatattccggcggtataaagaatctgttcggtacgatacccggtctggaaaagccgcagcttcactatcgctggccggatatcgacgatttctcccggatgctcctcgaggtcgcccagaccgtaaacccgcagctcaccgtcatagatgccatagacgccatggaaggaaacggccccaccggaggcactgtcagaccgatgcacatgctgtttgcagccagagatttctacacacaggattatttcgccgcaaagctgatgggactggatcccatgggagtctcgatgatccgtcaggcggtggaaagaggtctggcccatccggatgaaatcacactgaaaggcggtttcattccggaaaatatggcgccattccgagtgcccgatacaaaatcgcttaactttaccgacagccttccgaaattcctgagaaaacccttcttcttcgccgctgcaaaaatactgaaatcctatcctatcctcaagaaagaagactgtatcggctgcgggaaatgtgcggagagctgtcccgctcatatcatcagtatcgaaaaagggaaggccagatttaaaaagagaggctgtatctcctgcttctgctgtcaggagatgtgtccggcaaaagctatttccgtccgaaaagcgctgtgaaacggggaattttagccgtcgaaaaacgcggaaccctcgagggttccgcgttttacatcagccgtcttttcgcccgtatattttattgactttccgccctgcgtattcaaatgagcggtctctccatactctgcattttaactattctgaaaactctgcgcatattggacaaaccggcaaaccatcgccgccacttccgatctctttatactttttcccggatgaaaatatccggcgtcgtcaccggtgataataccgctgcgctccgcccagagaacggctttctccgcccagagagagatctcttcctcatctgaaaaaatcttactctgtaaatctccgtccgcatcggaagttccgggcaccgctacccagtttctgctctccgcatagcgataaaacaacgctgcggtctgttctcttgtcacatccccgtcaggtgaaaatttaccgtctgatattccgttgacgataccattctcatagacccagccaacggacggcgcataccaggcatctgccgctacatcagaaaacggcagaacatccatagacgcttcggaggaactctcccccttttccgccgcctgatccagacgctgaagcagggtggcgatcattcccctcgacatgcagctttcaggtgaaaactccgtgtcggtaaccccggtcatcaggccgagaccgcatacgcggtccaccgcttcaaaaaaccagtcgctctgctcgacatcgctgaagtcttctgcgctttttaccggaatatacgcatcttccccgtcctctgtcaccgtttcatccgttccgctgtcctcaggctcttctaccgcaccgccaccggaactgccgctgccggagctgccgcttcctcctccggaacctccgccttcagatcctgatccgccggaagattctccggaatccgctccgccagtctccccgcctccggaatcctgatctgatatctcaaaccccgcgccttcattgaattttaccagataggtctgatcgtttatcgccacagtgtgatctttctccgtcagatagagatcgatctttttttcatcattcatcttccaggtatccggcgagctggccgactccaccacgctgccaatatcgtaagtacagaaagaagtttcccctgtgtaatagtccagaccgtctacctttacagaatagactccgtctttcggctgtatttcactgagatcgaaagtgcataccgaagcgggagccccgtcgctgaaaattcccgcttttacttccgataaatcctccagatacacatatcctcctgcaatctgcagcgtcccgtgctgatctgcaccctttccgcctccgatcagagtacctccgccggtcacagacagagtccccccgctgacagaaacatcattgccgtccgcatcgccatatccgccgatcgcggtctgaccgctgtccgcccagagagccacatcgccgccgcggatatagacgtcgccggccgaagtatcacttccgataagtgccccgccgttgattcccataattctcagatgaccgccctcgattatcaccgtaccgctctcctggtgctcgtctccgccgatcgccgcattataataagaatgcttatacatgtacagttccccgctgccgccgatcgtcagttccgtatccccatctacattgatgattgattttcccagattgtcattataacattgctggagggaattctgtccttccagtgtcagccggtttcctttccctgtaaatacgagcgcatttgccggcatttccgtcgcattgtctattcgcaattcacgaatcgtcagatcagcattttccttttcacagctgattgtgaggtaatcattccctccgtacttaattcccgagcctacgatcgtcaccggttcggaggtccgaataaaaacggttccctcggaagcgcggctgtcgagataatattcgccgctctcggttatgacggatccggccgtcacccgcttctgatcctctgtctcgatatccggcaggaactcgccgtccaatgccgttccgctttcgccgctctctccataagaaaaactaaaactccccgccagcagtacggctgacagaaagactgcccacattcgatttctccgcattttcgctctccccgttttcatttccatgttctccgcctgattatgactgtcttctatatatcaatatcagaccaaataaaaccgatataatctatcctgattttaaactatgtacctgctcacaggtcaagagaatttgaacacagacaaaacggatcctgcggtgagaaagaaatcccctgcatacagaagaacagacggcaaagaccccgattgtctctgaatttcaatacagcggttcttacccgaacatccccctgctctacccgtatttcagcctttctccgcgtcctgtccccgctgcgcttcaatgagagagagcaattctctgcggtcttgttctgacagaaccgctccccgcatttcatcggaattcctgttcatttttccggtacggctttctatccacatctcctctccgtcgatcataagcatcatatccggcggagtttcaaaatcagcccattccggacagaactcctgacgttcgataagcctgcttatttttttcgacgtctcgctgtcacatacgacattttccttcagcgtctcttcccacgcattgaggagatccacatacaccgtaccctcctcccaattcgtccggttgacgctgttctctttcatccagtcgctcagtacgatccgtatgtctccgatggtctgatacatggatatatactcctcagcatttttttgatcttccggatcatactgcacatctgaagccattcccagatagtaagtatatccggccacagaggcgatcgtatatcccggcacaggataagaataatccatcggacggctcccctctatcttctcgataaagaaaagcatccctgtctcgtctttttcgtacagcgatttctgataaacggcgatctctcctgcgctctgttcacagatatacctgccctcccagctgtcaggcagaagcagcgagatgccggcgccttcgatctctatcatttccggttcctcattgagcgcaaaggcgcccagaacaaaaccgcccgtcatcagcgccgccgctgctgccacggcgagcagacggcgaaacacgcgtctcgtctttccgcgccggaatccggcggctcccctgccgcctttcccgaactgctccgcctggtcgatcagcctgtcatcgatatttccgatcctttccgacatctgcatttcgttcatttttttatcccccttacgttttcgctttcggccccgtttatctccgggctctgattttgccgcgtcgcccgggatcacagccgccgcgcattctcatactctccgatggatgattttaaagcgctgtcctataattccacgccctcatctttcagatacgctctcagttttctccgcatccggaacagaatcgatgtcactttgctcccgctgtatgcggtacgccgacagatatcatcgatcgaatcgaaataccagtaacggcgtatgaaaaccgcacgcgccgattcctcctgccgccacagaaaatcgctgatcgcgctctcgattcttctgcactccagctcgtcttcaacggaatccctgccggatatgcagtcttccagttccgtcagagaacacaccgcctcttcacagcgtttttccgcagataaatacgcatatcgcttcagagcgagattgcgcgcaatgcgtccgacataggcggaaagccgctgaggtttttccggaggaatccgattccatgcgctgagccaggtatcgttcacgcattcttcgcaatcctgtgcactgcgaagaatattgcctgcgatatgacggcacagccctccatattttacgtcggtctgcacgatcgcctcctctgaccgtacaaaatataattctacaatcctataatcctccatcctctgttctcctctgtgaatagattccgaccaggatctcagcacaatatcgctgcagcaaaaccgtatccttccggctcccgcatcctgattcagcggctttcacctattaagtacgatttgcaggatcaacattgcgcagaaaaacaaaaaaacagaaaaatctcctgcagcggagtctccgctgcaggagattttcataaagattctcttcagcgcgaaaggctgaaaaatatacgaaaagagatgttctgttcgttatgaattcaatttcatatatttcgtaatcatctgcgctgcctgcgcccgtgtcgcctgtccctcaggcttcagcacaccgtttccggttccgtttacgattccccgttccactgcccaggaaagagcttttacagcatactcgccggcagaggaagcgtctttaaacgaatccagcgtacccgccgtatctggcgaacctgcatagcggtagagcatcgtcgccaactgctctctggtaatatttttcatcggtccgaaagtaccgtcaccgtaacctgttacgatattctctgccgccgaccagattaccgcatcagtataccatgcgtctgacgctacatcgctgaatttgtgctccgccgctaccggaggcttttcctccatattgtagagaatctgtgtgagcatcgcacgggacagattggaatccggagcgaatttaccgccgccgactccgttcatcgcacccgctgcggtcgcctgctgtacggcgtcagcataccaggcatccgccgctacatctgtataaccggaaacagactggccggaatcatcggcaaccgcgtcaaaagcggcattgctgatgaaattgaattcgtcgcgctggtgaactttattcgtcagcgtattcgcaaacaacacgacgtctaacctcgcgccgtccgcgcctgcgccttcataagagatcgcctgaatcgaatcatttttaaacgccgcgtaattttcgcccgtgctcggaaggaatccttctatcagaccttttttgctgttcagcttcacgagaaccttggaccctgctggaatttcggagaaatacgcagtgccgtagccgtagagaatatcgtcgccttccgcgatatagctggcgttgatcatcgtctcttccgggtaagtgacataggataacgcgtccattcctcccttgacagaactgtaacggatgctgccctccgggaaaagtcccgttgcggaaggaaccgcattcttaccgtagccgatatatgcggtgcccgcttttaccgccgccagcgcttccgcatcgagagccgccgcaccgataatcagatctgctttggaagcatcttctgtcacctgaaatcccagaagttccatcgcctggcgatcgtaattgtactgataggcgccgctgaccagagaagatttaacaaaacccgccgtattatccgacggtttgccgctgatatagacgagaggagccttggagattttctttgcggcaggggctttggaagcctccacgccgatccccgttacaatatactgaggatcgagggatttccatgcggtataatcacacaggaaactgcccttatactcaccctctgtgataagcgacaccgctttgccattcttcagcaggaagttaaccgcagccgtggaatcttctgaggcatttacgatgatgactgaggcattttccgtgccgctgaaagcggactttacacctttgacatagctctcataatccgcataatccatttcaccgccgcaggatgccgcaattgtttcgtacgcatctggatccgcacatgtggccatatcaaaaccccgtgtcttattgaaagccgtgattccttcagaataaagctgcggccattccgttatgacggtaccgtcataaagcacaccgtttgctaccgatctctttgcctgatacatcgaaacgaccatcgtacctgccggataatccacaccgtcataagtgaatttcttttcagacagacgtaccttcacatcattgcgcgtgagccattccatcatatcgtttgccgcctgaaggttactctgattttcggcatccagcggaatgatatagcattccggataaaaattgccgttttcttcatatgtcggacggaagagatccgcttcggctccctcgatatcatactgatcgcagaaccacggctccacttcctcgtttgaattcgcgttcgttacgccccgctccaaaatctcagtctgcgcggcgagataagattccttattttcagcgatatagtgagactgacccagctgaccgtaagccaaagcttccaccatataatcgtcataggcaggaacctctaccgtataggaaaccgtaccgtgaagcatcgcatactgcggtgtatagctcgtggacatatcgtcccacggatctgcccataccgtctgccggcccgttcccgtatactcgagataatctctctgcggaatcacatagctgttgtgtccgccgttgtttgcgaccgccgcgataccgagagcttcaccgccggtcatcaggtgctccgcgagcaggtcatattcaaaattcggttcatgcggcggatcgcacggttcgcattggaaggcttccacccttccgtggaattctgcaaaactgaccggattccactcggagatcaggcgagtcatattctgcgtttccgcctgcgtctggaaggaattatctctgttgaggtcaaaaccgccggaagaggtgcgcgtcagatatgtacggccttctacattttcttccggcacgatgatatagaaaacatcatccagaagatcgccgatatttacagtctcttcttccacgttataatatttttcgagatccacttttccggactccgggctgtcctcaccggcatgaatgtagccgagataagtcgccgtatcctttacgagatcgggaacagctacagaaccctccgcgcctttcggacccatctgctctttcagctttttctcgccctctgcggtaaatccggtgagcttatcgtaatcgatatcaccgctgtcgcttgccgcagcattcagcagcatccaggtaaattccagaataccgtcagaagcagaaacctcgttggaatgaatattggaatacatcacaggaacctgataatctttcagctctccattttcaatttttttcaggagatccgacggattcgtctcagcttcttccttgatagacttccagcgttccaccgcactcttatcctttgcgacgatcagatatggcatatctaaagaggccagtccgttgtctccctggctttttcccatggagaatttttccacatagagatctgtcttatccgctgcaaaatccacaatctcatcgatttcgtcatagatctcggacatcgtatggaaattatcgtatggagtaattttcagcgcgacggatcccagcgtcttgtccgccgtctttaccgtcagattaaaatatccgctgacgtccagatacgcgcctccgttggaatgaggaacgctcagatccacatttccgtttttatcgtagaaataacagttgtttccgaatgtcagcgtcaggtatacctgtccgtctttcgtctctgctccgctgacgatatctgtaaacaacttcgtctcattgtccgtacagatccagctgtcaagcgtgccgccctgatactgattcggatactgcgatacatcggcataaggcctgctcttatcccgaaggatcgaccatactgctgtcttcgcagtctctttggcttcggcctccgtcatattcacaggtacatatgccttaaatgtgcgggaggctgacagagatatgacatggtcgccgccatccccggaagtgtttacaaagcttgccgcagatgcggatgcaccggacgcctccgctgcgaacgtcggaaccgcacatacagacaacacgagcgctgcagtcatgataaccgctaaaatgcgctcggttacacgcacagattttttcataaatctttcctttccttctcatgaaataattgcccgataatcacttccatcaagatcggaag

SEQ ID NO: 2408 - DNA, 1830 bp, Unknown
  16S sequences of unknown bacteria
cacgcccaccagacaggcggtaagggtagccgggatgatctgtgccttggtggcagccttcttctcctttttggcggtggagatgaaagccattgccacgccgatcacgccgaaggtcttcatcagaccgtaggtcagaaaacgtgcggaatcccgcatcattgccacgctggggtcactgagcagggcaaggaacacaggctttgcgccaacgatctgctcaccgccgatgatcatgctgtcgcccagtgcggagtagaggaagggcgaccagaccagatgatgcagacccgtggggatcagcacgcggttcaagaagccgtacaggaacacaccgaacgcgcctgcacttgccatgacaccggtcagggcgttgatacccgccgcagccacaggccagacgtagctggcaaccaccgccatgaccagaacgatgggcagcagcaccacaaagacgaacttgctgttgccgtacatggccatggcaccttcaaactcggtgtcgatgaagcggttgtggaccagcgccaccaccacgccaaggatcatgcccagaaatacgcccatgtcagtaacgtgatagccgaggcagatggtctgaccggtgccgtacaaagcgcttgccgtatcaccggcgatggtcagtcctgccacatccagccagcgggaattggctgccagccagaccagatagctgaccagtgccagaaatgccgcatctgccttgcgctttttggcaaggctcattgcgatgcccacgcagaacaggatacccagattgccaatgactgctccaacgccgccattgatgaatttgccgagggtccagacaacaccgccctctgtcaccagtgccgtgttgctcatgaccgaagaaatcgcctgcagcatacccgcaatgggcaggaacagaacggggcccatcagagctctggaaaagctctgcatagcatccataactttttgtttcattggtgttctcctaacgttccatgaatctctcttttcaaattgtctcttcgtttcgggggtgcaccttaccgtttcgatggcttgattatatcactctgcacaaaaaaatctaccgaattggactttttttgaacttgttcgcaaaagctgaaacatgtttcgctttcatgttggatacatcgaaatgtttattgacaaaatacgcgattcagcgtatactttatggaatcaagccgttctttgattcgaaaatcggagtaaaatatgaaacacgacctttataaactggcagatcagcaccatctgaatgccaacgagcagcagcttttgcaggcggtgctggaaaccgcaaaaaacggcggtcagtgcagcgtgcgagagtttgcagcgcagaattatacctcccccgcggccgtgatccggctgagcaaaaagatgggctataccggctacaccgatatgatctaccgcatcggttttctgatccagaacgagatcgacaacaaaaaccacgcctccgacatcaccgcctttatcgggggtatcccagaagaaaaaatacaccgctttgtggagctgctccacgccaaccggcaaaagcccatccttgtgacaggcaccgggttctgtgcccctttgcaggaatttatggtgcggaagctgctggttctgggctactgcgccatcggctccaacagctatgaggtctacgaaagcggtgcactgaatgccgggctggtcattgccatcagcaagagtggaaagactggcaccatcctgaagccggtacaggattcctttgcacagcaccggagcatcattgcctttgtgggtgccgacaattctcccatcgcccgc

SEQ ID NO: 2409 - DNA, 15836 bp, Unknown
  16S sequences of unknown bacteria
gtagatctaggtcgccaggcgctcaaggcgttggaagcgatgcatacgatagctaggtgaaatggccatgaagcaaaaagcggatgtactcattgtaggcacaggggctgcagggctgttttgcgctttgcagctgtcggagcatttggagatttgtatgatctccaaacaagacctggaaaacagcgattcctacttggcgcagggtggtatctctacgctgaaaaatgagcaggactatgccagctattacatggataccatgaaggcggggcactatgaaaacgacccgttggcggtggaaatgatgatccgttcctctccggagatcattgacgatttgcttcgctgcggcgtggagtttgagcacgatcagcagggcatgtgctatacgcgtgaaggggcgcattccgcgtttcgtattctgcatcatgaagatgaaacaggacgtgagattacgtcaaaattgctgacacaggtacaaaagcggaagaatatttcgctgtatccatatacatgtatgctggatatcgtctgtaatgaggaaggatgccatggcgctgtggtgcgctgccaagatggctctctttgcaccattgcggccaaggttgtggtatgggctacgggcggtgtaggcggtctgtttgacagctctaccaattttgcacacctcacgggagacgctgtggcgctgtccctattacacggcatccatctcaaggatatcaattacatccagatccaccccacgactctatatagtaaggaaaagggacggcgctttttgatttcggaatccgtgaggggcgagggggccgttttgctcaatgcaaagggggaacgctttgtggatgagttgttgccccgcgatgtagtcagccaagcgattcacgcacaaatggagatggatcacagggactatgtatggctgtccgtagtgcatttgggtgcggaaaagatacaaaaaagatttccgcatatataccagcactgtctggaaaaaggatatgacatcacaaaggaacccatccccgtgacgccggcgcagcattattttatggggggcgtagcagtggatcttgaaagctgcacttcgatgccgcacctatacgcggtgggagaaactgcgtgtaacggcgtacatgggaaaaatagactggcaagcaattcactgctggaaagcctggtgtttgcaaaacgggctgccaagagcctgcaaaaaacgatcggtcaaatcgattttatgccaatgccgacagacctcagcgcttacgaggatacgcaagcgttggcacagaagtatagaaccttggtgctgaatgaaatcaaaagaagggatgcgagtttttatgatcaatggtgtcacgatggctctcaatgtggatgatatactgcgtgctgccttaaaggaggatattacctctgaggatgtttccaccaatgcggtagtgacgggcccatcccagggcagtgcacagctgattgcaaagcaggacggcgttctggcagggttaaaggtatttgagcgggtgttttggcttttggacccttccgtaaaatttgaaacagagtatcaagacgggcaggcggtaaagtgcggaacgctgatcggtacggtttttggcgatatgcgcgtgctgctgagcggggaacgtaccgcactcaactatttgcagcgaatgagcggcattgctacgatgacgcgccggtatgcggaaatattgcggggcagcaaaaccaagctactagatacccggaaaacaacgccaaatatgcgggtatttgaaaagtatgccgtaaaagtaggcggcggcgtgaatcaccgctacaatctttcagatgggattttgctaaaggataaccacatcggcgctgcgggcggcatagcccaggccatagctagagccagggcttacgcgccttttgtccgtaagatagaagtagagacagaaacgctggagatggtacagcaggccctagacgcgggggcggatatcatcatgctggataatatggatgatgaaacgatgaaaaaagcgatacacatgatcgacgaccgcgccgaaacggaatgttccggcaacgtgacggaggagcggctgaaaagaattgccgagcttggcgtggattatgtatcctgcggtgcactgacgcattctgttgggatattggatctttctctgaaaaatttgaaaccgatacacggttaaggaaggagggccgttatggacggcaaaatgagaagaaaacggattttacaattgcttagcgaacagacaaagccgctgtccggaacggcgctggccaagcagtttggtgtgagccggcaggtcatcgtacaggatattgcgcttttaaagagcaaagaaccggcgattatttccacctaccgcggctatgtgctggggcggccagagagagtctgtgaacgtgtattttgggttaggcatagcaatgagcaaatacaggatgaactcaacaccatcgttgataacggtggtgaggtttgcactgtgattgtggagcatgagctgtatggcagaatctcagttgagctgcccattcgttcacgaaggcatgttcaggagtttgtagagaatgtatccaaaggccaggccaggcccttgaaggagctggtacatgacggtgtacatgggcatcttgttcgggcggagcgggaaagcgatctggacgccatcgagcaggatctacgaataaaagggtatctggtggcagaaaatgtgcaatgaaaaagacggcattagccgtctttcttttttgcttttttgggttggaagggcagcgcatccagcgtaacgcgggcaatatgagaaaccaagccggcctcctccgggttctctaggagaagatagggcttggccccttcgtagggcggatattccggcagcgaaaaggcggcacggccggcttcggtaggcttgaaaaaaagctgattgtcgcagattacagcaaaaaattttccttcggcaaacagaccgtattccccaaacatggatttgtatgtaacgggagcggctgcggacatttggtcgcagacatattgaacaaactccttactgcttgccatatactcatcctcctttttagaaaagtgtagtaggaaatttatgtgtttccttgtaaaaatcggacaatttttgttgatatatggtgggggaaacaccgcatacggacttgaaatcatgattgaaatgtgcttggtcgtagtatcccagtgtctgagctaaataggaaagggaaggcgcctgccccatccctgccaaggcgtggttgatcctttgcagacgcagatattggcgaagggaaagacccaacaccggctgaatgcggcgggatagatgtcgggcgctgtaatgcagagttttgctgagcgattcggaggaaagggacgtcgtaggcgcatggagacagcaaagcaattgctcagccaaagaatcggttttctcgctgttgatatattggcagaaaagagcgtcaatccccgccaatagggtatgcatgcagctgcttttggaaaataaggctaaaaaggcagaatacagggcggcgtctgcatcggcaagcggaatacgaagatcgacggcatccttgacagataagccgagaagctgatgtgctccgccgggcaaaaactctacaaaaaaacgataaggcgtttgtttaaaatcattgtacacttccacggtatgcgtcgtaggcccccaaaaatgggcctgtatgccggaagggccaaaggcaaagaccaagcatccgctggcatccggaatcaaggttagatgggccggcccgctgacgcatggcggggaaagcgtataatgggcaatatattttttaagcgcagggtggggatgaaaataaaggtggctgggcgatgcggaaaaaagcgcatccgacatgcgggcgccaaaaaagcaagcgggcgtgcaaaagctcagcgacgccatggctgctcctcatcataatcgtcgtaatcctcatacttatcccgttcttcgggtgaagggtgcttggagatcaaaaactgtacctgcggccagtaatgccgccaaagcgcaaagatccaatagcccaatagagcaccaaacatgctgaacagcacggcattgacatcaaacggggccaaccctgcaaagaaggggatagcctctgtcagcagggagagaaacagcgtgatggtcagcaccttaaacgggccgggtcgacggaaaaacagcagcggcaagcatagcccgaaaggaagaaaggccaaaatacatccatacagataaccgcgcagcgaagccgcccctaaaaagggaaggaaattggagactttcaactgtgcatacacggccttaggagaccaatgcacaaaggaatctataatttcctccactgaaaattgaaataaagcgctttgcaatagacaaaacacatatacccaaaaaataatcaaacagcaggtgcgtcctgtttttgacatgtggacaaggccctccttttgttttttacagtttgccatgaatcgaacaaaagcacaagcatcctttcatcagcaagtggataagggcaagcgaatgtggtaggctttgccgccgtgcagatccggctgctcctcaagagaagcgcccaaaaaacgaaaaatggtatcggcaacggccagatccaggctactgggtcgtagctttttggtggcaatgcggacgaggcggctgcgggttttggttcgcgtgccatggcaggatacttcaagggaaagatgagaatcgtgcagcgccatggcaacatgtaccgtgctgcccggctgtcgctgagcggtacagctaagaatcaaatgggagagcgcctgggggaaaaattgatgatccgtccgaacggcagcagccggaggcatagaaaactcgcagtgcataccacgcgcctcaagagagggagaaaccagtgtttgagtggcttgcaccagcgaggcaagtggatatgtttgaaagtctgcgttttgctccatatcctcctgtagggaggaaagcttggtcagaagcagtagaaactcctgtgttttatccagctgtgtctttagctttttgcaaaattgttgatacttttcctcatccaaatttttttgcagcacgatttcggtcagtgtacgcgcagattgcagcggctgccctaccaactcggaaagctcttgtacagcttggcgaatggggatgttttctgctgtgggctcattgcttacaagcgataaaagctgtgtagatgctgtacgcgaaacgccgcggacattttttaccatgcgcctggttccgtagacgagcttggcgcccctcaacagcattacaaacagcataaaggcagtaaaaagcgccctggcgccggtatgctgctcttgcggcgcatagccgaaggtagagagcagagcttccccttgggcggcggcattgtcatcatcggattggagggaggcgataacagatggcagcgcttcgggtgcagcctgctccacggcagctgctacaagagcatcatgacggcggatggaatcatccaaacggctttccacccagctgccaaggaaaaaagctgcgacgacgaccaatagggcgaaaattagccagcggccaaacccttttttggtttctgaagatagctcaatggaagaggaatgaaacgccataacaagctccttattctagattctagatttttttcattctatcacaaatggtgcaccagaaagaaatagaccctctaaagagggccgaattggtcaaacgatgggctggggggatatggaaagagaatatgcgtgacttttccctccttgcagtgttttcgaaaagggggaaacactggtatcactggcgtatccgttcccctcttgaagcacgtcgaaggataaaaccatgacacaacaatatgcgcagagcattaaaaagaaagaacgtctgtcgctatattttggagaaaactggcgtcgtgctctacaaagatcatggtcggccgacagcgcaggataaggtcctcgatttgcaggcggctgattacgtcgatatagtttaacggctcatcccaaagatacagatgtgcttgttggcataggctgtgcgccatggctgttttctttttttgccccatggaaaagtcctccagccttatttcaaattgactgcgggaaaatccaagctttcgcaagagagtataaaactgcgtttcatccaatccatgtctttgagcataggctgatagagatccgtgtaagccggaaacatcctggggtagaaaggaaatggatagcccgctcgccagacgcagcatacccgtatgccgaatgctttgcccggccaggcatttgagaagggtagatttaccgcttccattggggccgaccagggcaagacgatctccggagtgaagagccaagcgaatgggaccgcagacaggctctgctccgtacgataaaattagattacttgcctctaccaagcaggcagcgtggtgggatagaggagacaggctgataagaggctgtgcatccatgtttttcaaaagacgagatttttcttcaatcgttttttgctgccgcgcctggatgctcttggcgcgctgcatcattttggcagcttgatgcccgagataccctctatccggctttaatccggagctttgaacgccgtatttacgccgctctatttgatgagaccattgcgccgtttggcgggcggaatcggccaaacggccaatttcttttttaagccgttgattgtgcgcagcctcctctgcatcctgttgatctttttgcagctgccaggtggaaaagtttcctttttgcacttgtatatcggcacggttgatggaaagcacatgatcgatgcaggcatctaaaaaggcacggtcatgagaaacgaggatgaatccctcctttcttttcagatacgcgcttacaaggcggcgcccctgaagatctagatggttggtgggttcatcgatcaatagaaagcattgcggtttgcaaaataaaacagccaatagaaatttggtgcgttcgccgggactcagtatttggtagggcctatacaaaatgccttctttcatgccaagcaaagagagctcttttttaatctgccaggttggcacctccggagatatggcataggcaatcgatttacagcacagagcggggttttccactttataggggaaatactcaaaatcaacttggcttgtcgtgattttcccttgataagggtattgcccctgtagcaggcgcaaaaaggtggttttaccgcgaccattacgcccgacaaggccgagcttccactttgtatcaagctgaagcgatacgtcggtaaaaacattgtcgtggctgccgggataggcaaaggtaagatgagaaatttgaatgatggacaataaaaaaagcacctcctcagagagcaagaaagcgactttgcttcaatgtcaaggaaatgcaaaaatccccttaggaaagggaaaatgaaagacagaaaaagaaaaagcgctttcttgcaaagagagcataacaagaagtacccgaaacggcccaaatgccctcttttacacatcgtgttagcaagaaatgttgcgcattttccttttcacatccaatcgtttttagaatcaaccttattatatccaaacgcagcggattgtcaaccggctgctttttccttttccaaatgccccatacggcgcatttctcgaatgatgaacaccagagcaagaatggcagctgctaagtctgcgatgggtccggcatacatgacgccgtcgataccaaaaaacatgggaaatagtacgatcaaaggcaagagaaagatgatctgtctggtcagagacatcaaaatgcccattttggctttgccgatggctgtgaaaaagttgctggtcaagggctgaaggccgttgataaaggtcatgagcatatagatgcggaaatatcgctcggcaaactggaaatatgcttcgctgcccgatccaaagatgctaacaataggacggggaaagagttgaaaacacaaaaatgcaacaatggaaatcaccatgatgatacgggctgctgtcaaataggtttttctcacacgcgcgtaattttgcgcgccgtaattgaagctgaagataggctggcagccttggcagatgcccacaataaatgccatgagcaagatgttgactttggagataacacctacacaggcaagcggtatatcgctgccataaagggaaagcgcgccataataggtcaatgtgttgtttagggtaatttgcacagccgtcatagccagctgattgaagcagggcgccgcgcctaaagaggcaatggccttgagatggcaaaggcgaggacgcaaacgagagcgcgtcaatggagttgaacggaaatgaaacagataatacaacgccatacaggcagaaagtacctgcccgattacagtggccagcgcaccgcccgcgatgcccatatcaaatgtgaagataaagagagggtcgaggatggtattgacaatcgctccagatagcatacaggccatggaataggtggggctgccgtctgcgcgaatcaaatggctgcatcctgtggaaaagatgacaaacggcaaaccaaaagctgtgatgcttgtataggtgatggcataaggcataacctgctctgttgcaccaaagatagccatgagcgggtgcaaaaacagcagcgtgatcccggccagaccaatgccaaagattcccaaaaaagagatagcgttcccagccatatagccggcgcgttcttgatcaccgcgccccatggaaagattaaagttggccgcgccaccgatgccaatcagcaaagcgagggaggtggcgatggtagaaagcggaaatgccacattggtagcggcattgcccagcatgccgacaccttggccgataaagatttggtccacgatattataaagcgcgctgaccaaaaaacttacgatggaagggatgccgaattttgcaattaacttggataccttttcgacggccaaaggattttcttgaggggaaagagaagaagaagccataaaacaaccccctatatgagaaaggatacttttattttagtacaaaaaggggagcaaatgtcaatgcaaaaaaaagcgctttggcacgaaaaaaagaacgaaatgacagaacgtagggttgacaaagtgtgaaaaacatcataatatatgaatagatattcagatgaatagatgaaaggatgagagggcatgccgatagagcaagaggtagaacgctgtgaatatatgtatgtacatcaggatgtagtaaacaaagtgaagcaggatatgccgcaggatgaaacactgtacgatttggcggagctgtttaaggtattcggagactccacccgtataaagatcctatacgccttgtttgaagcagaactatgcgtatgcgatatcgcgcagcttttaagcgtatcccaaacggcagtttcacatcagctgcgtgtacttaaaaacaataagcttgtgaaattcagaaaagaaggtaaaaacgtattctattccttggcggatgaccatgtcaggcgcattatagaccaaggcattgagcacgtagaggaataaacccggcggcaagcggccgctagaataatttttatgaggtgctgttatgaaaaagagcttcaaattggtagatttggactgtgccaattgtgcgcagaaaatggaggatgccatcaaaaggatcgacggtgtccaagatgcgaacgtcagttttttgatgcagaagatgaccttgaccgcagaggacgacaggttcgacgagattgtccagcaggcagtcaaggtgtgtaaacgggtggagccagactgcgaaataaaactctaatcaggcagccggggaatttccgcccggctttttccccttgagagatgcaggagagaaaaccatgacgaaaaagcaaaaaaagatgctggtacgcatttttataagcgctgtattgtttttagcggtcgttttgatgccgctggacggagttgaaagaatcgcagcctttatagtgccctatttggtcattggctgggacgttttgtggaaagccatacgaaacattgcccatgggcaggtttttgatgaaaactttctgatggcgctggctactgtgggcgcctttggcacaggagaatttccggaggctgtggccgtgatgctgttttatcaggttggcgaatggttccagggatacgcggtgggccgttcccgccaatccattgccaagctgatggatatacgcccagattatgccaatatagagcagaatggtaagcttgtggaggtggacccggaggaggtttccattgggcagaccattgtgatcaaagcgggagaacgtatccctttggacggcattgtgctggaaggaaagtctaccgtggataccgcagcgctgacaggggaatccttacctagggatgtggacccgggcgacgatgtaatcagcggctgtatcaaccagagtggattgttgcgcgtaagggttacaaaggaatttggcgaatccacggtggcaaagattttagatttggtggaaaacgccagcgccaaaaaggcaaaagcggaaaactttattacgaaatttgcccgctactacacgccgtgcgttgtcattggcgctgtactattggggctggtaccgccgttgattgtgggcggatggacgatgtggattcagcgcgctttgatcttcctggtcatttcctgcccatgtgctttggtaatttctgtgcctttgagcttttttggaggtatcggaggagcctcaaagtgtggtatcctagtaaaaggtggaaactacctggaagtgctggcaaaaacgcagactgtcgtgtttgataaaacgggcacgctgacaaagggcgttttcaatgtaacagccatccatccggagcagtgttctgaagcagagctgttggaaatggcggcgtatgcggaaagctattcggatcatccgatttcccgttcgcttaaagaagcttatgccaaggagatagacgctttacgcgtatcgcaggtggaggaaatctccggccgtggcgtacaggcgacaattgacggcaaacgggtctgcgcaggcaatgataagctgatggaggatatcggtgttccatggcatccctgtcatagggttggcacgacagtgcatgtggccatagacggcgtatatgctgggcatattgtcatatctgacgaaattaagcaggatgcggccaaggccattcggcagctaaaagcagagggcgttgaaaaaacggtcatgcttacgggtgatgcaaaagccgtaggcgaaagcgtagccaaggaactgggcctggacgaggtatacacgcagctgctgcctgcggacaaagtggagaaggtcgagcagctgttgaatcatcgccaaggaaacggaaagctggcttttgtaggggatggcatcaatgatgcgcctgtgctcagccgtgcggatcttggtattgccatgggtgcgatgggttcggacgctgccattgaagcggcagatgttgtgctgatggacgaccagccctctaaaattgcaactgccatacgcattgcgaaaaagacattgggcattgtaaagcaaaatattgtgtttgcgctggccatcaagggattgttcctgatcatgggcgcttttggggttgcaaatatgtgggaagcggtatttgccgatgtaggcgtggctgttatcgcgatactcaatgcaatgcgtgcactcaaggtagagacattgaaataaggcgatatgccgaaatagaaggaagggagcggtatgctcagattggagcatgttgcctgggatttgccgggcggcagcgcgatcatcaaagacataaatttacaattggaagaccggaaactcatcgtggtaaccggcccaaacggaggagggaagaccacgctggcaaaactgattgccggtgtggaaaccttgacctctggccgtatcgtgtttgacggggaagacatcacacaaatggatgtaaccctgagagcgcaaaagggcattgcctatgcgtttcaacagcctgttcgtttcaaaggattaacggtacgcgatctgctggagctttccgtgggatatgccttagacgaggaaatggtgtgcgatttattgggcaaggtggggctttgcgccaatgaatatgtcgatagagagctcaatgcaagcctttccggaggggaaatcaaacgcatagagattgcctctgtgctggcgcgcgacgcaaagctgtttttgtttgatgagccggaagcgggcatcgacctatggagctttagcagactggtagaaactttccagcatttgcaaaagcagggaaaaggtacgctcattatcatttcgcaccaagaacgtattttgtccattgcggatgaaatcgttgtcatcgatgatgggcgtgtgcgtgagcatggcccgcgcgaggagattttgcccaagctgtttggcgacgaaaaggcggatgtttgcccgcttgggaaggaggcccgtgcgttatgaacaaaattacggaaatgctgttgcgctcagtttcaaattataagggtgaattccgaggcgcatttaacatccgagaggatgggcagtgcgcggccaggcattccacagaacatatcagaatacaatccaaaaaggatgcgccgggcctggaaatctatattgacgccaatacaaaggacgaaacggtgtatattcctgcctgtgttacacacagcggcgtagatgatttggtttacaacgacttttttgttggagaaaatgcggatgttaccattgtagctggctgcggcgttcatacagagggggaagaggaggctcggcataacgggattcatagatttttcctggaaaagggcgcaaaggtactgtaccaagaaaagcacattggcacagggaatggcggactgcggcgcatcgacccggtaacagatgcaacgctggctgaggatgcggtgctggaaatggataccgttcagatccgtggcgtggataccacgacaagaaaaaccacagcgacgctggctgacagggccaagatcgtggtgcgggaacgcattatgacagatggcgaagagacggcaaagacggaatttgaggtatggatgaagggagaggactgccgggcagacgtaagctcgcgttctgtggcgcgaggaagatctaagcaggattttatctccatcatccatggagaaaaccgatgcagtgggcattcggaatgcgacgcgattttggcggatcaggcgacggtcaacgcaacgccggcattgtatgcttcgcatgtggatgcagcactgattcatgaagcggccatcgggaagatcgcaggagaacagatcttaaaacttaagaccttgggcctgacagatgagcaggcggaagaaaagattatccaagggttcctcaaatgaaacaaaaaaggacgcctcgggcgtccttttttattatatgaacgcggtggcttgttggtaaagctattggtagtagtcctggctgccaccaaacccacagggaataaataaaagattcttttatttcgatgcaccaggcattgccgttgtatgatttggcgggaagccccttatccgttcaggagctgacaaaaccaagctcacaagacgggatttcaaatatggaacgaatgacattggccaactgcgctttgttttctgtttggctgtcgtagatcaatacagctttcctgtcgaaagaagcctccttttaaatcgagtataacacgggatatctccaaagaaaggaatgtggtgtgtctttttacaaataaaggacacggaggtacagacatatactgatatttatgaggtttatttggttttagtatctgttgtccggccatgaaaataaagacaagcccagcaaaaccacatagctactggactttttgtgaaagacacatgaaaagaattttttggcttttcggaaatggggctcgaaccctcacagcttgtagaaagttggtagagactgcgaggcgttgtgagggcgtttacaaacgacaggagagccgagcgcggctttttgcgaaagaggaggagcagcggcatgagtgcgccccgattttcatacaaaaatcggagcaagcgatacagagcttgctccgacgtggcggagaaggtgggattcgaacccacgtgccgggaatccggcaaacgcatttcgagttttcctatcatctgttaattacatgctttttcctgtcagcttcagtcagccctgtacgcccgcaaagccgcatgaaatctgggctttttgagcaaatcgcccgaaaatactgaggaatcacccatcggttccaatccacgatttttccgcttttggaaagaactgcggaaagaacggaaagaacaaaaattgaaaggcaatacacggacagttcgaataccggcaaagcttttagaaatacgaggtgtattgtcatgaatgaaaacgcaatcaactgggacgacgttcccgacgtcatcacgaaggatcagctgtatcgcatttgccatatcagcaagtccaccgccctgtacctgctccaaagcgggaagatcccctgcgagtacacgggtaagaaaacaagatgctacaaaatcaagaaggaggacgtcatcgcttatctggaaaaccgcaaagtgttccccgaaagctattccgccccggcgggctggtacaagggcgattataccgtgcagatggaggagcaggttcccaaaatcgtgctggagcatttgcggctgtattatacagagctgctctccggctatcccgatgtgctgaccacgcagacgatttccgaaatcaccggctacggaaaaaccgctatcaataactggtgcaatcaagggcacatcaagtcgtttcggaaaaacaatgtcaaccacatcccgaaaatctatttggttgagtttttctgctctacctactttcgcaccatcacccgtaaatcgccgtggcacatccgcaccctgcaaggcttttcaagctggcggaaaatccgtgacctgcacacggcagacagcgaaggaggtgcggagtaatgacaaattttctggaagagctgtactacggaaatcttgacccgcaggcgagagggtatcgaaaggacagcaacatcttgaaggtttcggagaacatcaatgagctggaagaaaaaatcacgcagcgtctgaatggcgaggaaaagaagctgtttcttgatttctgcaatgccaacagcgagctgatgggcgaaagcggtctcgattcctttctcgtcggcttccgcctcggcgcaaaaatgatttttgacaccttttgcagcgatgacgcaccgtttgaaagctacctgaaagactgaaaggtctgtcaaatcgcagtttagtcaattacgaattggtcaatcataattgattaaattttcaatatacaacgtgcgataatcaaaatcgcacattcgaaaagcaaagcctcctttggtacaatgatggtatcaaaggaggttttgcattatggctaaaacaatatttgaacaaatgggcggcacatataccatgcagagcgactattgtctgcctgatcttacattaccacccgaagaagaacgccccatcggcgtgtggggacaacgccgcctgcggtacttaaagcaacaccacaaaatcctttactgcaacctgctcacttcaggcaagctccactcccatctcgctgatgttgaggaagaggcacagacactctttcttcggctggtaaaagagtacgctgaaaaggaaggtgttaccgaacagcttaaggc

SEQ ID NO: 2410 - DNA, 25579 bp, Unknown
  16S sequences of unknown bacteria
tgcctttgacagcgggagcgtcctttatcttctgcggaagtgtatggaaatctctttgctgaccgcctttgcggtgctgccggtgctggcggctgctgcagcgcaaaaggggtatattcttcccgtctgcttgacactggtttataccttcctcggctttatcctcttaatggtgaatatgtacctgcatccgctgtccagtatgacagccattgttatgcgggatattccgggggtcgtgattgcccagccgctcaatattccgggggcgttcctctgcataggcgtgtggggcgttgcttccgtcttgctggctggggttgctttgaaaaacagaacgtgaggtgcgtttgcaatgggacttttgctttgggcggagcgccggaaacttcgccgttccaaaatcttgtggattgccgggtttgccacagttatggtggcgttaattgtctttgcacagggacagtttgcattctatgacaaccgctatatcgacggctccggatggtttatgacagcagcccaatcccttgccaccttttatgtactccctgcggtcattgctctgctgggaagctatatgatttgccgggaagaacaggaggataccctgaaatccctgcggctcattcccgtggaggaagtgaagctgacgcttaccaaaatggtgctggcccttgtgttcagcgtcttactctatcttctgctttttgcgattacctttctcgttgaggctgttttgcactttgaagctctttccatcggccttgttttgggaaccctgaaaacgtatcttctggacggaatcggcgtgttctttgccattgctccgattatcgctttggtggcccggatgaaaaaaggttactggctagcgctggtatttgctgaaatttattcgttcgccgggctattcgcaagtatgtccgatcagttaaagatggtatatcccatgacagccgttttcaacatttccggctattacgatgcaagcatggttcaggtttttatcggcattgtagttctgctggtctgcgttgttctggcgctgttcattctgaaagggttgaacaggcaagcaacgtagcagcattttcttgctgaaatcggtaagagcgcgatacgcggcgtttctccatataccatcaaaagcgaggatttggagccgaagggctccaaatcctcgtttgcttttccgggcgtttttgcacaacccgcaaaaattgttttgaaaaattcttacgccttgtacttcgaccgcgcaacatagtgcgtgtgcaaaagctcgtgggccttgtggctgttgggcttttcgaaatagtcggcatagagcttctggatcgagggattctcgtgcgacttgcgcagggtcttcgcctcgtcctcatcgtaaagcgccttggcgcgcagcacgcgcgggtcgtggatttcgcgctcggcgggagaaacgatcggctgaccgccgccgtttacgcagccgccggggcagcccatgacctcgatgaaggtatagttcttttcgccggccttcaccatatcgagcagcttgctggccgcgccggtggagtgggcgatggcgacgttgatcttcgtgccattgaggtcgatttccgcctctttgatgccttccaagccgcgaaccgcctcgaagttgacgttctccagcgttttgccggtgaccacttcataggccgtgcgcagcgcggcttccattacgccgccggtcacgccgaagatgaccgccgcgccagtggaatcgcccagcatctcgtcgaaatcgccgtccggcaggcgggcgaagtcgataccggcctgcttaatcatgcgggccagctcgcgcgtggtgatcacgatgtccacgtccggcagcttttcatggcccagctcatcgcgctggcactcgaacttcttggccgtgcagggcatcacggaaaccaccacgatatcccgcgggtcgatgccgttggtttcggcgtagtagctcttgaccaccgcgcccatcatttcgtgcggagatttgcacgaggacacgttgggcaggaattccggatagaaggtttcgcagtatttgatccagcccgggctgcaggaggtgatcatcggcagggtgccgccgttttgcaggcggtcgatcaactcatagccctcttccatgatggtgaggtcggcggcaaaatccgtgtcgaacaccttgtcaaagcccaggcgatgcagggcagtggccattttgccggtcacgctggtgcccatcgggatgccgaactcctcgcccagggcggcgcgcacggcgggcgcgggctgcacaaccacgtgcttggtgggatcgttcagcgcatcccacaccttctgggtatcgtccttttcgtggagcgcgccggtggggcacaccgcgatgcactggccgcagttgatgcaggcgctgtcggcgagcgaatcgccccaggcgcactcgatgctggtgttgaagccgcgcttggccgggccaatcacgcccacgttctgcaccttgtggcacacggccacgcagcggcggcagagcacgcacttggtgttgtcgcgcacgatggagggagacagatcgtccacggtgtgcggggtcatagcgccctcaaagcggttttcatccgtcacgccatattcctggcacagagcctgcagttcgcaatgggtattgcgcacgcaggagaggcaggacttgttgtggttggagagcaacagttccaggttcatcttgcgggcggcgcgcacggcgggcgtgttggttttcaccaccatgccgttcgccgcgggcagcacacagctggcggccaacgcacggccaccggtatcgaccacacacagacggcaggcgccgatttcgttgatgcccttcaaatagcacagcgtggggatgcggattccggcagccttggcggcttccagcacggtggtaccggcgggaaccgttaccgacacgccgtcaatcgtcagcgtaatcatattcatatgtttgccatcctccttacttcttcgagatcgcgccaaacttgcacttctcgatgcaggcgccgcactttaagcacttttccttatcgatcacgtgcggttccttcacgctgccggaaatcgcgcccgccgggcatacgcgcgcgcaggcagtgcagcccttgcacttggcgggatcgatggtgtaggaaagcagcttgtggcacacgcccgccgggcagcgcttttcgtagatatgcgcctcgtactcgtcgcggaagaagcggagggtggaaagcaccgggttgggcgccgtctgccccaggccgcacagcgcggtgttcttgatgttctgcgccagggtttcgagcttttcgatgtcgccatccttgcccttgccttcgcagatgcggttgaggatttccagcatgcggcgcatgccaatgcggcacggcgtgcacttgccgcagctctcgtccacggtgaaatcgaggaagaagcgcgcgatatccaccatgcagttgtcctcgtccatgacgatcataccgcccgaacccatcatggaaccggccgcgatcaggttatcgtaatccacgggggtatccagcaggttggcgggcaggcagccgccggaaggaccgccggtctgcacggccttgaactttttgccattggggcagccgccgccgatatcgtagatgatttcgcgcagcgtggtgcccatgggcacttccaccaggccggtgttgttgatcttgccgcccagcgcgaacaccttggtgcccttgctgcgctcggtgccgatggaagaaaaccactcccagccgttgaggatgatctgcggcacgttggcataggtctccacgttgttgagaatggtcggcttctggaacaggcccttttcagccgggaacggcggacggggtcgcggctcgccgcgcaggccctcgatggaagccatcagcgcggtttcctcgccgcacacgaacgcgccagcgcccaggcggatgtgtacgttaaaattgaagttcgtgccaaagatgccttcgcccagcagcccatacgcgcgggcctgttcgatggcgatctgcaggcgcttgacggcgatggggtattccgcgcgaacgtagatatagccctcgtcagagccgatggcgtaggccgcgatggccatggcctcgagcaccacgtgcggatcgccctcgagcacggagcgatccatgaaggcgccggggtcgccctcatcggcgttgcagcagacgtatttcttgtcgttatcgtaattgtaggcaaactgccacttcatgcccgtggggaagcccgcgccgccgcggccgcgcagaccgctctttttgatcgtgtcgatcacttcttcgcgggtcatctcgttgagcaccttgtacagggccttgtagccgtcgaaggcgatgtattcgtcgatgttttccgggtcgatcacgccgcagttgcgcagggccaggcggcgctgcttctggtagaagtccacgtcgtccagcgccttcacggcgccgctttcgtcgatggaacccttttgcagcaggcgggtgacgatgcggcccttgatcaggtgctcggagacgatttcatccacgtcttccaccttcacatggctgtaaaacgaaccctccggatacaccagcaccacggggccggcttcgcacaggccgaagcagcccgtgcgcacgaccatgacctcgttttccaggccattttcccggatcagcgtttcaaagcgttccaggatattgtgggagccggaggacgtgcagccggtaccgccgcagaccagaaccgtggaacgatacagattcatgcgcttttcctcctatcactgatcctgcgcaccgatggtatattcggtgaccggcttgccgttgacgatgtgctcggtcacaatgcgcggcaccatgctggggttcaccttcacatacgtgaccttttcctggccgggcagcgtgatttccaccatcggctccaggcggcacatgccgatgcagccggtctgcgccacggtaacgttggaaaggttgcgctttttcacttcttccacaaaggccagcatcaccgggcgtgcgccggcggcaatgccgcaggtcgccatgccgacgaccacgcgcgttccctcgtgttcacggcgcaggtttacactatccagcgttttttggcgaatggcttccagctctgccaaagttttcattgggtctccacctccataatgttttccgtgagaaaatccttcacccaagcgagcacgtccggcagattgagcggcaggccgcccagcgcggcgcgcacctcgcgcgtgtcaaacacaaacgatttgccgtctttttcataggtcagcacaaattccggcgcttccggcgcggaaatgagtagcgattgcatcgtgcccaccaagtcgcccatgggcggcaagtccaggtgagaaaattgaaattccgcccgcagcaccgtaccttcccccaccttgctttgcagggtgaaacagccattggtcatatccgcgagctgcttgacgagcgggatgcccaggcccaccttccgcgtggtgcggctggtggtgaatggactagtcacccgcgcgaccatttcctcgctcatgccgcaaccgtcgtccttgacctcaaggacgagacggtcggccaccgtatcgatccgaatgaggacttcgatttttgttgcgcccgcgctgatcgaattctggacaatgtccagaatgtgcatggccaactccggcatagcttagcggtacttggcgagaatgcccgggatgtctgccggcgtgagcctgccatagacatcatcgtcaatcatcataaccggcgcaaggccgcacgcgcccaggcagcgcgtatccttgagcgtgaacttcgcgtccggcgtggtagagccggcgggcacgccgagctcttcgatcagcttttccaaaatgttcttagaacccttcacatagcacgcggtgcccaggcaaacgccgatcacgtgctcgccgcgcggctgcagggcgaactgcgcgtagaacgtggccacgccatagacttcgctgagcgtgacgcccaaaccctcggcaatgcggatttggatatccttgggcacatagccgaagatttcctgcgcctcctgcaaagtgaccataacggcgcccttctggcccttattcgcctgaatggccgcatcgagcctgttgagcttttcttgctcgtgcataggaatgaaacctccctcgcgtttcgtttcagcacgaaatcccttcgcgcacaacgcgcaaaaggcttccgacccaccatcttgtattgtatcatatttggcggggtgtggttttcattatacggaaatttaaccgaaatgtcaagcgtaaaaccgtggcaagagattgaagtatggcacaaaatttgcaggcggacagaaaaagcccaaaatcgcccgcgagcgccgccgggtttgcgccggcttttcggataaaagggagccgctgcgttttgcagcggcccgcaaatgggtcgtccaatgcctttgttgcggctacggggtgatccaggcacggtcagcggcggcaggcggcaacgggcgcggttccgcagcgttgtactgctccaccacccagttcatatcgccatattccgccacgccatccacaaacgcgtcccattcggcgatatcgcgggtgcccaggataaaggccgtgatgttttcattcacatacgtggtcaccgctgtgcggatcaggtcgatatcttcctgcgtgtaatcatcaaagatcggctccagcgcgggggtatacgtttcgtattcgccggacacgagcttttccgctgcgacggtataagccgtattgatcacatcctcattggctgcacacagggcgtcgccaatggcatacgtggagcagaagggatccgtaaaatacgggataatgcgggcaatgccatacttttccttcttcgtctcatcgtccgcgttcagatattcctcagtgtaagcgcgcttgccatcggcatccaccgtgtaggtaatgccctcttcgccccaatagtagtgctgcgcgtattccacagaggaaatcagttccaaaatggcgcagcagatttccggatgctcggtattggcattcacaaaatagatccagcccgtctgatccgagcgatagtcggtgttaataaacggtaccgtgtcgccatgggtcggcggatccatatacgtgatgttcaagccgccctgcgccatgcggttggcatccgtggcatacggccgggtaaacagccaggatccactatagtacgcctcatcgcgcatcgcgtcgtcccaggtgagcatatcgctagcgaggtagcccttcgcataggcgtcggcaatggcctgtgtaacttccttaaattcttccgaatacgcggcgagcatgaattcccattcgcccgtgtcgtaattgtagcggacattgtcgggcgtggcgcctttcagaccaaagatggcagaaaacgtggcgtagatttcgcccagaccccagctatagatcggaagaatgccataaacgccttcttcctgcgggcacaccacttcgcagcattccatcatttcttcatacgtggtgggaactgccagattgtacttatccagcaaatcctggttggcataccagctctggctgataccatcataggtgcaagtgaagaacatatacgtcgcgccatcgcggtcgtagcgggacagatgcgggaactgttcgcggcgcgccatgtattcgggcatgtattccgcatagtccagcaggttgagcgcaatgcccgtgtcagcatagttgcggtcgaaatcgtccggatatcgatacatcatgatatcgggaatatcgcccgagctcatgtagagattgatcagagtatccgtatcgtcggcagggatttccgcttcgatcttgatgttgcccagcttgcccttcacccactggccgaacatgttgtcccaatcgtaatcagaaaagctctgccagccgagcatcgtgatggtgatctcatccccctcatagggcagcacgctcgcgctctccgcaaaggctgccgtgcccgacaaaagcagggcgagcgccaggatgcaggtaaacgctttcttcatggttccaacctcccaattttttattctccattccggcagcgccggaaaaagattcgcattgtctgcgcctattctttgatggcgccgatcatcacgcccttagcaaagtacttttgcaaaaacggatacacgcacatgatggggatgatggccaccagcaccgccgcacagcgcatattttgctccgtggcgttggcgtggatatcgtagagcatattctgcgtatcagaattgaaggaaaccacgcacaacaccgagcgcagatacagcgtgaaaggcttcagttcatccttggaaagatacaaatagggcgtgaaccaatcgttccaacggcccaccaggccgaacaggccgaaagtggccagcaatgccttggacaggggcagtataatggtgaacagcacgcggtagtgccctgcgccatcgatatacgctgcctcgcgcagcgattcgggaatcgagcggaaaaacgtgcgaaaaatgatggtgttgtaggcgctcaccgcgccgggcagcagcatcacccatatggtgttgcgcaggttcaattgcaccatcaaataatacgtgggcaaaaggccgccgctgacgaacatggtgatcaccataaagatgttcagtccctttttccctaggaaatcgcgaacgacaaaggggaacgccgccaggctagtgaggaacagagaaatggccgtgcccgccacggaatagagaatcgtgttgaaataatagcgggcgatgccgtcgtcttccagcaccacgcggaaggcgtccagcgaaataccgcgcgggagcagcagtggcaaatcgcgctgaatttcggcggcgctggtcaaagaacaaatgacgcaaaaccaaatcggataaatgaacaccgcgcatagcacaataaagaacgccgtgttcgcaatatcaaacgcgctccagccacgcttcgccttttgcatacaactccctccttaccacaggctggtgtcgcccagcctgcgcgccgcgcaattggtgaccgtgagcagcaccacggagatcacggtggtgaacagccccgccgccgcggaatagctgtagctgttgccctggatacccttgcgataggtataggtgcccagcacatcggcagtggcataggttgcttcgttgtacatgagcaggatcttgctcgaatcgctgcccacgacgcctgggatggcgaaaatgaacaaaatggtgatggtcggcaacagcgaaggcagcgtgatgtgcacggcctgctgaaagcggcttgcgccgtcgatcacggcggattcatacaagtcctgcgaaatgcccgatatggcggccagatagatgatggaattgtagcccacacccgtccacaggctgctgccgatatacagcgtgcggaatgccgaaggaagcataaagggatttgtccaatcaaaccccatattccgtagcaccgaggcgatcgggccattgtcctggaatagcagtttcatcatgccgatcacgacgacggtggagataaaatacggcagataagaaatcgtctgcgtgattttcttaaagcgcggagaacgcatctcattgaacaacagcgccagcaatataggagccgggaacgaccacagcaaatttagtacgcccagaaccaccgtattgcgaaacactcgcgcaaaatacggatctgtgatcacttgctcaaaatagcggtaaagcggccgcgcccacgcgctgtgaaaaaagcccagcgacggcttgaactgctgaaacgccatcacaatgccatacatggggatatagctgaaaataaaaatcagaaccaccgcgggcagaaccatggtatacagcggccaattcctgcgcaaattcctctggatatacccgcgtttcctgtgggccgccttgccggttgctgcatgggacaagagcgcttcctcctttatccttattgttattcgatatgttcagtctatcataataaccaggctttgtatttatccgtggaagccaaggatattgtccaattgtgctatccttgcgcattgaccgggctgaaaacggcaagaacggacaacatataagcgccaaaaaacaatgacaaaattccatccttgcgctatgatggtaagcggatttccacaggtgatttttgccgcccgtttatcattattaaattataaagaaaggacttttttaccatgcaccgattgctcatcgtcacacgggaagaaagcgacttcagcaagatgctccaagcttgcttcgatgccagcgtcgtgccgccggattttgccaaagaagtggatttggacgcctatgacggttttgccttactgggcggcacgcgcgaagagcccatcgttttgcagccgccgcagcgcctgcggttggatgcgcaaatcggcttgggcaagcctttttttgcggaatacgtgcgcggtatccggcaggttgccctgctggataccgaatctacgcggtttcagcgcccggtttttatgggcatggatgcgtgcctgggggaatttccccgcggtgatattttggatgaacaggataacaatcgtttaaagctctatcgagcactgaattgcgaccggccaattttgcaatatgtaaaaacgccagagggcttttataccgtccgccatccagaagaactcgcggtcgattccggccagtttgccctttggttggatgaacccaatctgctggtgtgcgccttccggctgtgcaattgtgtccgcgcgcgctttgcaccgcgcaaaaaatggattcagttgctcgaaaatatcgttcgctttttgggtggggcgccggggaaaactgtagcgcgcgccatgatgagcggctattccctctctggcgatccctccatagaaaacgctttgctccgggcagcggaatggttcaaaaaagcgaatatgctggttgattatgaaaatcaaccctatagtgtgaaagaaggattgggttccagcgtgttcgcggatggtgcgcacccggtttcccatgaggtgcgcacagattgcgtgggagagtgcgccttgatgtatgaattgctctatcagcataccgggcggcaaaaataccgcgctatggcggatgggctctaccgcatgccacgggatatgcaaattgcggaaagctgcccgcaccgcggcatggtacgcggttcggccacgggctggtggggcgtgagctatcaggatgatacggcgcgcggcttcctcttcccgctgatgtggcgcgcgctgcttaccggggaccggagcgatttgccccgcgtggaactaacgctggattatctggcaagcaccactggctctgatggtttgcgagcggtgcgcgtggacttttttgaccagaacaagccggaagtggccgcaaccggcctgcatcgcgaacgcaaaggagatcgtttggaagatgtgaaatgggcatggggcggtggcatatcgggccgctattcgctggatgccctccggcacatgcctgcggacgtgcccagcgcccactacaatgccgcttaccttggtgcgctgtttatgggatggcgcattttgggcaagcgcatttatctggaaactgccctaaaaggcatggactccctgctagcggaatatcccttcaccgcgcgggagcacagtgaaaccgaagagctcgcccggctgctgatgccactagcgctgcgctattgggccacggaagaaccgcagcaccgggaatggattcatcgcgttgcggatgatttgcagcgcttccggaggccgagcggcgcatatgccgaatgggacacaggttacacagccacctgcgccggcgtgaaagaaggcgaatccagcgttctttctgccaacggcgatcccgtcgtcgatttcttatactcctccaattggttgcccatgggctatgccacggcctggctcgtgacgggggaggaaaaattccaccgcctgtggcgagagatttgcgcctattgcgccagcacgcaaattctcagcggcaatcctctgcacaatggcatatggccgcgcgcaattgacgatgaacaaaaagaagtttatggcgttcccaatgattccggctgggcgccttgggctgtggaaacgggttggaccatggcagaaattgttagtggtatgttgttggggcatttgccgcgagaacgcttcttgcagctggtatagcaaaagtggcccctggtcggccgctacaggtggccttctcgagggcttctgggcgcaaatgaggtgtgcctgtcctccaatgttctaacggaagaatagcagattccctcacaaaaaatggggtttccggtgaagtccttccccgggcccctttctccgctttgcccggcgcgcacgctggcatagaaaggatcgccctgcaaattggcctgataagttttctgatattccttgggactaatgccaaaacgcttgctaaacgcctttgaaaaggcgtgcaacgaggaatagcgcagcgtttccgcaatttccgtcacggataagcgtccctctttgagcaacgccgtggcgcggtcaaaacgctgccggtcgtaatattcatagagtgtgagcccaatttccgcgctgaacaaatggctcaggcgcgaatagctgtagcggaacacatccgccaaatcgctcagcttctcgatggaatcaaagttcttatcaatatagcgcaaaacttcttgcgccagctccgcgctgccatccacaacctgagaagctgagcggcgcgggaacatcatatgctgcgtttcgcggaagatccgcatcaaaatttgcgaaagatacgcctctatgctatagggaaataaatcccttctctccaaaagctcgctgaaaatcccctcaaaaagcggctccagtgcggcgaggcctggctgagaaattttcaccaccgcaccccgttcaaacagcgccgccaaactcctatatggttcctgtgcatttaaaaatgtgaaacccgcataataggtgcgcagaggatcggtatcgctggtgattccatcgtgcaaatcgccacgccgggtgaggatcacatcgccctgagccaccggataccagacgccatttacgcaatatttcccactgccagatttgatatagctgatctcgtgcgcctgttgcacatgctgcccaattcgatagcccggcgttgtgaggatatcgcccgcctggtgcaaagaaatgttttgcaaatcgctcatctcatccccggcaacgcaatggtaatcgtaatgatagcgggaatatttgatttgcgcggcattcgggttgtcgcagggcaaaatcatggcggcgctcacctctcttttcgctatccctattgtatcaaataccgcaagacaatgcaaggccgttggaaacagtttctcaataaggcaattttgcttatgctcaattgctacgcatagcctatgaatcccctccgcacagctcaagcgcgccagttttattcttgcgcaaattagcgggccattgccggtttccccgcaatggcccgccaggatagccaaaccgcgccgcgcgcttaagttccggcctgttccgccgcgccgccctgcaaaatccgctgaatttcgcccacaggcgccgccgaaacgggaatgttggcccggctggcgagcgctgcggcgatgccggccgcctcccccatcgcgacgcatatgggcatggcgcggtaattggaatgcgccatgtgcgaaccggaaatgtcccgcccggccagcagcaatccttccacattttgcggcagcaggcaacggtaagggatggtgtagctattgttcttgggaaaatgtttttgcacgcccgttttgtccaaaccagcgccatcgatgttgtgcacgtcaaaattgaagcaggcgtctcgcacaatccaatcctcaaacacccgcttttccaggatatcctccctggtgagcgtatatctaccgtgaaaatggcgggtttcccgcacccctaagagggacgccgagctgagcgcgtagcaatgctcaaacccaggcacgtattcccgcaaaaacatcacaatgggctggatttgcgagcggcacactgccgtgccccgcgtgagatcttccgcgcgcaagccgttgatatccgtgcaattcgtcatattgcaggtgatcacgcccggcaaggtcgtttcatagagcaacacatggccagccgggtgcggcagcttttcccgcgcgagcgcctgcaattcgcctttggccgtgtccaccgtggtttcaaaggagccaggcaagggcgcgcgcgccgtatccacgccgcccactttgaacataatggtgaccggctgcatcccgtggtcgccctccctacccagggtaaagggaacgtttgcccgggcggccacatcgccatcgcccgaagcgtcgatcgccgtatgcgccaaaatggcctggcggccgcccttgttttcgatgatcacgcccttgactgcgtttccctccataatgacgtccaccgccatggtatatagcaaaagctgcgcacccgcctctgcgagcatttccaggcagagcgttttcaattgctccggatcgatggtgattgtgcgcttgccgcgcaaatcgccctcgttgcgcatggccatgcggctgagaagctcctcataaaagtcgctgccaaccgacccggtaaagtggctcattagaccggatgtggcaattccgcccacattccccagcgcttccacaaggagcgttttcgcgccctggcgcgcggcgttgacggccgcggcaaagcccgccggcccggaccccaccaccagcacgtccacgctatacgcaatgggaatttgccgcggcgcttcctgataaaattgctgcatgtttttcgcctccaaattttgcgcatcggctatggcaaccgcgcttctcatcttccgcaaacggctatgcggaaggccttctattatctgtttgtattgtatcatatttggcaagcgcagcctgaagcgccccaaaatttaacccaacttttaagggcaaaattcaaaccgcgcattgtcttgcgcagcgcgcgcacgcatgatacaatggggtaaaaggagggcgcgccatggatttgcgagtgctaaaatatttcctcgtcgtcgcgcgggaagaaaacatcacaaaggcggcggaacttttgcacgtgtcccagcccgccatttcgcgacaaatcgcccagttagaagaagagctgggcatacaggcgttcaaacggagcaaccatcatatcacgctcaccgaagacggcatgctgctcaagcgccgcgcgcaggaaatgatcgatttggcggaaaaaacgcggcaggactttgcgcaaaaaaaggaagagatcgccggggaaatcgccattggcagcggcgagctgttcagcgtgcgcgcgctgggcaaaatgctcgcagattttcaggcgctgcatccaaaggtgcgctacaaccttttcagcggcaacgcggatcacatcaaggaacgcattgaaagcggcacgctggatctgggcctgctatccctgcccgtggacgtggcgaagtacgattttttgcgctttcccatgcgcgaagaatggggcgcgctggtgcggcaagacgatcccctggcgcaaaaaccttttgcgcagccagaagatttgcaaaacactcccatcctattggcggaacgggcaccggtgcagcacgagctggcaaactggtttggcgcgctttatgaccggctgaacgtcgtggtcaccttcaacctgctctataacgccgccatgctggtgcgcaacggcatgggcgccgccctgtgcctgcggctggattgccattacgacggcctaactttcgtgccgctatccccgccgctggcgtctggctctgtgctggtgtggaaaaagcaccaaacgcacgcgccagccgtgctggctctgctggcgcacatcgaaaaatcccttcgtgcgcccgcccaatagaaattctttttccttatgtctaagcattctttataagtattggacatgcgcatccatgccgggtataatcttcacagacgcaaaaaatggcaggggagaacgcatggtatgacgcgggaagaaatccacagggattatcaaattcccttatccatgatcaaagcctacgacgagtgggcgctttccggaagcaaaaccccgcaatgcagcgaggaagacctccggcggctaagcctgctggtgacgctccacgaagcggggttttccgccccagaggcccaggcgtatctgcggctggatggcgaggcgggcgatacccgagggcagcgccttctactgctgaacgcgcggcgcaaagccatgctggaagaaatccactgcgccgaaaagcggctggagcggctggacggtttgcgtttttcgctcagaaaccatatataagagacgggaaaggggattgggtatgcaacatcgcgccttgggaaaaaccagcctgatggtttcccccgtttgcatgggctgcatgggatttggcgacgcggcacagggccagcatagctggacgctcggcgaagcggattcccgtgccatccttttgcaggggctagaaagcggcatcaattttttcgacacagccatcgcctaccaaagcggcaccagcgaacaatacctaggccgcgcgttaaaggatttcgcccggcgggaggaagtggtggtagccacaaaatttctgccgcgcacacaggcggaaatcgaaagcggtgtcagcggacaagagcatatccagaaaatgctggacaaaagtctgcggaacctggggatggactacgtcgatttgtacatttaccacatgtgggattaccaaaccccgctcatcgacatcatggacggcctaaaccgcgcagtaaaggcgggcaaagcgcgctacatcggcatttccaattgctttgcctggcagctatgcaaggcaaacgcgctggcggagcgggaaggctgggccaaatttgtcagcatacaggggcattacaacctgatcttccgcgaggaagaacgggaaatgattcccttctgccgggaagaaaacatcgcgctcaccccttacagcgcgctggccggcggacggcttgccaaacagccgggtgaaacctcccgccgcttagaagaggatagctatgcccacttgaaatatgacgctacgcaggcgcaggacgcccaggtcatcgaccgcgtacacgccctcgcgcagcggcgcggcacgagcatgaccgccatttccctggcctggctcatggccaagggcgctgtgcccgtggtgggcatgacgaagccgcgccacgtggaaggcgcggtagaggccagcgctttgacgctgacggaggcggaaatcgcctggctggaagagccctatgtgccgcacgcgctggtgggcgtgatggcgcaaaacaccgccgccgcggcaaaagagccgcatgtgtggtccacaggcaagcaaaatatttgaccccgcgtcgtttgcgcggaggaataccacccattctgtaggaggtctgacacgatgaaaaaaatgtctgcgctcattctcgcgctcgcgctttgcgccgcgcccgcttttgccgaagccgcgccacagccaagcccggaagcggctttcgcgcccacggattccaccattctggtggcctgcttttccgccacgggcaacacctggccgctggcggaatatgccgccgaattcctgaacgccgacctgttccgcattgagccggaaatcccctatacggaggccgacctcaactacggcgattctgacagccgggccaaccgggaaatgaacgacgaaaccagccgccctgccctcaaggccaccgtggaaaatgtggcgcagtacgacacgatcctgttgggcttccccatctggtggggacaggccccgcgcctcatcgaaacctttgtcgaggcgcacgacctttccggaaagaccatcctgcccttttgcacctccggtagcagcggctatggccaaaccggcgaaattctcgccgcgctcaccgatgaaaccgtaacctggctggcgggccgccgcttcccggctggcgccacagtggaagagatcgccgcctggctgcaagaaatggcaatcgagccttatgcgccaagcgaagaagaataggaggcatgccttatggccatccggcaaaccgctggccgcgccagcctgggcgagttcgcgcccaaattcgcgcaattgaacgacgatgtactctttggcgaagtgtggagccgggaggataaactctccctgcgcgaccgctcgattgtgactgtaaccgcgctaatggcgcaagggctggtggattcctccttccagttccacctgcaaagcgcgaaaaacaacggtgttacccgcacggaaatcgcggaaatcttcacgcacgcggccttttacgcgggctggcccaaggcctgggcggctttccgcatggccaaagaagtgtggacggaagaagaacccgcgcaagacgccaaagcggcgcacgccaaagaaatggtcttccccatcggccagcccaacgacgcttatgcgcaatatttcattgggcagagctacctcgcgccgctgtccaccagccaagtgagcattgccaacgtgacgtttgagccgggctgccgcaacaactggcacatccaccatgccgagcagggcggcggacaaatccttgtgtgcgtggccgggcgcggctactatcaggaagaaggccaggccgcgcgcctgctcacgcctggcgacgtggtgaacatccccgcggacgtcaagcactggcacggcgccgcgccggatggctggttctcccacctagccatagaggtgcctggcataaacggctgcaccgaatggctagaaccggtggatgatgaaacgtacagcaaattataaaaaacgtttgcgcagcccccaatcccctcgggatttggcagggctgcgcaaataaaaatgaattgcgcgcatccgcccgccgcccaggaaaacgcttttcttgcggcgcaaatctagcgaaacaatcctcttgctcccagaattccgccgccaattttttccaaaaactgttccggcgtggggcactgatcctcaaaccccaattccttccataaagcggcccgcccgttttcttcaaaccgcttttgatacgcgtcctcaatggaaatctgcatttggcggtaaacttcctccggggttgtattgtgccttgcggcgatttgggccaatatcgtattgaaatccatatccttatcccctattcgcatgaaattttagaacattcgcaaatcaaatttgtatttattgtattgacctattcttctatgagaatacgaatggcgttcaatattttgcttctttctcgaagcggcaaacgagaaatttgtgtagacaattcacaagctatgctttcttccacatggtcgaccacgtcaacaagtaaggcatcggcagatacgcccaatgcgttggcgattgccacaaaggaatccaaattgggcgttttcaggccgcgttcaatgacgctaatgtgcgtaggactgagatcgaccatcgctgctaaagcttcttgcgtcaatccccttgcctctcgggccgctttaatacgttgcccaacgatttgcgcgtccatcccgtcgcctcttctttcagcccactttttgcttattaccagtatatctggtacttccttctaaatccagaatccagagagctgaaagtcgttccatagaacaaagacacctttatttctttgtttcacacacgaaattgtattctattttatgtagtcaaaataaacttagcaatccattatgacgccgctattgtaactccgcgcaatcggaaaatcgtgcaaaactgttagcttcctcgtacttatacaaaagaggtcgccaaatccaggcgccctctttaaagcgcagaaaggaattttatttcctgcatctcagatttatggcggcagcgcgcgtaaagcgcaaaacaacccttcagtcagcttcgctgacagctcccctttcacaggggagtcttttgcatggtgctacaccacgggaagtagcaacaatcaagttcttgtgcaaaaaacagtatgcaaatgctggggttaatggcagaatcaaacaacgcacaagtccaatggccaaaaaaatcctttggatagtacgcattcatgcgacacggcagcgcccaaaaggctccccctttcacaaaggggagctggcggcgttagccgactgaggggttcttgcatcacgctgccagcgaagctgaccaagagagaattcaccaatcacaagattctgcaatttcgaataaaatatcgactttaccaatgcgctggtgcccggcgcgcgtcgcgcgccgggcacactgctttcccagttgttacgcgaggcgcgcgcggatctcccgcaggaaatccatggtgttgaccgcgcgggccgcggagccgatcagcgccgcaaggtcgcgggtgacgcagccgctttccacggtggcgatacatgcctcttccagccgggtggcaaaggaagcgagcgcctcgttgccatccagctcgccgcgctttttcagcgcgcccgtccaggcgaagatcgtggccatgggattggtggaagtttcctcgcctttgaggtgccggtaatagtgccgggtgacggtgccatgcgcggcctcgtattcaaacgcgccgctggggctgaccagcacgctggtcatcatggcgagcgagccaaaggccgtggaaaccatatcgctcatcacgtcgccatcgtaattcttcagcgcccacacgaagccgccctccgagcggatcacgcgcgcgaccgcgtcgtcgatgagcgtgtagaaatacgtgatgcccttttcctcgaacgccgcgcgatagtccgcgtcgtagatttcctggaagatcagcttgaaggactgatcgtaggtcttggaaatcgtatccttggtggagaaccacagatcctgcccggtttccagcgcatagcggaagcaggaatgcgcaaaggcgcggatggacgcttcggtattgtgcatggcctgcagcaggcccgggcccttgaaatcgtgcacgggcgcgctgatgaccgccccgtcttcgccggtgaaggtcagttccgcatggcccgggccgggcacgcggatttcgctggccttgtacacatcgccataggcgtgacgggcgatggtgatgggctttttccaggtgcgcaccgccggctggatgtttgccgccagaatcggcgcgcggaacaccgtgccatccagaatggcacgaatggtggcgttcgggctcttccacatttccttgagaccgtattcctccacgcgctgcgcgttgggcgtgatcgtggcgcacttgaccgccacgcccagccgcagcgtggcctgcgccgcctcgacggtcacctggtcatccgtctcgtcgcggtgtttgagacccaggtcgtagtattccgtgttcagttccacgaacggctccaaaagctcctggcggatctgccgccagagaatgcgggtcatctcgtcgccatccatctccacgatgggatgggccataggaatcttatgcatggttttgccccctttgcgcggcataatggttgatgaggcagccttccatgagcagcgtgcgctcctcgggcgaaagcgccttcagatacagcgtgatatcgcgcgattggccatcgcgcacgagcacggccgggaattcctccgcgccggcgagcaggcgttcccgcgcgcccttcacataaatccagtcgcccacttccaggcccatgggttccgcggtgaagggcagaatgccccagttgatcaggtttgcgcggtagcggcgcgtggcgtattcttgggcgatgttcgcgatgccgcccaacacgcgctggcacgaggccgcctgttcgcgggcggagccatcgcccgggcaattcgcccagataccggaaccgatggtcgtctcctccgccttcgcgcccaccagcgcgagaatggcctgcgcgtccgcctggccgtcgcgaatggccttcgagcggcccacatagccgggatcgcgccgcgaaagcgcgaattccgaaagccgcacggggttggaacgatagctcgacgtttcgccggacgggatcagctcgtccgtggtggtgactgcgtcgttgagcgcgctggcgacgccaatgagcacatcctgcttaagggcggcaaaggcgggccaatcggcgatgttggggccgaagcgcagcggcgcgtccttttgcggatggccaaagccatagtacacgttcttctgatagatctccccatcgaacgagccctcgtccgcccagtcgcgcgcgtagtcgatcgcgctggccggcgtgagcacgccgccgttgagcgccgtggcggcgatggagcgcgcgtccatcagcgcgacagccgcggtctgcccctcagcgggcttagagccttcgcggttagggaagttgcgcgtggtatgccgcgcggaaaggccctcgttgcgcggcacgtcgcccgcgccgaagcagggcccgcagaagcagggcttgaccgttgcgcccgcgcgcatcagagtggacaggtgcccgctttcggccaacgccagattcaccggcaagctcgcgggatacaccgagaacgggaagccgcccacgctcctgccgcgcaggatggcggccgcctcggccacgttctggtacaggccgcccgcgcagcccgcgatcacgccctggtccatctggaagcagccgttgtgccacttttcccgcaaccacggcgtatctttgaggatgtccggcgcattttgcaggaattcctcgatggtataggcgttcgaaggatgatagggcaaggcgatcatgggcttgagcctggaaaggttcagccgcacaagcccgtcgtaatacgcaccctcctctggcgccagcgcgcggaaatccccttcccggccatgccgggcgtaaaatgcccgcgtgacctcatccgtcgtccaaatggaagaaaggcaggcggtctccgtcgtcatcacgtccagcgccaggcggaaatccatgggcaaggcgcgaatgcccgggcccacgaattccaaaatcttatttttcacaaatccgttctgatataccgcgcggcacagggccaaagccgcgtcgtgcgggcccacgccatggggcacttcgccctccacgtataccaggatcacctgcggctcgcgcagatcgtaggtctgccccagcagctgttttaccaactccgggccaccctcgcccacgcccatgcaacccagcgcgccatagcgcgtatggctatccgagccgagaagcatgccgccgcatttggccatggcctcgcgcgcgtactgatggatgaccgccatgttggccggcacataaatgccgccgtattttttcgccgccgaaaggccgaaagcgtggtcgtcctcattgatggtgccgcccaccgcgcacaagctgttgtggcaattggtgagcgcatagggcagtgggaattccgtcaacccactggcgcgcgcggtctggatgatgccgcaataggtgatgtcgtgcgaaatcagcgcgtcaaagcgaatgcgcgcgttttccacattcccgcccgcgctgtgcgcgcgcaaaatcccataggccatcgtacggccgcgcgcgctggcgtcttttgccgccgcggcaatgggcgcgccgtttacaagatgaacctctttgtccactagcgttaccataaaagcattccctcctgcatacattatagcataatcatccctttacttgcaagaagccttcgtgcttcatccgaaaaatccacataaactttgcattccaactcttatttgcaattttacaaaccaccgtattgcaatcgccctgcaaatcgtgtatactggttgcaatagactcttgccccgggaggcgattcacttgcaatatggacaggacgtactcaaccaatacgtagccgagctgtgcgaagatgtgaagagcgcatattccatcgatccccgccagttcgagcattataacatcaaacgcggcctgcgaaacgccgatggcacaggcgtgctcgcgggcgtaaccgccattggcagcgtgcagggatatcagatggtagacggcgaaccggaacccatccctggcaagctgtattaccgcgggtatgacgtggaagatatcgttaccgcgcacatgaacgacggcacctttggcttcgaagaggtaatttatcttttgctcttcggccagctccccagcgaaaagcagctcaaacaatttgatacggtgctttccgccgcgcgccgcctgccgccgggcttcaccgaggacatgatcatcaaagcgcccagccgcaacgtgatgaacaagctggcgcgcggcgtgctctcgctgtattcttacgaccgcaacccggacgatacttccgtggaaaacctggtgcgccagtccattgaactcaccgggcgcatccccgtgattgtggcgaacgcctatgccgtgaaaaagcattattacgacggcgaatcgctttacatccacgtgccggatgaaaacctttccgtggcggaaaactttttgtatatcctgcggccggacaagcagttcacagaactggaggcccatattctcgacatgatgctgatcctgcacgccgagcacggcggcggcaacaactctgcctttacctgccgcgtgctctcctccacgggcacggatacctatggcgcgatcagcggcgcggtgaattcgctcaaaggcccgctgcacggcggcgcgaacgccaaagtgatggaaatgttccacgacatccgcgaccatatccacgatcctgcggatgaggaagaagtctaccactacctgaaaaagatcctcgaccggcaggccggcgataaaagcggcaagatttacggcctgggccatgcggtttacaccatcagcgacccgcgcaccctcatcctaaagcaatatgcccgcgcgctggtggaaagcaagggctgcacggaagatttcaacctgatggaaaccatcgagcgtcagggcctgcgcgcgctcagcgagcgcctgggcgaccgcaagcgcgtgtgcgccaatgtggacatgtattccggcctgatctaccagacgctgggcatcccggaagacctgttcacccctctgttcgccatcgcccgcatcgcgggctggtgcgcgcaccgcattgaagaagtctgcacgggcggccgcatcatccgtccggcataccgcgccatgatggagtgggaacgctatgtacccatgaacgagcgctgcgcggaataaccacaaatacaaataacgtatggggctgtgaagaaattttggttgtcctttcacagtccctcagactgtcaaaaatcccgaggagagcgcgagagggacggagcttcgccgccgccagtggcggaaacaggcgaagcgaaagtccaatgaacaagggagcgttgcaagccgttaggcgctgcaaggcgaccatt

SEQ ID NO: 2411 - DNA, 3301 bp, Unknown
  16S sequences of unknown bacteria
ttctaactacactactaaggcttatgcgtaatcgcgccccaaaactcaccgcgcgtaaattttaagctccaccattacggattacgcaaaaccgcgcgactaatcggtaaaaatgtgcggagacggaagctaatcatatcagccatactccaccgtgagcgtagattcacaaggagtcggctccggagactccttgtgcgccccacgcgtagtggcagccctcgaccgcagtcgatataattaatctgaaagacgcaagtctttcttctttcttcttcacttgaatcttaagtgaatcttcattaagtgaagtctcttagaaggcgcacatcgtctaaggaaaagaaaattgcttcgctctttcttgatttgagcgtgcaaattgtaaaaattcccgccacccgttgacactgccttgcatcagtgatataattgaatattatgatatcctactaataatatgttctaaggagaattttcaatatgcagtggacaagcgtcaatgacctgcgcgaaaaatatctttcgttctttgagtccaagggacacctcagactcccctctttccccctcgttccgataaacgataaatcacttcttttaataaattccggtatggctccgatgaaaaaatacttcaccggcgaggtcgaacctccgtcccatcgcgttactacctgccagaaatgtatccgtactcccgaccttgaaagagtcggacataccgcgcgccacggcaccttctttgaaatgctcggcaacttctccttcggcgactacttcaaggaacaggctataaagtgggcgtgggagttccttaccgaagtcctcgaaattcccgctgagcttctctatccctcaatttacgaaaacgacgacgaagcgttcgaaatctggaataaggaagtcggcgttcccgctgaaaaaatcatccgcctcggcaaggaagacaacttctgggaacacggcaccggaccttgcggaccctgctccgagatttacttcgaccgcggtgaaaagtacggctgcggcaaacccgactgtaagcccggctgcgactgcgacagatacatggaaatctggaataacgtattctcgcagttcaataacatgggtgacggtacttacaccgagcttgagcataaaaatattgataccggcatgggtctggagcgtctcgcttgcgtaatgcagggcgttgacaatatgttcgaggtcgacggcgtaagaaaaatcctcgataaggtggtcgagatctccggcaaatcctacggcgtgaacgataaggacgatatttccatccgtatcatcacagaccatgtccgcggcgcaaccttcatgataagcgacggcatcatcccctcaaacgaaggcagaggctacgttctccgcagaatcatccgccgcgccgcaagaaacggtaagctcctcggtatcaaccacgagttcctcaccgatgtgtgcgacgtggttatccgtgaaaacgttgccggatatcccgagctcggcgaaaaagcggcttatataaagaaagttctcgcaaacgaggaggacagattcaacgctaccatcgacgcgggtctttcaatcctctcaaacctcgtccgctccacaataaaggaaggcgcaaatgttatatccggcgaggacgcgttcaagctctacgacacattcggcttcccgctcgacctcactaaggaaatcgcggaggaaagccatctcgaaatagacgaagcaaagttcaaggagcttatgcaggctcagaaggtgcgcgcgcgtgaagcaagagagaacatctccggctggagcgacgcgtcaaaatcccttcttgccgagcttccgaagactgaattcacgggctacaccgactacaagaccgacgcgaagattattgcaattcttgcagaggacgaaagcgttcagtccgtttccgagggcgagtgcgaggtaatactcgacaagactcccttctacggcgagggcggcggtcaggtaggcgacacaggcactatctacaaggacggcgcggttctcactgtctacgacacaaagaagaccgacggcgtatacgttcacctctgcactgtagcgagcggcatattcaaggtcggagacagcgtaactgcggacattgacgacgcaagacgcgacgccgtgaagagaaaccactccgcgtgccaccttcttcaggcagctttgagacgcgttctcggaagccacgttgaacaggcaggctcatatgtggacaacgaaagatgccgttttgacttcactcacttctccgcgctcacttccgacgagctgaagaaggtagaggctctcgtaaacgcgcacatcctcgcggcgaacgagatagttacaaaggaaaccgatattgacacagcccgcaaggaaggcgcaatggcactgttcggcgaaaagtacggcaagacagtccgcatggtcaagatgggcgacttctctaccgagctttgcggcggcacacactgcgcgaacacatcgaacatcggtctgttcaagatcatatccgagtcatccgttgcggcaggcgtaagacgtatcgaggcggttacgggactgggcgttatcagacttatcgaagacaacgacaagctcatttcggacactgcaaaggcgctcaaggcgaacaacaccgccgacatgcctcagagagcggtttcgctccagaacgagatttccgcacagaagaaggagatagacgagctgaaccgcaagatagccggaatgaagctcgagacgcttatctccgacgcaaaggcagtgaagagtgtaaggctgattgtatccgaccttggaaacagcggacttgactctgctcgcgcgctgtgcgactccatcaaggacaagtacgccgacatggtagcggtatttgcggtacacgacggagaaaagctgaactttgtaggcgcggcaggcaaggatgcggtaaaggcaggcgcacacgcaggaaagcttctcggcgcggtatctgcggttacaggcggcaagggtggcggaagacccgacagtgcaacctccggcggcaaggatatttccaaagttacggatgcgcttgcggcggcggaaggaatccttgacggaatggtaaagtaatatttttccggcttaaaaatataatagaaaaaagcacgttattctgcgggggattgaaatccctgcgggaagacgtgctttttgagtttggtatttctttgaagaaataagcagaagaaaagacttgcgtcttttcgatttaattattccacttcgcgtggggcgctcctttcggagggaacgcaga

SEQ ID NO: 2412 - DNA, 31929 bp, Unknown
  16S sequences of unknown bacteria
cccacaggggagacccgccgccagtttaggggtcgaatcagagaccggcttcctcgttgtacagctcggcggcttcctgcatggcggtcagcgcgtcgtagttcaagtcggcggtcaccttctgacgagcggtcgccagagcagtgcccagagcggcgtagtcgtcaatgttcacataagcgtaagcgtagctcagctgcttgaaggcggtagcgtaggagggcatggaggccacggcctgcttcacttcttcggtgtcggcagcggacttgcggatgggcatatagccgctgttcacggcgaacttggcgttttcttcggagctggtgacgaacttcacgaagttccaggcagcggcgcggcgggcttcatcctcggcggggaagatggagatggtgttgccgcccatggcgaccgcctgcacgtcgaacatgggcatttcgatcgcgcacaggttcgcgcccatggtctcgttccactcgatgatcttggtggaggagccggcgaagaacactgcgttgccggaggcaaacacgttcacgccgttctggttcatggtcatgtccataacgccctcgcgcaccatgtcctgccaccactgggcgaccttggcgcattcctcgctgccgaaagcggcggtcttttcggagtagtcgtcgttatgagcgatcacgctgttgccgcaggacagcagctgggtcttggtcagccagtcctcgtcggacaccacgaaggggataaagtcggtcttgtcgctgtagtaggccttcagagtcttgcagacctccaggaagtccgcccaggtcttgggggcgttttcttccagattcaggccggcagcttccgccagttccttgttgtagaacatggtgttggtggagatgccataggggatctggcagatctggccattgtagcggccgtactcccacagaccttcgaacacatcgtcaaagttgaactccgcgtcagaggtggcctgctcaccggcgaagaagttgccgtaagcgccggtgtaggtgacctgaccgccgatcagcacgtccggggtggtgttgctggccagcgcgctggtgatcttggtggcggtatcggtgtagccgccggaataggaggtgacgaccttcacatcggggttctgggcgttaaagtcgtctacaatggacaggaacgcttcgccgctggtgccgctcagcgcataccatacttccagtgtggtttcttccgccagagcgggagcgcacagggacccaagcattcccaaagccagtaccaaggagaggagcttagccagtttcttcatgtctgtttcctccgtgagttggttatattttacagcaagatgctgctgtaatcgccgttagcccttcagacccgtcatggtcatggagcggacaaagttcttttcgcacagaatgtagacgatgatcaggggcgcgatgctcatcagggccgccgccatcatcagctggtaggcggaactggcctcggagatcaggtatttcaggcctaccgccagcgtgcgcatctccgtcttgttggtcaccagcagcggccacaggtagctgcgccagtgagacaggaaggcgtacagcaccgccgcgctgatggctgtgaccgaattgacgatgatgacgtgccacaggatggaaaaatatccgcatccgtcgatcttggcggcgtcgatcaggtcgtccgggatggtcgtgaagaaggaaatcagcatcatggtggtaaacacgcccagcacctgcggcagtacgatgcccgcgtaggtgtccaccagccccgtgccgctgaccatctggtacagtgggatcaccagcacggacatgggcacgaacatggcgctctggatcagcatgtacagggtacgcttgaagggaaaatgcagcttggcgaaggcataggccgcgccgatggacatggcaatctggatcgccgtctgcaaaacggaggtcaaaatggtgttccagtagtaccgcaggaagggcaccatctggaagaccttctggaagttgctccattcaaaggaggacggcagccagcggatgggataggcatacacatccgcgttggttttgaaggccgacagaaccatccaaatgaaggggaagatcattaccacagataccagcagcagaatcaggaacaccggcatgttgtaatgccgcaaaccacgcttacgcatcgctacgctcctttctgtcgctcatgaccttctgcaccatcgtcagcaggaagatcaccgcaaacagcagcacggacgctgccgcgccgcggcccattttggcgttgccgaaggcctgggtataaatgtagttggccatcagcatggtgctgttgttggggccgccgccggtcatgatatccacctcggtaaaggcctggaagcagccgatcatgcccatcatgacgacgaacatcacaatgggggaaagcagcggcagcttgacatggcggaaaatctgcctttcgttggcaccgtcgatacgggcggcctcgactacggagtcggatatgccctgcaggccggagatgaaaatgataatgtcataaccgatgccgcgccatacggcaaaggccacaatactcatcagcgcggagctttcggcgtagatataattactggtgggcagccccagaaaacgcagcagctggttcagtgggccgatggccgggtcgtacagccacatccagataatgctggaggctaccaccggcacgatcaccggcagaaagtagctgatgcgcagaaatttgcgccacggaatgtacatatccagcatgaccgccagcaccagagagatgacgatctccagcgccagcttggtaacggtgaaaaacagcgtattgccaaacgccttttggaacatggcgtttttcagcagataggcgtaatttttcagcccgatataggtggactggttggtgatggtgttggtggaggtcaggctcaaagaaaacagccgcaccaccgggatcaaaaaaagaaacgtcagcgcgatcagggtgggcagcagcaagatggcagccgtcgtcgtctgggctgtctcatagtgttttttccctagctggtaacgatacttcacaagcaggcccccttcacgttcttgccaagagtccgtttgtctgctattataagtggcagaaaatgaattttcaatgcaaaaaggggatgaaactttgcagatttgtccaaagttacaggactctatccgtgccatgccgatccagttggacgagcatttccctattcatgccccttatctggatcggctgcattattcccggccccacccggcggatcatatgcattaccacctgaccaccgaaattggggtatgcctgcagggcagcggcattttttacatcggcacccgtgtataccgctaccagcggggagacgtatccgtcatagcgcccaacgtggtgcatatcgcccaaagcgacccggagagcatcagcggctggaaatttttggatgttgatttggagaaaatgctgcttgggctgtcgccggagtatcaatctctgggccaatccgccttcagcggcatcattcacccggagcagctgcccggtatggcccctctggtgcagagcattctggaggaattaaaggaaaaatccgactggggccagcagctggtgcggctcaaggtgggcgaattatgtgtgatgctccggcggatgctgcaaaacagggcgccgctgacggtgcttccttccttaatgaatgagatctccacagcggtgctgtatattgccaaccattatcaggagccgatcaccctgcagcagctggccgatatgtgcgccatcagctgcacgtccttccggcgcaaatttgagcgcaccatgtacaccagccctttggaatacctgtaccatgtgcgggtcaaggccgccatcaacctgctgaaaaccaccgaactgcctattacggaggtggcctcccgggtagggtatcagacgctttcttcctttaaccggcattttcgccgtatcgcgggcgtatctccccgggactgccggcggggagggtaaagtgcgtgggcatgaacgctgctcgatttcccacgctcaaaacagttctctttccgcgcacaatctccccgccccaaaatcccgaaaaggttgacaacgccttcagttcgtggtatcataccttttgctcgcaagagcccatatgcgcccgtagctcagctggatagagtgtcagactccgactctgaaggtcatgcgttcgaatcgcaccgggcgtaccatgaaaaaccccgcagccagaaaaggcttgcggggtttctgttttttataaatcctgtttttttccagtctaaaggggcaaagggagccgatcaatcttcttctattacccgcccgccgtctacccgaaaacgccgctcggcccgccgggccacggatagatcgtgggtaatgaggacgatggtgtgcccctcctgatgcagacgggcaaagagcgaaagcagctcgtcccgggtggaagggtccagcgcggcagtgggttcgtcgcataaaagcagccggggtgagccgcaaagcgcccgggcgatggcgacacgctgctgctggccgccgctgagctggcagggccgatgctccgcccgatccgctatgccgaccttccgcagggtctccatggcggcctcccggcggcggggctcctccacccccttcagaagcaggggaaaggccacgttctcccaggccgtcagcttttgcagaagctggaacccctgaaagacaaaaccgattttttcccggcgtagggcgcacaattcccggaagggcagtgccgaaacctctaccccgtccagccggtagcggccggaggtgggggagtccagacaacccatgacgttcagcagcgtgcttttgccgctgccgctggggccgataaaggccgcgtattcccgggaatgaatgtggaaggaaacgccgtccaatacgcggatcgcgccccgcccgccgcttttcggataggatttgcaaacgttctccatgacgatcatgaggttcacctcgtcgatagtttgcacggctttctctgtacaattcacccactgagtggtatgataaaagtcggttttttcgaaaagacggggaagcagccccggagcacaggaggagaaagtcgaatgatagcgctggcgtgcgaccatggtggattcgatctcaaggaatcggcaatcgaggttttgaaggaactggggttggaatataaggatttcggcaccaatgaccgcaaaagcgtggattacccggtttacggcgcgcgggctgcccgtgcggtggcaagtggagagtgcgaccgcggcattatcctttgcggcacgggcgtgggcatcggcatcacggccaataaagtgcccggcatccgctgcgttacctgctcggacacctacagcgctcggatgagccgcctgcataataacgccaatatgatcgccctgggttcccgggtgctgggcaccgagctggcgaaggatatcctccgcatctggctgaccacggatttctccgatgaacagcgccaccgtgaccgggtggaaatgatcgcccgggtggagcgcggggaagaaattgaataaaggaagctttgctagaaaagggacggaaaaccgtcccttttttcatactcatttccacataaaaaatacaaagaaaaaacttgctatttacggctctcctgcgtaatatatccgcaagggcgaaaaaacgccgagagggcaaaaaacgtcccacgcagaaagaaagcattgccctgcaagggtgttgggaggaaatgaagatggaacgcgtatacaattttgccgcaggccccgctacgatcgacccaagcgtgttggaaaaagcccagaaggaactggtttgctatcaggacaagggcatgagcgtcatggaaatgagccaccgcagcgccatgtatctggacatctacaacgaaacggaagcgctgctccgtcagctgatggggatcccggaaaattacaaggtgcttttcctgcagggcggggcgacgctgcagttcagcgcggttccgttgaacttaatgggggagaaaaacaccgccgactatgccgacaccggcaatttcgcccatctggcggcgaaagaggccaaaaaatacggtgaggtacgcattgcggcttcttcccgggaggacggctataccttcattccccggcagtttgactggaatccggacgcagcctatgcctacatcaccaccaacaacaccatttacggcacccgctacacctttgtgcccgatacgggggcggttccgctggtggcggacatgagcagcaatattctttccgagccgaccgacgtaagcaagttcggcgtgatctttgccggtgcgcagaagaacatcggcccggccgggctgtgcgtggtcatcatccgggaagacctgctggggcaggaaaagccctttacgcccaaattgctgagctgggcgctggaagccaagaacggcagtatgctcaacacgcccaacacctatggcatttacatggcgaagctggtgtttgagtggctgcgggatctgggcggcgtacctgcgatctatgagcgcaacatagccaaggccgcgatcctctatgactatctggacgagaaccgactgttccgttctcccgttcgccgggaggatcgttccctgatgaacgtgcccttcgtgaccggcgacgccgaccgggacgccgcgtttgtcaagtatgctgctgcccgcgggttggtcaacctgaagggccaccgcagcgtaggcgggatgcgggccagcatctacaacgccatgcccgtcgagggcgtgaaagcactggtggatgtgatgaaagccttcgaaaaggagaatgcctgatgtacaaaattcaaacgctgaacgccatctccgatgtgatccacgaagaattgagcgcggaaaattatcttatcggcaaggaagaacctgtgccggaaggcattctggttcgttccgccgatatgcacgaacgggagctgccggagagcctgctggccattgcccgagcaggcgcgggcaccaacaatatccccatcgacgaatgcacccggcgggggattgcggttttcaatacccccggcgctaacgccaacgccgtggcggagctggtcgtctgcggcttgatgctgggcggacggaacgtatccggcggcattcagtgggcgcaaactttgaaagggcagggggatgcgatccccaagctggtggagaaaggcaaggggcagttcgccggcccggaggttcggggcaaaacgctgggcgtgatcggcttgggcgcaatcggcgcgatcgtggcaaatgcggcggcggaaggcttgcagatgaaagtgttgggctatgaccccttcatcagcgtagaaagcgcgtggagcttgagccgcgctgtgcgtcactgcgccagcatggatgaaatttttgccaacgcggactacatcacggttcacgttcctttgaacgagggcacccgcgggttgatcggctccgccaatctggccaagatgaaggacggcgttcacctgctgaatttcagtcgcgccgagctagcggatgcggacgctttggccgccgccttggaaagcggcaaggttgcttcctacgtgacggacttccccacggaagcggtgctctccatgaaaaatgcggtagtcattccccatttgggcgcgtccacgcccgaaagcgaggaaaactgcgcacgcatggccgcacaggagctgcgggaatatctggaaaacggccagattcgcaacagcgtcaatctacctgagattcttctgggccgcagcgaaggcattcgcattcagatcattcacggcaacgagcccggtatggtcagcgccatttccgccgccatcggcgctcggaagatcaacatcaacaacatggtcaacaagagccgcaaggacgtggccgtcactgtgcttgaggtcgaaaaggcccctgacgcccgtcttttgaccgagctcatggcccttcctaacgtcatccgcgtccgcaccttctaaggggcagtgccccttgggccggactgcgcggcggagccgcgcaggggtgtaggaggacatgcggattggctgggcttttatcgccgtggcacaacgggtgccacggctcgcgggtctggtgtagtttccttgtcagttgagtagaaaagaccgccattcggcgacaggcctcatggctcgctgaaaaggccagcgtggatatgaaatcccgctggccttttgcattgcaaaaatatccaagctgcggcgaaccatcccaagcggcactggttgagtctgcccagcgccagctgcgggggagcagagcggcgataggcagcgaagggaaaaaggcccgcccattttgacggcggaaaaaggtgagcacaggagcgcgcacggacgttggtgttagctatccaactaaattgcgcgcgacgttgcgagccccgctgtcaaaatgggcaataaagggctttttcccgtagtcgccgtgccgctggctttctttggtactttctttcgcgccgaaagaaagtactgccctcctcggggcggcagccccatccgtccgcgccggagtcggcgcgtcagtcccaccggcgagggattctcttacagcaaagttgccgtgcgttgctataagcagggggctttttgctcgcccactgcactccttcggttcacctaccgaaacacctaaacatcctgtcccgcgccgtagtcggcgcgtcatgcttcacccgtgggcaagcggtatgcgcctgcgggcgcacaaaagagctttccgctcgccctttggaaaccttcgggcaccgaaggtggcgagaaatccctaggacggtaaaccccaattcacgccgtagtcggcgcgtcgatctccccggcatagctgccgtgtgccaacgcaagcggagttttgctcgacgccgcccccttcagggacacttccgcagaaattttttctggcaataatgccaaatttccccacccgcgctgcaagattttcacttttcctatcgtcctatggataaattcccaaatttcggaaagggaggaatcccccatgaaacgctttgtcctgctgctgtccctcctgctgtgcgtcctcgctttgccaggcgcctgcgccgcacagggagaatccgaactgcttgccgcctgtctggggcagcgctacccggacttcacggaagccgcctacgcggaatggggcaacaccgctgcggcggtatttgtccataacggccaaaagatcctgtgcctgttggagaataccaacggccagtggcagatcaccgtggataaccccaacgcccttgaccagaccaaagaactgccttcgctcctgctggacagcgatcaggccctttactggagctatgcggagtaccccgagaccacctattccagctaccgggagacgggcggcgtttgggctgccccgacggaacagctcgtttcctgggccgggaaagaatatattgtggaagatgttttttatcagaatggctggatcaagcatctgtggagactggaggacgaagaaggcaatttgatcgagcagacggtggatcgttctttcccggccccgtggctggcggatatgaccaccctgcaggccttcgacctgtcccgcttcccggtgctgggatataccgaatacgagggggaatggcccgatcgtcccttcatcgcacaggccgcggcggcgctgatgccgaattataccttcctcagcggctcttttgcctatggatatcttcgttttttgatgcggaaatcggacggaaccaaggttttcgtgggcgtggatgacgacgaaggccaccttcggctggccgaaagcacgcccctgccgcaggacgcgtactacggggtggaaaacttcactaattcgctgggctggtttgaggatgcgtgcgtgacgctggataaataccgtgcggaggacagccgttggggcgttatcagcgtggaatgcggcgcgctttcctttggcccgcagtgtatgagaagcgatgaaaactacatgctgctctatttcggttcccatccgtggaatgatatgacgaagatcgactggacgacactgccaaaaaccttggaggaagcggcggactgcatgaacggcagcggctatgccatggtgaaaaatcccgatcccgccgaccgccttcacctgcgaaccgagccggataaaaacgcgccttctctgggcaaatattataccggcacgccggtcaaggtgattcgggtgcaggacgattgggtgcaggtggaggtcttgggccgtcagggctggatgatgaaaaagtatctggatttttccgaaccctataccattgatctgtctattctgcccgcgtacgatgattcccaacaaaaacaccccagcgtttatcaggagcctgatgaaatcgccggggtgatggaatggcccagttggtatgaaacctatggaatgggcattttggaagacgggtggtatcacgtctggaatccgtggacgggggagagcggcttcaccagagaagcgccgcaaatgtcgcagggctaaatggttaggaaaccatgggggtctccgggaaggaatctttcccgggggcctttttctttcggcggagagcacgctcctgccgccgaatcagcgcggatagcagaagctgcaggggcagggcggacgcgcagagcccggcgacgatcagccatacgtcccggtccagcggcgtcaggtagaagagcttggggaagcacagcattccgacagccattccgatggtcatcagcgccaccacacaggcccgcagccactggaagggcaggcaggtcagcgccagcgtcaccagcccggaggcagcggccaccacggtgcagagggtgctttcctgcgcggcggcaagccccagcggctcccgcagacacagggcggtcagcagcagcaccgccgtgcagataccgcccggcagggcccgcagcaggatattttccagaaagcgcccttgcgtcttttccttgctgggctgcagggccagaatgaaggagggcgcgccgatggtcagcgtgctgatcagggtcagctggataggcgcaaagggatagggaaagggcagaaacagcagcgccagtgaaagcagcatactgtacaggtttttcaccagaaacagggacgcggccctagtgatgttgttgatgacccgccgcccttccagaagaatctggggcattgcgtcaaaaccgccgcttaagagggtcatttgagccacccggcaggccgcatcgctgcccccggccatggccagcgagcagtccgccgttttcaaggcggggatgtcgttcacgccgtcgcccaccatggccacgccatggccgtcccgctgcagggcgcggatgagctcccgcttgtcgttgggggaaacccgtccgaatacggtgtattcccggctcagggccgtgtagtccttctctccctccagctgggaaaggtcgatctgcttttccgcgccgggaatgcccgcccgctgggccacactggaaacggtcagcgggctgtcgccggagatcaccttgatctgcacgccctcccggccgaaatactcgacggtctggcgaacctgcggccgcagcccgtcgcacaggcagagcagcgccaacagctttcgctgggcgggcagttgaacgtcatcggcctgaacggacggcggttcggggctctccatcagggccagcacccgaagcccttgcgctgccagctcctgcgcctttttcagctccgcgccggaaagcagccgttccggcgcaccgaggatcacgcttcccacgccttccaataccgccagcgaccatttccgctggctggaaaaaggcacggtctcaaggcaggggaaaacaggccggggcggacaggcctccgtcagcgccgcggcggtagaaccgtccgcgcccatgccgcacaggaaggacgccagtatatcctgcagccgttccttggacacatccggcgcggggatcgtctgttccaacgtcattttgccgctggtcagggtgccggttttgtccacacagatcacgtctacccgggccagtgattcgatgccgtatagctcgttgaccagcgtttttttctggcccagcgttaccacacctgccgccagcgacacggaggtcagcagcatcaacccttcggggatcatgccgataatggacgcgacggtcttgaccaccgcctccgagtgagccagtcccaatacggtggtttgcttccagtacagcagcagacccaccgggacgatcagggcggacacccagcggatgatgcggttcatgtccgccattaactcgcttttaggccgcttcacctgccgggccgcagcctgcagacgccccatataactctgggctcccacggcggtcagccgcagggtcagccgtccttccaccagataactgccggaatagacggtatcgcccggctttttgggaatcttttcgctttcgccggtcaggatggattcatccgccagcgcttcgccctccaggacctgcccgtctgcgggaatttgatcgccccggcgcagcagcaccacgtcgccctctaccagatcgtccggggaaagagggacttcccggccgtctcggaggacggagacctgactgcggctcaaaagctgcagccggtcatgggtgcgcttggcccgaagctcctgaatggtgccgataagagcgttggagacgaccacgcccatgaagagcatgttgcggtagctgccggtaccaagcagcagcagggccaaaatgacgttgagcagattaaacagggtcaacacattgcggcgcaggatctcgcctacgccgccgtctttgcttttgggctgctgattgccgcgcccggcttcccggagcttggcggcttcctccgtggtcagcccgtggatggagttttctttcattttttcctcctgccccggcgagaacgcctcagagccgttcgatgatataataggaagaaatattgcagttgtacactttgtcaagcgggatccgcaccacaccgggagccacaacgtcgatcagcgagcctgtgcggttcttggcatagttgttgtcccgcagaggatcgagaaagtagacccattcgtcgtcggcgtagcacatgacctcgaaatggctggacagggtgaaggggctgccccacgtggcgcaggtcagcgccagccgctgtttgctgtgatcctgcagggcagcgacagtctcgtgaagatcggtatttttctcgatctgaaggccgaagccgtccgccagcttttccagataattcaggctgctgccccagttggtgctccgggccttgagtccccaacagttgttgccggtggccatattgccgatgagaatgggcagatagcgctgaaattcctccggcttggtcgggtgatattttacgtgatagctctggcagtgaaactggttcaccgagcaggggcagaaatagaagccctcgccattttcggtgaactgatccagccaggccagttcttccggggtcagcagattggccaagaccatggcggcggcggtggggccgcatccgccgtggccgaaaatgcggtatttcttggaactggccacttcaaaggtcagccgggcatagacggggtcgttctgggcgtagaccatgaaggagcccaccccgtcgatcgtgaccctgccgttgccggtttcccggtcgtccagttcctttttgaaaatatcggtcacatctgccgaaggttcccgggcggtcagcttgcccatgaccaccatgcgctgacggctgtcgccggtggtggccatgaccagcacacgatcgccgtactccggcaggttttcaggcagggaaaagacggaacgctcggtttgagttttcaatgcctgctgaaaggcggcttccgcgccgacctgatccaaccgccagctttcctcatcgtcatagggaacggtgaaggcggcgaacagctgaatatcctgattcccgttcggcgttagcagcagcagacggctatgggtcagcgcataatctttttccatgtaatcccgcagaaaggaaaaaggcccttcgtcaataccggggctgccgtacaggatcgttaccgggtcggaaaaatccgcgctggcctcgcagtccataaaaacggagccgtaatagtaggtggagcggtcgtaacgcagcttgcggtaggtctgattgtccgccgcctgcagaacggcctgatcgatcagcccatcctcgctgtagagccagccggcaatatccgggttaatggtgtgaagatagtcgaaatccgccccgtactcagccgaggcggaagaaaagcgggataacagggcgcaggcgagcagcaggcagagaagcggctgaaaaatgcgtctccccgcgccgccgcgccgctggattccgtgcatgtgcatccctcattcctgttttgaaatggagctgccgcactccggggtcaggcccggaaaatgcagcaggtcagcacgccgtcgcagtcaaagaactggtagcggatggcgtagggcagggtattttccagcgtcaggttgatattgccgccacccacagccgcgtcaaagccctgcttgatgtagtaaatgcccacatccgcgtgtacccggcgatgggtcacgaggatcggcacctgaatggtggcggcgtagaaggtggtattcacctgacaggtgccgccgccgtagccggtgagggcgtttttgctcatgatgggggcggatttgtagcccgtggacttgcggtaggggccgatgacctgattctggtcgtaggtttcaccgggctgcagcacgaccccgctgatcaggccggaagccagatggatgttccagttgcgcccctgatattgcagactgtacacgcccaccgcgtagaaggtggtcatgacgctgatcaggtcgccgggctgtgcctgttcccagtccaccacaggcatgacgtaggccacgtcttcttcgctcacatagcccttggtgcgatggtagggaacgccgtagcggcccatttcatccttttcgtaggcacagaaggccgcgccggggttgacggtctggaagacctcgccgtcgtcataggaaacgatgtcggtgctcttgttggtgaagatcatcaagggcataatgtccagaccgggaatttccccagcgtcccagaccagccggtcccacttaaaaagagaatcacagagcatatagccggttttgccattgtagcgggcgcggcaccagtcgccgtccacctcgctgacgatgacttccttatacataggcacccagaccagcaccttcgagtcagtgttggcttcctcataaacggcggcctgattcagcgcgtaggcctgataggcctcccggaagccgctttcgtcgggcgtgccaggctccaccgtgggttcgggctccacgggggaaccatccatagaggtcatggcctgcaaatattgagtctgcacatagccttcgccttcgccgaagacgatccgtgcccagccgctgtccagcagttccagaatggaaacaagggaatccttgggaatgctgcccttgccgctggaatccttgcgcggttcccggcgcaccttcagcgccacagaggcataggcctgatatttggcctcgttttcagcagcttcctcggccagcacgggaaaggccagcacgagaagcacggcggccagcgtcaggcaaagcagctttttccacatcttccgcttcatcttttgttctcctgtctattggtatgccggatctccctcaaaaagtgtgcaggaaacacagccctgttattatacgagttttcggtttagtccgtcaatagacagatacattccgcgggccggaaaacccgcttgtcctcgcgaagaagcccgtcccgggtcattcggtgcatcagaagcgttgcctgtcggggacttaagtccagcgcgcgggccgccgtgtcccgatccagttggccacgctccagatacagctccagcagccgttcggaacggtcggcgtagggggaaacggctcgtttccggggccgccacgcgctgggaaggacgagggtcaaacgattttcgccgggccggacggtcaggccgctgcggttggcaaaaaatccgccctcggcgtaaagccagcggcttgcgccgaattccgggtgcagccgttggaaaatttccatcaggtggagattgcggcatacggtcgttccgctgctggcgtccagacggctgacgggcagtttcgcgcccggtacggaaagctccagccggtcttccagaaaggccagccgccacggggcgttggagagaccgtccagcagggaaatgaacagctggaacagctccatcagggcggaacggggaaattcctccccttcttcgccgatgatgcgccgtctccgcattcgacagacgtcgccgattttgtccaacagatgatggctcatttcaggcaggctgctttccaaccagcctcgatatagaagttttcccacccggcgacggctggctagccaaagcagctctacccggtagcgccgctggtcgcagagcatccacgaaagattggtatccagcgaatccgccagttgaagtcctaggatccgccgctgaggcttgcccagcgacaggcccttttctcgaaaaagatgggccaatccatccagcgtcaacccctgatgaagggaacgctgaagctcgtaatcgtcgccgtccgtttcccggatggcggagagaatccattcctccggggcaggacgggccgtaaagccatccagaacccaacagccctttttcagcccgtacaggcgatcgaaataaggcttttctttgccggggcgaatttccatccgccttgatttttcgttccattccagaaagccgaccggctctgggagaatttgctgacacagccattccagccagcgataaccgtccccttcggaatcggagaggcatccgccctgaccgttgagcatggcaatcgcccggggaagactttcccgccagacgatccggttcgaatccgtcacgcgcattggttcaccgcctattttgttttttgataaaaatattctaaaaaattcattttcgggtgtcaacccaatgtgcactagctgtcatattcccaaaaccaatctttgcggtttcttagcgccgcaaagtcttgcggggattgaaatatgtcgatttttgacgaagaagtcttgacggctaatatatattagcttataatggctaacaaatattagccaaaggaggggatgacgatgcgttcacccgataccaagcagcggatccagacggaagccctgcgcctttttgccgaaaatggctatcctgccgttacgatggagcagatcgccgcggcggtggggatcaaggctccgtccctctacaagcactattccggcaaacgggccatactggacagcatccttcgtcgaatggaggaaggagaccttcaacaggcccgcgaccaccagatgccggaggaaaacggcacggccgaaaatcccgcgggggaaccggccacgctggaacgggtggctgaattcagccgcgcccagtttcattactggacggaggaaggctttccttcccactttcggaaactgctgacactggaacaataccgcgacccggaaatggcccgcctgtacgggcaatatctgtccgacgggccagtcacgtatctgacggatattttccggcctctggcggcttcgccggaggaggcacgcctgctggcactggaattctacggtcccatgtttctattatacagtgtatacgacgggggagagaaaaacgcggcggcgctgctggacgcgcatctcgcccgcttcacggaaaagatgaaaggaagaccagaatagaatgaaggaaactttgctttgctgccgaatcacggcgcaggaaaaaggcctgtaccggctatgccacgacggtgtggaacaggccgcgcaggtatcggaaaaatttcaatacgaggcgctggggccgtcagactatcctacggtgggcgacgaggtgttggccgacctgaacggcggcgggcaggcggtgatccacaaggttttgccccggaaaagtctgtttttgcgcaaagccgccggtacggcgcgggaggaacagcccgtagccgccaatgtggatattctgttcctgtgtatggcgctcaacaacgatttcaacctgcggcggctggaacggtatctggccgccgcgtggaacagcggggccacgcccgtggtggtgctgaccaaagccgatctttgcggcaatccgtcagaaaaggtggccgccgtagaagaagcggctcccggcacggacgtgctgcttacctcggcggcgcaggaggacggtatacgtcccctgctgccatacctgacccctggcaggacggtggcgtttgtgggctcctccggcgtgggaaaatcgaccctgatgaacggtctgttggggaaggaaattctggctaccggcggtttgagaaacgacgaccggggacggcataccaccacccggcggcagatgttcttcttgcccggcggcgcggcgctgatcgacacgcccgggatgcgggaactgggcctatgggattcggagtctgggctggaaacggccttcgccgatatagaagcactggcccggcagtgccgttttcaggactgccgtcacgaaaaggaacccggctgtgctgttcgggcggcactggcgtcgggcgaattatcggaggaacgttttcgttcgtggcagcggctttctgctgaaaaccgttatgcggatgacagggcggctcatatgagcgccaaggaaaagaaatttcggatgatcgcccaattcaacaaaagcaacgcgaaacggtagatttgggagaaagaagctgggggacgtcttttgcttatctgccgatcagttgccccgagggaagtcaactgcaagctactgtatacaatggctatgctgtaaggaaactcctttgcggggattgacgcgccgactccggcgcgggagcgaacggaaagcccccagtgcgccgcaggcgcagctccctttccctgatgagggcttgacgcgccgactacggcgcggacgttggggctgccaccccgaagggggcagtactttctttcgaagcgaaagaaagtaccaaagaaagcacgcggcacggcgactacgtgaaaaagccctttattgcccattttggcggcggggctcgcaatgtcgcgcgcaatggagttggatagttttcaccagctcttggagcgcgctcgtgctcgcctttttccgccgtcaaaatgggcgggcctttttccctccgctgcctatcgccgctctgcttccccgcaggtggcgtttggcagacacaaatggcgatgcttgagatattcccgtgttacgtgggtggtttcgctgcatccataaacagacctgtttttcaattcacagttggcggtgaacatactcagccagcgccgcttgggatgcttcggtgaaaaatgaatatttttgcaacgcaaaaggccggcaggattttaaatccacgctggcctttttagcgagccatgaggcccgttgccgaatggcggtctttactatacaagtaacatggaactacaccagaccggcgagccgtggcacctgtcgtgccacggcggtaaaacccggccaagccacacggcccctatgcccctgcgcgccctacgggcgcgcagcccggggtgcaggggcactgcccctgcttccgaggtaggcggagcggacgctttcgctggcaagaagagactcgccgctgccgctgagaatgattcggcccgtttccatgacaaagccgtaatccgccgcacgaagcgccgcgttggcgttctgctcgatgagcaggatcgtgatgccgctgtcccgtaaacgctcgatgatggcgaaaatgtccttcaccaccagcggcgcaaggcccagactgggctcgtccatcatgatgagcttgggccgggtcatcatggcgcggcctaccgccagcatctgttgctcgccgccggaaagcgtgcccgccagctgccagctccgctccttcagccggggaaacagcgtgtaaatgtactcgatgtcctcctgaattttgcgggtatctttgcggagatacgcgccgattttcagattttccaaaaccgtcagattggcgaagacccgccgcccctccggcaccagcgcaataccgcgctccacagtcttctgagttgccagacgggtgatgtcatcgccgttgtaaaaaatggagccgctctttaccggcaccagcccggtgatggcccgcagcgtggtggacttgcccgcgccgttggccccgatcagggtaacgatctgcccttcgtccacggagaaagaaatgcccttcagcgcttcaatgccgccgtagctgaccaccaggtctttcacttccagcatactcattcttcctccacccccaaataggccgcgatcacgtcgggattcgcctgaatatcctcgggcgtgccctcggcgatcagtcggccgaagtccagcacgtagattcgatcgctgatgcccatgaccagattcatgtggtgctcgatgaggaagatcgtcagcttgaaatcttccttgatcttgaggataaattcgcttaattcgtccgtctcctgcgggttcatgccggcggcgggctcgtccagcagcaacaggcggggttctgtggccagtgcccgggcgatctccagatagcgctgcttgccgtagggcagggacgaggccttttcgtccgctacgtccccaaggcccagcaggtagagcagatccagcgattcctgacggatgcgcttttcttcctgcatgttcaggtggaaggccgccgagaaaagcccggccttcatgcgcatgtgacgggctaccagtacgttttccagaaccgtcatgcccttgaacagacggatattctgaaaggtgcgggccacgcccatttcggtgatcttgtccggcgtgttggagatgagtctgccgtattcgccgatgtggcttccggcgtagagcttcttcattttgccggtgggatgaccctgcgcgatgatcttgccccgcattttcacattgccgttggtgggcgcgtatacgccggtgaccacgttgaaggccgtggtcttgcccgcgccgttggggccgatgagggccacgatctcgcccttgtccacgtgcatgctcaggctgtccacggcgactacgccgccgaactgcatggtcacgttttccagctccagaatggtcttgacgccattgctcatttcaccgcgccccctttctgcgtttttttgcggaagagatctgggagttcacgggtgcccatgatgccctgccggaagaacagcaccacgatcatgatgatgatggagaagaccaccagacggaagccgttgcggagcaggggaacttcccatgtgccgatcatctgcttctgatccagaaagcgcagccaccattcggagcaggcaacgaacaggaacgaactcaggcagctgccggtgacagaaccgataccgccgatgaccacgatcagcaaaatttcgtaggtcatggccgaggtgaagctcttggcctgcacggagttctgatacatggccagcatcgcgccgcctacgcccgcaaagaaggaactgatgcagaaggcctgctgcttgtgccgggccagattcacgcccatggcctcggcggcgatctcatcgtcccggatggacatgaaggcgcggccgtagctggaatggagcagcagtacgatcaggccgatgcatacgcccgcgatcaggaatggaatggtggtggaaaagtagagcgtgacttctccttccgcatttttgaggttgaaatcattgaaggtggggaagagacgcagcatgttggagccgttggtaatggcccccagtttgtcccactggaagatggagcggatgatctccgcaaagcccagcgtggcaatggccagatagtcgctcttgagccgcagcaccggcaggccgatcaggaacgcgaaggccgccgccatcagcccggccagaatcagcgcgggaatgacgggcatggcgaactggatcaggccgccgtcatagtactgatacaccacggcccggctttctaccggaatggtcagaatggcgtaggtgtacgccccgatgagcataaagcctgcctgtcccagcgagaacagacccgtgaagccgttgagcaggttcatggaaacggccaccagcgcataggtggcgccttttttcagcacggtgaaaagcatggaggtgggcgggatgatctgttccagcaggaagaccgccgcatagatcagaagtacgatcacgccggtcatcaccgcgcccagactgggcttggtattttgcatccggggagctttttcgggaatggtcatttttctcacctcacaccttatccgtcgttttttcaccgaacagacccgtgggtttgacgatgagaatgataatcagcagcgcgaaggtaaacgcatccgagaaagtggtcagtcccagcatctgcttggtcacgccggatttgatgaggatcacgtccagtcccttgatgaggttctcacaaatgccgatgatgaacgcgcccaccaccgcgccgggaatggagccgatgccgccgaacaccgccgccacgaaggccttcaggccgggcatggagccggaggtctggatgacggtggtgtagttggtgaagtacagaatggagccaacgcccgccagaaaggaaccgatcacgaacgtgatggaaatgacgttgttgatcttgatgcccatgagttggctggtctcaaaatccttgctgaccgcccgcatggccatgccgatcttggtgtgattgatgagcagcaccagcgccaccaccagaatcagcgtcagaatgggggtgacgatggtcaccattttggtggtggccgtgccgatggtgacggactccgaaataaagggaatgctggggtagtactggttcaggccgccggtgatgtacagcaccagattctgcagcgtatagctgacgccgatggccgagatcatgatgctcatgcggggagccgtgcgcaggggcttgtaggccacccgttcgatcacgaagccgatcagcgccgtcaggatcagcaccagcggaatggagagatacagcggcaggccgctggcagagatatagaccatcagaatgccggccaccatgaacacatcgccgtgggcgaagttgatcaggcgcagaatgccgtagaccatggtatagccgatggcgatcagcgcgtattggccgcctacggaaatgccggacaacaggtagggaagtacggtgctcatcgtgggagcctccttcgtgacggatggagtggcaaaagaatgcgaatggaaaagaaagcagatgactttcgggaaaagacaagctgcaagagaagggcttgaaatagaagtgaacgaaagtatggggtaaagaggacttagtccccttccggggtttgggtcagggccccaaaaggcggctgacgctcgcccgcccgcagcgatacagaaccgctggggcgggcggagcgcagccgccctgacggatagaaaggatgaaattggaaatttactcgacggtctgcacggcgacgaagtcccatgcgccggtatcggtgttgacggacttgatgtaggcggaatcgcggatcgcgtcgccggtctcgtcaaaggtgatctcgccggtcacgccggtcagcttgacgctgggcagcgcggccagcacggccttcgaatcggtgctgccagcggctttcagcgcctccagcgcggtgaagtaagcgtcgtagcccataacgctcacagcggagatcatgtcgttgccgccgttgttggtcaaatactcgctgtcggagttcagccaggccttgaagccttcgtcaaactcgggggagccgccctcctgatagaaggtggtgatgatgaccttcacgttggtgcccttggcggcctcggctaccttattgttgtccagcgtgtcgctgccaagaatgggatagctcacgttctggcccgccgcctgactgatgatctgcgaagaataggcgatggacacggggcagaagaacacttccgcgccgatggccgtagcgttggacaggtaggaggtaaagtcggagttgccggtggggaaggtgtcggagatcaccatgccgcccagggcctcaaaggcctgctggaagtagtggcacaggcccacgtcatagtcgttgcccagctcggccagacagtacgcggtgcgcgcgcccagctctttgaaagcgtagttggccaataccgttccctggaagggatccaggaagcagatgcggaagtagtggctgttgcccgccgtcacctgcgggttggtgcaggtcacgccgatagcgggaatgcccgcgtcggcgaagtactgggaaccggcaatggaaacaccggagccataggagcccagcaccacgctcacgccctcgctgaccagctgctgggcggcggagggggctttatcggtagaggagccgttatccgcgtagaccagctcgaccttgtaggtctctccgccgatctcgacagtgggctgcacggcgttggcgtactgcattcccagcatttcctgcttgccgcctgcgccgctgtcgccggaagcgggttcgaacacgccgatctttacgacgccctcagccatggcaaaggtggggatcatcattaaaactgccagaaaaattgccagataccttttcattgggggtcgcctcctgagttcctgaatgttttttggtttacgggtgaaattataattccttcatttcaaaattgcaatcctgcaaaataaaaatgcggacgaaaaacaggaaaaatacaaaagcagaagtttaataacgaaaatactgtgtaaatcaatgtgactttggcaagctaaagggacagaacatatgttcaaaaatgcaataaaaacttttgaaattgcattttcctgcaaaattgcagagaagtgcaggaaaatcaggacggctttttgacttccaaaaagaagaaacatttttctgctttctgaagccccagccctttatataggtaaaaacatattcagaacaattcattcccttgacggacggcatcgaagggggtacaatgccagcaacgtccccggcgagagccttttccgccgggcgcggcagccgaccggatgcttccggcggcgtcattagaacggtaggattgtaggaggaatgaaacatgaaaaaggcattggggattctggcagctttggccgtactggtatgcggcatgaccggcgcaatggcggagcccttccgcgtaggcatttgccagctggtcacccacgacgcgctggacgcggccacgcagggctttatggacgcgctgaccgaggagcttggcgcggataacgtaacttttgacgtacagaatgcggcgggcgactccaacacctgctctaccattgcgaacagctttgtggccgacagtgtggatctgatcatggccaacgctacgcccgctctgcaggcggcttccgcggcaaccgccgatattccgatcctgggcacctccgtcaccgaatacggcgtggcgctgggtattgacgatttcaccggcacggtgggcggcaacgtcagcggcacctccgatctggctccgctggatcagcaggcggccatgattctggaactgttcccggacgtgaagactgtgggtctgctgtactgctccgccgaggccaacagccagtatcaggtggacaccgtgaaaaagtatctggaagaaaagggcgttgcctgcactctgtatccctttgccgattccaacgacgtagctgcggtgacccagacggcctgcgacgcgtccgatgtgatctatgtgcccacggataacaccgtggctgccaacacctccatcgtggcgaacatctgcctgcccgcgggcaagccggtcatcgccggggaggaaggcatggccaagggctgcggcgtggcgaccctgtccatcagctactacgatctgggcgtgaccaccggcaagatggccgcgaagatcctcaagggcgaagcgaatatctccgaaatgcccatcgagtacgctgaaaactttacgcccgaatacaaccccgtggtctgcgaagaactgggcgtgacggtccccgacacctatcaggcgctggacgtggaataagattcgtattttccaaaaggcttttctgacttttccgaaggggcagctgcatccagccgccccttcgagtgtgttctctaaaaaatcattcgtttttgttttctcttttcaagcgaccacgacaatgggggaatgaggtttgaccagttttctcaacgcgctcccgggggcgatctctcaggggctgatctggggcgtcatggccatcggcgtatacattacctataaaattctggacatcgctgatctgacggtggacggctccttctgcacgggcggcgcggtgtgcgtcatgatgatcgcgggcggctgcaatgtctggctggcgcttttgtgcgccattctggcgggaatgctgacgggactggctaccggccttctgcacacggcctgcggcattccggctattctggcgggcattctgacccagctgggtctgtggtcggtcaatctggccatcatgggcatgaaagccaatcaggccctcaatgtgaataagcagcccctgctggtttctctgcgttacctgcaggaagtgggcaagggcacgaagcctttctatatgcaccccattttcattgtggggctgtttgtggtggcgatcgtggccattctgtactggttcttcggtacggagctgggctcctccatccgggcgaccggcgcgaacctgcatatgtcccgggcgcagggcatcaacaccaacaagaacatcgtgctggggctgatgatctccaacggtctggtggcgctttccggtgcgctgctgagccagtaccagagctttgcggatatcaacatgggccgcggcgccatcgtgatcggtctggcggcggtcatcatcggcgaagccctgtttggcaagctgttccgcaatttcgccctgaaactgctggctgtggctattggttccgtcatctattacgcggtcattcaggcggtcgtcagcctgagcggcatcaactccaattacctgaagctgctctccgctctgatcgtggccgttttcctgaccgtgccccactggaaggccaagtacttcaccaaaaagcgcgtgacagggggaaagagccatgcttgagatcaaagagatcagcaaaacctttaatgcgggcacggtcaacgaaaagaccgcactgaacggcgtttctctgaccctgaacgacggcgatttcgtgacggtcatcggcggcaacggcgcgggcaaatccacgctgctcaacgccgtggcgggcgtctggccggtagatcagggcagcatctccatcgacggggtggatgtgacctatctgccggaatacaagcgggcccgctacattggccgggtctttcaggaccccatgatgggcacggccgcgaccatgcagatcgaggaaaatctggcgctggccaagcggcgcggcaaggctcgctgtctgcggcccggcattaccgccgctgaacgggaagaatacaagcaactgctcaagggcctgaatctggggctggaagaccgcatgaccaccaaggtggggctgctttccggcggccagcgtcaggcgctgactctgctgatggcaacgctgcagaagccgaagctgctgctgctggacgagcacaccgccgctctggaccccaaaacggcggccaaggtgctggaagtgacggagcgcatcattcgtcaggagcagctgaccacgctgatgatcacccacaatatgagggacgctatcgtccacggcaaccggctcatcatgctctatgaaggccgcgtcgtggtggacgtttccggcgaggaaaagaagcgcctgacggtggaagacctgctgggcatgttcgaaaaggtcagcggcgagcagttcgccagcgaccgggcgctgctgagctgacggcgtgagggaaggacgcaatgcgacagacgctgcttcgcggctcggcgcttctgctgggcgggatccttctgggaatgctgctgcttatggcggcgtatgccctgccgacggaaccaattagaaaacatttgggggaatctctcctgtgttttgacggcagcgacggtatgccggagaccgacgatgaaacgctggttaagacctattccagtacatggctggacatccgcactgacttggttatgatgctgattgcagcctatgattcagatgcttccccgtgggaacaagccttggaaaaccgtatgtacaatgatacggaacgctattaccagctgagcgaacggctggccgccgtggcgcacggtgttggcaaagatgcggaaccggcctattcctacggccgttactggcacggatatttggtgctgctcaagccgctgctgctgttttgcagctacatggacattcggatgctgaatgttctggcgcagggaacgctgctgctgtatctacttctgcagctgaaaaagtcaggtgcgcgctgtataccggctctgggagcggcactggcggtgttacaggcgtggttgcttccgctgtgtctgcagtattcgacggcatggctgacagcattggccgctatgtgtctgttggtgcggtttcagagccgctttgaaaaagacggggttgttctgtttttcctcggcacgggcatggtgacatcttatgtggattttctgacctatccactgattgcctttggcctgccctgcgtcctctggctgatgctggaaaaggatcgtcagaagaatgcacttttgctgctggtacagttggcgctggcttggggaatcggctatgcaggaatgtgggctggcaaatggctgctcgttcttctttttggccgtgccggggaaggcagcatgattcttgcggccatggaagaaagaggactaagtgccgctgtcagcccgtggagcgcaattctgcggaatgggagcgtattttggcggaaaccctataagctggcgctgttttgcgtgacaatttggatgatagtccggctgattcggctggggaaaaatcgcaggaaggtttcgtggaatctggcaatggctctgctgataacggcggccatgccgctggcatggtatgcggtgatgaacaatcacagccatgtccactatttctttacctatcggaatttggcgataagcgtgtttgccttgggatgcttggcttctttgcttctggaagataaaagaaaagcgaatgaaaaaggcttgccagtatagcaggccttttctcttgcgattgcttttttacccaaaacacgctatgatataagatgatgaaatttacttgcttggagggaacaacagttgcaccacgaggaacggctgtcccatattcgcaatttctgtattattgcccatatcgaccacggcaagagcacgctggcggaccgcctgctggaaatgacgggcgtgtttgagaagcggcagatgacggagcagattttggactccatggaactggaacgggagcgcggcatcaccatcaagtcgaaggccgtgcgcatggagtatcaagccaaggacggagagacttacgtcctcaacctgatcgacacccccggccatgtggacttcagctatgaggtcagccgggcactggcggcctgcgaaggcgcgctgctggtggtggacgcgacgcagggcatcgaggcgcagacgctggccaatgtgtatatggcgctggaacacgatctggagaccgtgccggtcatcaacaagatcgacctgcccagcgcccagccggaggaggtcaagcacgagatcgaggaagtgatcggcctggacaccgccgacgcgccgctgatctccgccaagacgggcgaaaactgcggcgacgttctggaagccatcgtcaggcacatccccgcaccccagggcgacgcggaagcgccgctgcaggcgttgatcttcgacgcttattatgacaactaccgtggcgcgatctgctttgttcgggtgaagcagggcacggtgaagcccggaatgcggatgcggctgatgcagaccggcagcgagttcgacatcgtggaggtgggcaccttcaacccgggctacgagtcctgcgacgagctgtatcccggcgacgtgggctacatcgccgcctccatcaaggatgtggccgacacccgggtgggcgacaccatcaccgacgcgaaccgcccggcggacgcgcccctgcctggctaccgcaaggtcacgcccatggtgttctgcggcatctatcccgcagacggcgcggattacgacaacctgaaggacgcgctggaaaagctgcgcatgaacgacgcgtccctgtcctttgacccggagacttccgtggcgctgggctacggcttccgctgcggattcttgggcctgctgcacatggaggtcatccagcagcggctggaacgggaatttgatctggatctggtcactaccgcgcccagcgtgatttaccatgtatacaaaacggacggttccatggtggagatcgacaatccctccaacttgccgcccatcggcgagatcgagcatatggaggagccctacgtcaccgccaccatctatacgccgcaggagtttgtgggcgcgatgatggacattgccgtggacaagcggggcattttcatcgacatgcagtacgagggcggccgcgtcaagctgatctacgagattcccctgaacgagatcatctacgagttcttcgatcaggtgaagagccgcagccggggctacgccagcttcgactacgagctgcacggctaccgggagagcgatctggtcaagctggacattctcctcaacggcgagatctgcgacgcgttttccatcatcgttcaccgggacaaggcctacgcccggggacggagcatcgctgaaaagctgaaggacgtgattccgcggcagctgttcgaaattcccattcaggcggccatcggcggcaaggtcatcgcccgcgagacggtccgcgccatgcgcaaggacgttctggccaagtgctacggcggcgacatcacccgcaagaagaagctgttggagaagcagaaggaaggcaagaagcgcatgcgccagttcggcaccgtcgaagtccccagcgaagccttcctcgccgtcctcaaaatgaacgacgactagcagggactgagcccctgcaccccggactgcgcgccactggcgcgcaggggagtagggggacatggggcttggccggggttttaccgccgtggcacgacgggtgccacggctcgccggtctggtgtagcttcctgccagttgaataggaaagaccgccgtcgggcgacgtgccctccggctcgcaacaaaggctagcgtggatttgaaaccacgctggccttttgtgttataggaatatccaggccgtgtcgaagtatcccgaccggcgctatttgtgtatggatagagtcgaccgaagaagaaaaaataagcctgctttcctgcgctgcgaagttatccaagctgcaatgcaataccccaatttacattggttgagtctgcctaacgccacctgcggggaagccgagcggcgataggcagcggagggaaaaagccttgccctttttgaaagaggaaaagagtgagcacgagcgcgctccaagagcaggtggaagctgtctaactttattgcgcgcgacattgcgaactccctctttcaaaaatgggcaataaagggcttttt

SEQ ID NO: 2413 - DNA, 31288 bp, Unknown
  16S sequences of unknown bacteria
tggtgttctcgatctcagctttgatggtcttgatacggtctgcgattgcagccttgtcacccataccatcaacgatcacagtgctctccttctgtacttttacagattttgcacggccaagcatctcaatggtagtatctttcagttccagaccaacctcttcggaaactacagtgccacctgtcaggatcgcgatatcctgcagcattgcttttcttctgtcaccatatcccggagcttttactccaacagcagtgaaggttccacgcagtttgttcagtaccagagtggtcagagcctcgccctcgatatcctctgcgatgatcagcagtttcttaccggactgtaccagctgctccagtaccggaaggatctcctgaatattggaaatcttcttatcagtgatcaggatgtacggatcatccagaactgcttccatcttctcggtatcagttgccatatatgcagaaatatatccacggtcaaactgcataccttctacaacatccagctcggtctgcatggtcttggactcttcaatcgtgataacaccgtcatttgcaaccttctccatagcatctgcaaccatgtcgcctacttcgtcattaccagcggagattgctgcaactcttgccatctgatgtttgccggatactttgctgctcattgctgcgattgcttcaacagccttgtcagttgctttcttcattccttttctcagaacgatcgggttagctcctgcttccaggttcttcattccttcgtggatcatagcctgtgcaagtacggtagcggttgtggtaccatcaccagctacatcgttggtcttggttgctacttcttttacaagctgtgcgcccatgttctcgaacggatcttccagctcgatctcttttgcgatcgtaacaccatcgttggtgatcagcggagcaccgaactgtttgtcaagaactacgtttcttcctttcggtccgatcgttacacgaacggtatctgcaagtttatttacaccggcttccagtgcttttctggcgtctacgccatattttaaatctttagccatgataatttccctcctgaaatcaatctgtaatcaaatattttattcaacaattgcgagaatgtcgctctgttttacaatgatgtattcttcgtcatcaagttttacttcattacctgcatacttggaatagattacctgatcgcctacctttacctgcatggtaacttctttaccatctaccattccaccaggtccgactgcgataacctcagcattttccggtctttcctgtgcttttgctgcaagaatgattccggatttggtagtttcttcttttgcactctgttttaatacgactctgtcgcctaaaggtactaacttcatgataattcctcctgatcgatgttctttcaatttattagcactcacttttatcgagtgctaacctttagtcattatattagtatgcttatccgaaaatgtcaatggggaaatgaaactttctaaaattttaatattttctggcaattccttttttttcctcaatctgacggagttcatcaaataccgcatcgttgatcaccttgatgttggttcccttcattccagaagaacgggactcgatcacacctgcactctcaaattttctcagagcattgacgatcacagatctggtgatgcctgccttgtctgcaatacggcttgccaccagtgtacactccgttcccttcatctcaccaaagatcagaagaatcgcttccagctcagtcacagacagagtaccgatcgcagactgtacgatctgacgtttacggatctcttctgcattctcctcatgaacagatctcatcatctccagtccgactacagtagttccatactcacttaagataatatcatcaatttcataatctttttcatatttataaaggaacaaagttcccagtctttcaccggcaatatcaataggtgctaccaatgcctgatattttctgatattttcaaattcaaatccaagagtctgaagatttacattctccttggtggaaaggatacccagcagacgctcattgagcagcggatcgatcagcccacccacacggtcaacgatcagttcatggatctcatccacaccatgatactggctgatgcccagaacttttccttttttactgatcacaagcacattagattccagaatatctgacagcacactgcagatatcattaaatactactttgctggaattattattatgcagaagtttattaatttttcttgttttgtctaataattgtacgctcatctttcttctctctcccataacgtaaaaagtgcagtcactcccgcaaccgcactttcgatactagcacatattttctgaaatttcaataaaattctgaaatttctgacatttttaatttttcacagcttcacctgttgtttccgtctgttccttcggtgcctccggtcgtttccatgacacaaaatcacagtccggatagccttcacagctatagaatttccgtcctttggaagatctgcgaagaacgatctcttttccgcatttcggacatttcacaccgatcttctccagataaggcttggtgttgcggcattccgggaatcccgggcaggcaaggaatttaccatgaggaccatatttcactaccatgttgcgtccgcaaagttcgcagacctcatcagacacctcatcttcgatcttcactttctgaagatcttcttctgccttttccactgcttcttccagatctgggtagaaattgctgacaactgtcttccagttgactacaccctcttccactttatcaagcaaggactccacattggctgtgaaatcagactccacaatacttgggaatgcctgtttcataatatgatttaccacttccccaagctcagtcagatacagatttcttccttcttttgccacataacgacgggcaatgatcgtactgatggtcggtgcataagtactggggcgtccaatgccaagttcttccagcgtcttaaccaatgcagcctctgtataatgggcaggtggctgtgtgaaatgctgtttgtcctcaaattccagaagctgaagctctgaatctggtcccagttctttcagaagagacgggttatcactcttctcttcatcctgcacataaacagacataaatccatcaaatgcaacgacagacgcagatacagtaaaacgataacctgctccatcgatcttcacactggtagtatggtactttgcatctgccatacagcttgcagcaaaccgcttccagatcagctggtagagacgaaactgatctctggacagagattctttcactttcaccggcagtctgcggatgtctgtagggcggatcgcctcatgtgcatcctggatcttacggtccggcgctttcttagtctcaccatgacgcagataattctcgccataagtctcaccaatataggaaactgcctgtgcagcagcttcatcagatacacgggtggaatccgtacgcagatacgtgatcacaccaaccgttccctgtccctcaatatcgattccttcgtaaagctgctgagccagccgcatggtctttgatgtagaaaaattcagcaccttggaagcttcctgctgcaaagtactggtagtaaacggaagcggtgctttcttagtacgttctccttttttcacatctgtcacagaaaatgctgcatccttcagagcagccagcacctgatccatctcttctctggagtgaatctccatcttttctttggtagttccatagaattttgccgtcaccggcttcttctcaccagtcaccttaaactgtgcgtccaggctccaatactcttccggtacaaatgcattgatctcttcttcccggtctgcaatgatccggagcgctgcagactgtacacggcctgcacttaagcctctcttaacctttgcccacagaagcggactgatccggtaacccaccatacgatccaccatccggcgcgcctgctgcgcatccaccagatccatatcaatctgacgggcatgctttaaagattccttcacagctgtctttgtgatctcattgaaggtgatcctgtacatttttttatcttccagtcccagtgcttttgaaagatgccaggaaatagcttctccctcgcggtcagggtcagttgccagatatactttatctgccttcttggcttccttgcgaagctttgccaggatctctccttttccacgaatggttatatacttgggttcataatcatgatctacatcgattccaaactgacttttagggaaatccctcacatgtccgttggacgccatgacttcataattggctcccagaaactttttaattgtcttcacctttgccggtgactccacgattactaaatacttcgccatcgatgatcctcgaatccgtccttacatattcattcttgcggatctccctgatatgtcctccaagctgcaaaagcaccaatgtctgaagtacctttgttgcgggaaatcctgtctttttcaccagttcatccaatgataccggttgtaaacgtatccaactatacacgatattttcatcctttgcaagtaaaactttcccgttcttgctatttttacaccttccattttttgtcacatgcagtgcttccagcaatgtctccggactgtctgccaatcccgctccctgctttaaaaggtttaaacatccccggctcagttcatccgtgatccgcccgggaaccacatagacatcctttccctgttccaacgcctggtcggctgtaatcaaagatccgcttttttctctggcttccaccaccagaaccagatctgcaagaccgctgatgatccgattccttgccggaaaaaatcctgccagagggggacgcccgggtccctgttctgaaatgattccacctcgcttttcctgaaggatccaatcatacaacttacgatttcctgccggataacacacatccacaccacatcccatcactgcataggtctcacctccaccttccagtgctccggtgtgggctgctgtatcaattccccacgcaagaccgctgatgatctgtattccattggcggccagttctgccgaaaactgtctggcaatattatccccgtaggatgtagatcttctggctcccaccaccgctactgacggacgtgagggatccggaagccctccaagtacatacagtgtcttcggcattcctttatagggtcttaacttttcagggtactctatgtcttcttgttgaatccattgtatgctgtttcttctattatatatgtctctcatccaaaaggttcctcccagatattatgatccatggttcgatacccgacagcctcaagaagatgaggtgttcggatctccttgcttccttccagatccgcaatcgttctggccacccggatgatcctgtaatatcctctggcactgagtctcagagattcaaatgcctgctccataatgccagtttcttccgttcccagaggacatagattctggattacacgggtcgtcagctgggaattaaactgaatccccaccttctggtatcgttcctgctgacgtctgtgtgccgtcagcacccgacttcgaatcgcctctgaactttcattttctctttttccagtcagttctccatattctaccggtgagatttctgtgcagatatcgattcgatccagaagcgggccagagatccgcttcagatagcggctgatatctcccggcaggcaattgcagcgggtgcgatccggataaaagccacatttacaaggattcattgcagccaccaattgaaaatgcgccggaaaagtatatttcccatctgcccggctgatggtgataacaccatcttccataggctgccgaagtgtctccagcacatttcgatgaaattctggcagttcatctaaaaacaacacacctctggtcgcaaggcttagttctcccggcagaatatgccgtccgcctcctgccaaagcagataccgagactgtatgatgaggggcacgaaagggtctgactcccaccagcccctgttctccggtcatcagaccacaggcactgtacactctggacacctccagactttcctccagcgaaagactgggcaaaatcgtaggtatcctccttgcgatcatggtcttgcctgcccccggactccccaccatcagaaaattgtgcatccctgcagcagcgatctctgctgcccgccgcaccgcttcttgaccatttatctcccggaaatcttccgaaaattgcttgttttgtgtgattggtatccggggttttgataaattgactgcaggcgctttatttttcagcagacaatccatcagttcttccaccgaatgaatgccccagacctccattccagccacggcctgtccttctcctatgttgtccacaggaatcagacaccttcttacacctcgctctgatgccagcaaaaccgtctgcagaatccccggaaccggacggaccgctccgttcagccccacttcgcctacgatcatgctatcctcagaacactcctgcggcagaactcccagtgcagtcagcaatgcagctgccacaggaagatcaaacctggtcccttcttttctcagattggcaggcgacaggttaactgtcactctacgcggcggaaagctgatgcctgtattccgaagagctgttcggacccggtctgctgcttctctcacttctggtgacaagtcacccaccatgcaaaactgaggcagtccatcacagatatctgcttccacctgcactggatatgcctcgattcccagcactgctgctgataatatggtactgaacatattttcctttctggatcttgtatttggaactggctgcgatatgcattcagattttagacgatttcagtataacataatttttttcagagctcaatcctgaaaatgctcccgcaggcgctgcagagcatttttctcaattctgctgatataagatctggagattcccaattcttctgcaatctcccgctgggtatattcctttccctggtatagaccataacgcatgatcagcacctgtctttcccggggagtgagcacacgatccaataaggtatagatcttcctggtatcatctttcagttcgatcacatccaacgcttccggatcctggctctccataatatccagcagtcggatctcatttccttccttatctgtaccgatgggctcataataggaggattctctggatattttctttcggacccggagatacataaggatctcattttccacgcaacgggctgcataggttgccagcttactggctttttcctgatcaaaggtatctactgccttaataagtccaacagctccgatggagaccagttcctccatatctgcttccatcatctgatacttttttgcaatgtgtgccaccagacgcagattgtactcgatgagcacctgtcgtgcctttttatctccattctgaagccgtttaagatactgcttctcttcttccgccgtaagtggtttcggaaaagttttcaaaaaaagacacctcagtgcggatttaatacatcttatgtaaaaatccacacgaaagtgcctttccactttttcttaatttgtctttattcgcttcttctgagcagatccatttcatcaggaatatcccgcagcttcactttcaatgcctgtctggcatgcggagcactctcctgctcatttccttccagatcccagatgccttctaccacagtctcaatgttgcggccatccggcttcatgatctcaatgatctcgcccacagaaaatttatttttctgctccagatcaaagacaccattttcatctgcttttccggtaattcccagataaacataatccttttcataggtattgctgtcatagatctgcgcagtatcatctggctttccatagaaaaatccggtggtaaatcttcgataagtgcagcctgtgatctgctgctcgtaccatggaagatttttttcataaacctctcttccctgagccagatcatccagtgccttgcggtaagttcttgccaccgttgccacataaagtgcagtcttcatacgaccctcgatcttcagactgtctacacctgcttccaccagatccggcagatgatcgatcatgcacagatctttggaattaaagatgtaagttcctctctcattttcataaaccggcatatattctcccggtctggtctcctctacaacggaatatttccaacggcagggatgggtacaagctccctgattggcatctcttccggtgaagaaattgctgagcagacatcttccagaataagagatgcacatggcgccgtggacaaatgtctcaatctccaggctgtccggaatatgatctctgatctgacggatctcttccagtgacaattctcttcccgtcactacacgggccgcaccctgttcctgccagaacagaaatgtcatataatttacattatttgcctgggttgaaatatgaatgtctatctccgggcatacttcccttgcaatcatgaacatccccggatctgaaatgatcagtgcatccggtccgattgcttttaattctttgaaatattctcttgctgcatcaagatcccggttatgtgccagaatattagctgtcacataaacctttactccatgctcatgggcaaactgaattccctccgccatgtcctccatggagaaattctttgctttggcacgaagaccaaatgcttctccgccgacatagactgcatcagctccaaatgtgaccgcaaccttcagcacttccaggctgctggccggaatcaataattccggatgtctcataattgttcctcttttctatctttcacagaaactgccactccatctccaaccggaagaatggaagttgtcagttcctgattgtgagtcagttcgtacaggtattctctcatccgagcatggattgtccggtttcttctctccactgcaaaacgggactggatcagatcaccatcctgcaacacattatcagacaccagatatccatcctgctccagcagacgcatcagttccggaaagtagtggatatactgcgcctttgctgcatccacaaaaataaaatcataaggaccatcaagagtcttgatgatctccatggcatctccctccaacaatgtgatctgatcacatttaccagctctttcaaaattatgctttgcaacaggaatgcgcttttcataattctcaatggtcgtcacatggcagtcagatggtgcatattcacacatgagcaatgctgaaaatccaacagccgttcccagttccagaatccgccggggtttcttctgctttaacagaagtttcaaaaggctctgggtctccacccgaatgatcggtacatagtcccgcagtgcttcctgctcaatggtatccagaagttctgtattccctgtatacaatgaccggatgtaagaagcagttctgttctcctcaaggatcatgattcttcatcctcctcggtcttctcttctccggcaaggatcttcatgatccgtctgggtgtcatggatgtattcagttcgtaggttcccggcttaagtttatcatcgtaacctgtcagcttcaactgaatctggaatgttctgctgtccgtgatcagaccgcggctctccaacagctttgcgatctccttgttgcccatatccgaagtcacggaaactttcacatcccgtcccggttccggatccaccgctgcatctgaaacgacatgataagcaaaatcatatgctgtctgtccgacgcgccagattgcagcgatcaccagcaagacgatcgccagacgtaaaagacctatgcccactgacatcatcagactttccgtactgctctttttactttttttcttctgtcctttgccgctgcggcggctgttctgctttccggtcagagtttacacctccataataatcggaagaatcatcggatttctcttggtcttcttacggatataatctcccagagaatccttcataatattcttcatcttaccccagtctgtgattccacgatccagacatttctccacagcatcgtagacaacagctcttgcctgctccatcagatcctcagattctcttacatagacaaatccgcgggacacaatatccggtccactgagcagctgattgctgtgtttttccagggtcagtacaatgatcataataccgtcctcagccagatgctgacgatcgcgcataacgatatttcctacatctcccacaccaagtccatctacaaagattgctcctgtgtgtactttatctactacttttgcagaattatcgtccatctcaatcacatctccggaatggaggacgaaaatattttccttatcgatacccatctgactggcaatacctgcctgggctttcagatgacggtattcaccatgaaccggaattgcatatttcggatgtaccagtgaatagatcagcttgatctcctcctggcaggcatgtccggatacatgcgcatcctggaaaataacattggcaccttttgctgacagttcattgattacgcgggaaactgccttttcatttcccggaatcggattggaactgaagataaccgtatctcccggcataatatgcactttccggtgcagattctgtgccatacgagacagggctgccattgactctccctgacttccggtagtgatcagtaccgtggactccggcggataattgccaagctgctcaatatcaatcaatgtattatccggaatctggatatatcccagttccgctgctgtggtgatcacgttgaccatgctccggccttccacaacaacttttttattattcttataagcagcattgatgatctgctgcacacggtcgacattggacgcaaaggtcgcaacgataattctggagttcacatgttctgcaaacagtgcatccatggtacgccctacggtcttttcagacatggtaacgcctggacgctctgcgttggtactgtcacacatgagcgcaagaacaccctttttaccaatctcaccaaatctctgcagatcgatactgtcaccgaataccggtgtataatctaccttaaagtcaccggtgtgtactacaatacctgccggtgaatagatagcaagtgcagatgcatctgcaatactgtgattggtcttgataaattccacacggaactgccccagattgatggactgtccatgacgtaccacttttcttctggtggtgcgaagcatattgtgctcctttaacttaccttcgatcagcgcaatcgtcagcttcgtggaatagaccggcacgttaatatccttcagaatataaggaagtgcaccaatatgatcctcatgcccatgagtgatcacaaaacctttcactttatcaatattctgcttcaaataagtcacgtcaggtatcaccaagtcgattcccagcatatcgtcctccgggaatgccagaccgcagtccacaacaactatactgtcttcaaattcgaaggcagttatattcattccaatctgttccaggccgcccagcggaatgatacgcaattttgagttgttcacatttttcaaaaaatttaacctcctgttttattcatagtatttatcgttcgatgtccacatcgtccaaaagctgttcaaacacagctaatagtccttcctgttcctgttcatcctctacgatctcatagagactctcacgttcttcgtcaccggcaacatcacgaaggatcaggcattctccatcctcatcctcagaatctgctaccagcagatagttcactccgcctacgcgggtctgttctaacacataaaattcttcggttgttccgtcttccccctgaaaggtcagtttttccatttattcactcctgttttttcgataatccagatatccctgcaaaatcatggatgcagcgatctgatccacatactctttccgatgctctcttcgcacaccgctctccatcagcacctgctctgcagctactgttgtcagacgttcatcccacatgacaacaggcagacctgtccgcttcttcagcatctctgcgaattccagcgatttctcagccctgtcccctgtggtattattcatattctttggaaagccgagtacaatctcttctacctcgtattccagacacaattcctggatcctggccagtgtacggcgcagcttgttctcctgctcccggcagattgtctcgatgttctgtgcggtaagaagaagcgcatcactgacagcgactccaactgttttggagccgtaatcaagacccattattctcatccgctcttattcctttactgttttctccacatatacccgcaaaagctcttctacaagctcatcccgctctaccttcataatgaggcttcttgcgcctttgtggctggtgatgtaggtcggatctcccgacataatataccctacgatctgattgaccggatcatagcccttctctgtcatagcctgatatactaactgaagaacttctgacaccctgatctcctgatcggactgtatcttgaaatattgtgtattatccagttttttcatcatcacacatccttaacgtgtagtctaacaatatcttactataatcctcttataaattcaaccgcaactttccctgcatcatctcctggtcacggaatccatctacgaaaacctgcactgtctgattcgttaaagattcgtcctgaggcactgcaaccttcacatattccctggtatgtcccacctgccagcatatgccgtcaatctcctgtgcctcttccatcaacacttccacggttgttccgatcagacggtttctgtaatttttactgttttcccgatgtaattcaagaagtttttcactgcgctttgtcttgatctgctctggaatctggtccggcatgcggtctgctctggtaccttttctccgggaatatttgaacacatgagtttcataaaaccggatcttcttaataaactccatagtagtctcaaattcctcttccgtctctcccgggaatccaacgatcacatcggtggttaatgccggttcgtcaaaatgagcccgcagtctgtcgcagcaggcgagaaactcttccgtatcatattttcgattcatacgcttcaaagtttcgtcacatccactctgcatggacagatgaaaatgcggacagagttctttcacagatgccagcccttccacaaattcttcagtcatgatccgcggttccagcgagcccagacgaatccgttcgattccatctatcgccgcgatccgtcggatcacatccagcagattttcattttccagatctaccccgtaagaatccagatgaataccagtcaggacgatttctttataaccacccactgccagacgttttgcctctgcttcaatatcttcgatcttccggcttcttacccgtcctcttgtatacggaataatacaataggtacagaactgattgcatccatcctggatcttcatatatgcacgggtatgctctgctgtgtgggacaggctcagttcctcatatgtgtgttctcttgtcagatcatggatatgggaagcatcatgttcttcctcccatgcctttaagatctctggcagattggctttttcattatttccgatcagaatatccaccgaactgtcctgcagcagttcccgccctgccgcctgcacataacaaccagccgcgatcactaccgcatccggattcatctttctggcacgatgaagcatctgtctggatttccgatctgcaatattagtcacgctgcaggtattgatcagatagacatccgccttttcaccaaatggcacgatctcatagccatgcttttccagaatttcctgcatcgcttctgtttcatatgcatttaccttgcagccaagattgtgcagtgccgcttttttcataatattcctcctgcatggctcttcattttttcacaacttctcattgactttcttgttccaagtatttaatatggtagtatatgataataaacaaggaggagaaatgtatcatgaagaccgttcatatttctttaaattcaattgataaagtaaaagcttttgtaaatgacatcaccaaatttgataatgatttcgatctggtatctggtcgctatgtcattgatgcgaaatctatcatgggtatcttcagtctggatctttccaagccgattgagctgaatattcactccgagggcaatgtagatgagatccttagtgtcctgcagccgtatattgtagactaattacataggtctgatggaatcagcgcgagatgtgaatccacatcccgcgcttcttttttatttgatctcaataatttcctcggttgcaaatgcccgttccatcatctgatcgatttcttcctgcagaagaatctcagacttacggatcagatccactctcggcttggttactggatgttttgccacaaaagtggtacaacagtcttcatatggaagaatagaagtctcatatgtattgatcttctttgaaatcgttacaatatcttccttgtcaaatgcaatcagcggacggaataccggaagggtacatacatcgttggttgccgcaagactctgtacagtctgacttgccacctgaccgatactctcaccagtgatcagtgccagacagccggtatcaattgccagcttctgtgcgatccgcatcatataacggcgcataatgatcgtcagctcatcatgcggacacttttcataaatgtacatctggatatcagtaaagttgatcacatgcaggcggattggtcctgtgtatctggagaccagacgggcaagatctaccaccttctgttttgcacgctcactggtatatggcggtgcatgaaaatatactgcatcaatatatacaccacgctttgcaaccatatagcctgctaccggactgtcgattccaccggacagcagcagcatggaacggccattggttcccagcggcattcctccaggtcctgggatcacctctgaataaataccaatattatggcgaagctccacatgcaggatcacatccgggtgatgtacatccactttcatgttcggaaactgatccaggatccgtccaccaagctctgcattcacttccatggattccatcggaaaacgcttattgacacgacgggtcataactttgaatgtcatggttttatcaccatacattttctgcatataatccagcacagtttcagaaagtgcctcaaacccgtgatcttctgtcagaaccaccggacagattcccacaataccgaagactctcttcaacgcttcaatggtctcatcatagtcaaagcttccttctgcctccacatagatacgaccctgttctctgataatatgaaatgtaccgtcagtctccgcaagtacttctttcatgcggtccaccagtgcattttcgaatacgtaacggttcttgccttttacgccgatctcaccgtatttaattaaaaaagcctgaaacatttatttttcctttctctgttgaatcaccggcgtacaaaccggcgaagaaccggcagaagctctgaaagttcctgcaggcagtaatcgatttcttcctctgttgtatcaaaacaaaaactgaaccgcagcgtacttcccagcagttcttttggaagatgcatactggataaagtgtggctcactgcaggtttattagatgagcaggcagagcctgcagacacatagattcccttatcttccagtgcatgcagtagcacctcgctgcgcactcctgcaaaactgacactgacgatctgcggcgcactgtctcttccgatgcgtccgttgactctcgtatccggcagcttcttcacaccttccacaaaatggtctttcaatgcgtacaggcggtcgatcttctcatccaggttttcgtaacagcacttggcagccactgccattcctgcatctcccggcacattttccgtaccggaacgcataccgttctgctgaccgccgccaaacagaatgggacggatcttcacccgcttatttacatataaaagtcccacacctttcggtccatggatcttatgaccgctgactgacaacagatcaattccctgtcgattcggataaatatgatattttccataagcctggatcgcatccacatgaaacaggatcgcaggattcttttccctgatgatctttccaatctcttcaatgggctgcacagctcccacctcattgttcacatacatgcaggataccagaatcgtctcttcgcagatagcttccttcaaggcatccagcgataccctgccgtcttcatccaccggaagatatgtcacacggaacccctgctcttccagatatttcatggtgtttaatacagatgcatgctccaccgatgtagtgatcagatgattacctgctctgcggttcgccatggcacatccgatcaatgccaggttattagattctgttcctccagaggtgaagtagatttctttctcattcaccttcagatttgaagcaaaaaatgcttttgcctctttgatatatttttctgcttctactccacgcatatgcatagaagaaggatttccataatcttccctcataatatgcaccatcttgtccgtcacttcttcaagacatctggtagtcgccgaattatcaagatatgcttccatcttacattactcctccagctggaacatgagcaccgaaaggatacaaagacccgctgtctctgtacgcaaaatgcgtttccccagggtcaccggtgcaaatcccgcctccatactctgctctacttctgctttttcaagaccaccctccggtccgatcataatacctatggactgtcccggcagaatggtcttcaatctatttcttgtccgctccataggagtctcttccgtgccggacaacagttcatctgcacactcatagggaatcagtttcacatccagttcttcggaaagcttcatagcctccctgtagctgaccggcagtttcacctctggaacgactgctctgccggactgtttggccgcgctctccgcaatggcctgccagcgtttcaccttactttgcgctttcttctcatccagcctgactacgcagcgtttcgatgccaccggaacgatccttgctgctccaagctcaacggccttctgaatgatcagttccatcttatcccctttgggcagacactggaacaaggtaatctccgaacgcagctccgaacttacccgactcttctccagaatctttacctttactgtctctggcagaaactcctgcgcactgcaccggtattcagaaccaaatccatcactgaccgtcagttcctctccctgcttcatgcgcagcacattttcaatatgattcacatctccgcccaggatctcaatatattcctgctcttcatgaatctgaaaaggttctacaaaaaaatgatacatacttccattccttaattcttacgggctgttacagatacccactcaccctggtgggtcacttccagcacttccagtcctgctgctttcacggcttccacaacgaccgtttccttgtcatctataataccggaagtaatgtagataccgccttttttcaactgatggatcactactggtgtcagcggcagtaatacctctgccagaatattggcagtgacaatatcatatgcctcttctcctgcctcactctgcaccttcggatcatcaatgatatttccaagaatcacatcatactgatcttccttcagaccattgacttccatattctctttcactgctgtcactgcacatggatcaagatctgttcccagtgcataacctgctcccagcttcaaggctgcgatcgacagaattccacttccggttcccacatccaggatcctgtctccgtctttcaggtatttacggatctgacggatgcagagctgtgtagtctcatgcataccggtgccaaatgcagttcccggatcgatctggatcagaagtttatctttgtcttcctctttcagttcctcccatgacggtttgatcaaaatgtcatccacatagaactgatgaaaatactgcttccagttgttgatccaatccttatcctccgtctgagaagcctcaatcgtggctactcccacatccacaccccagctgcggatctcatccagtcctctctggacagctgccagcatctctacattgtcctgatccggctccagataaaagctgatcttcgcaactccatcatccgccggtccttccggaagaatatccacgaacatctgggatttatccttctcagaaagtggaatcttatcctcaatctcgatgccttcgattcccgcatccatcatcatgctgctgatcagatcttctgcctcggtcgttgttgtcaacgtatatttattccatttcatggttattcctcctgttttccgtatttatcccgacttcatatcataacacagactctgcttaatgtgcaagaatataatcggtcagttccttcatgctgtgtaccacgccaatcgcaccagctgcctccagctcaccttccggcgcaaatcccatggcatttcccagacacgggatgtgaaatacagccgctccttccacatcgtgtttccggtctccaaccataaggaccttatccatctcttcttctggcaaattcaatctgtgaagcagttcctctatcaccttgtattttacacagcggctctcgtccagacttcctccacagatataatcaaagcatccatcaatgccaaatgcttgcagcgtcgtcagtacatgaacctccggcttggaagatgccgtacacaggattctgccatccttatgaagcgcatcaagcatctctctcactcccggaaacaacttattctgatgaataccatacttgtcaaaatactccctataataaatagttccctgtcttgcctcatccaacgtaaatccataaaactccgggaaagactctgtcagaggcggtccgataaaccgctccagttttttcagatccggttcttctatccccattttggaaagtgcgtactgcactcctttggtaatgccttctctggaatcccacaaagttccatccagatcaaaaaatatgtacttgtatttcataatctattgctcctcctctgctttcttctgaaagctctctaaaatataactctgcatcttctgaactgcaggtgccagtacatcagacctcacataggccagtacaatggttctcttttcctctacttccagtgggattacatctacaggaaacggaatattccggatcaccaactccggcatgaggcagacgccaaaaccacccatgaccagtgatactgcggacatatcatctgcaatgtagcttccgcctccacctggcaggtcatacttgttcatcacatgattcacatctgcgtcacagccttccctctgggttacaaaacgctgttttttcagttcctcaatggtaatatatcccttattctcagtcttgaagccctgcggtgccacgcagatgatcttgtcctgatagataggtgtacagggcagatctcctgcactggtggatgaaaggaatcccagatctacgattccatccttcagccactgatacacatcatcataacttccctgataaatatcaattcgaatattcggataatccttttcaaaacctctgagcagacttggcatccattctacacaggcactgttgaaggtaccaatcctaacaacacccttttccataccgccgatctgtgccaccgcctgctggagatactcctcactgttctgcacattcttaatatagggaaacaattcctttccataattagtcagatacacgccctgcttacttcggataaacagcgctgatcccaattccgtctccatggaagccaccgcatggctgatggctgacggtgtcagattcagaacctgtgcagccttctgaaagctttcctgttccaccactgccagaaatacctgataggctaataaagtcatatctttctcttctccttgaatatttttcatttcaaacatgaaaaaaatgaattttacttatctataaaactatactattatatactcataaagtcaatatcaggagaaaatccttttgttgtataaaatgtgtttgcgatgaaaaatggaaggctatatgccttccatttttcaatttagatgtacaaaaggtacttctcacatcagctctccataatcagttttcttccatcccccagaagccactcatagatttcatccagtccttcttctgaaaacgcaaaatctttactgatcttctgttcgtccggcgtatgcttccatgcatatggctccggccagacggttacacgcagataatcctgcgcctcttcttcctctcccaccgtcactttgccgatccagaaccggattccccggtctgaaccggtaaatgcttcttttttataaaaaggcagatgaaacaagtcgattcgatccatcataatgattctccttttagcgtggccgtcacccagccatcctcataattcaatccaagctctgttccaaccggggtcaaaaagactacctgctgattctgaagtgcgttcaacagttcttcatccgacaacttattaagataagagatatctccattctgtttcttactctgctgacggaatctcaatgccgtcatatcatccaccagcatcagttcttcaaaagggatctcgtctccggtctccatatcaaaggtcgctgcctgcagccatacacgatattgtttcgcctcattggcataagactggaacaccacactcagacggttctctgtcatataagtcacatatccctgcatgccgcagtattctgcattcttatgctctgcctcaaatgtctgcaccatctctttaatccgatcattgacctggttaagttttgactgatcatcgccaatcagttccggataaatataattggtatcgccttcattttcctgattattttcatccggataaatatcctcgctgtgccagagtacctcataacttaagtccgcagtggtggcatcagtgatctcttcgtaatagttacctgatgcatccggctcataatcgccatccgaatcatagttgtaatcatattcatcatcatcgtcatcatcaaaatactcggaatagcccgtggagagatgactgctgtaattcatgcctccgatcactgccactgcaataaatacaatgaccaatacgaccagtgcaatacaaagaccaattaccagtttgatggcacctggcatcttctgattcttcttatccggttccggcggaatccggtcatcatactgatattcattatcgtaattctgatctgactggttctgtgttgcattttcctgtgcatcatacggatcacgatattcgtccatctttatcctccctgtgcgtaagatttctctgacatttctgcatttattgtagcataaaacctgttctccacacaacctaaaagacgccagccttccgtccagcgtccttctttacacatccatttatttatcatcttcccatacatacggcgtcagctgatatacatagtagtttaaccagttggtatacagggtatttgcatgggcacgccactgcagagccggacggttagaatcatcgtcatccgggaaataatttttcggcagatcaataggcagtcccttcgccttatcacgctcatactccttctggagagtgatccggtcatattctgggtggcccatgacgaagatcttctttccgccttctgccatacacagaaatacacctgcttcttctgattctgccatgatcttcagatcctcgcatgctgcaatgtcttctctcgggatcgcagtatggcgggaatgcggtgctacaaaataatcgtcaaatcctctgaccagtggttctttccgattcagcaccttatgtgtataaagtccgaacagtttctttggcaacagcactttctccagaccatagtaataatgaagtgctgcctgtgctccccagcagatatacagtgtagatgtcacatgtgactcacaccaggcaaagatttcccgaagctctgtccagtaatccacctcttcaaacttcatctgttccaccggtgcaccggtgatgatcagaccgtcaaatctctttttacgaacttcttcaaaggtctgataaaacttgttcagatggctcttatctgtatttttagattcatgattgcttactgtaataaatgtcacatccacctgcaatggtgtattggaaaaacttctgagaagctgaagctctgtatcctccttcagcggcatcagattcaggattcctactttcagtggtcggatctcctggctgagtgcacggctctcatccataacgaaaatattttctttttccagtatttcttttgccggcaaatcattctgtattctgattggcatatatcttctctcctcgtctattcatcaatcttcacagtcacggtccaatagctctcactggcctcgatctttgtgaccacaccttccagactgttcagttttttctttgtgttattggacatggcaatggcatcacggatcgtataataatacatgacacctgccatagtgttggctgcgtcttcctttaatcgtacctgatcaccgacctgtattaatccagcccgctccatacgaaattccatctctctggtcatcatacgccacccccaaaaattcttccaggcacagatcctgctccgtcatcagctgtgccgccgggattcccacataccgcagatgccatggttcggaaataatacccgtaatcgcagacttatccttgggataacggatcacatagccatactcccaggcatgcttttctgtccactggtattccttggtattccgaattccttcgtccagatttttgtaactgcctgtcacaaagtcaagagtcagtcccagctgatgttcactggttcccggtacagcaacgaccgttccggcttctttgacagccttttcatgactgtaaccctcccgttccagacgttcaattttatttttaaataaatatacctgtttcatatatgtacgatatgcagaagtcagattcatccgcataccgacacttttcgcatctttcatcatctgtgtgatttcttttgcagatctgcgctccaactgatgaccattgcccacactgaccagatcaatatccagttcatctttcagaatatactctttgttcagaagacttaaatatccattgatgatcgcgtcctttgccccgggcgcatgggagttttcaatatccttttttaattgttctgtcaatactaccgtctgcttcttcggtgcagccggctgtgttgtagtcgttgtatctgtcgttgcattggggtctgcggccgcgtttggatccgccggttgtgtgaccgcattgggatccatgggctgtgccactgccggatcaactgctggctgtgccgctgcattcggatctgctgtagctgctggagcagtcggctgagcagccgcagccgggtcaacagcctccgttgcatatacattcagcacatctgaagtcacaagtcctgtaccaagcataagcgccgttcccagcaagaacgccgctttctgacaagttctatcgatcataaagctcattttttctcatcctgtccgtatactgtaattctcttcttctcctcaagtttctgcggtatcagcagcagagcattccgccccgtccaccgaagcaacacaaattgcataacatgttcgccagacaaagtctgcagcagaaatcatttcccataacactcataccgccgtatggagtgctcatctgatcataccatccacttccaccttccagctgctgtacaagtgcccggtactccatatttcccggctgcatggaagctgcccgcctggcgtgatccaatgccactacattgttgccaagtccattgttggcaatcgcacttaaataataccatctggcagtcttctgtcccatgccggaaagcacattcagtgcttcattatacttgcctgcccgtatgtagttcattgcggcattcagatgcatggtatattcatcattctgacctgcactggaagctcctccgtaaccgccgaatccaccggcacttccatagccgccaaatccgccatagcctccggcgtttccgtatccgccgtagccattggtactgccatatccgctgtagccctgttccttctccttcatgatctgatcataggctgcctgaacctgcttgaatttctcctccgcctgagcagcattgggattattcacattggcatctggatggtattttcgactcagtgtccgatatgctttttttatctcatcatccgatgcgttccgggacacacccagaacttcatatggatccatcatcattcctttttatctgtaccctttctactgcagcgaatctgaccatatcggctccagactcctgcatacaatatattccgaagaatttccacctcttccacaatgggaagctgttcaaacacacgggaagtctccgccatcatcatcttcagaatctgctggcagttctcctcaaaagattcctgcccgtataactctgccagaggattgtatcgattctgtttcagatcctcttcaatatcctcataggcatccatcagataaatgaactttccaaaataaaagcccatctttcttaacttctccgcccattcatcttcgcggcatacaaacaattctgccataatccttccgaaaaatccagcacttttatcaatatcacaaatgtttttcttttccagttcacggagtgccttcaggttgtccgctgtcatctgtgctttttctccgtaaagcttcctgatcttcttcatctttggcataagcatccaggaaaagattcttgcccatagcttcttctcatcctgccagtcatccaggcatttataaaaggtaagaagcacattcatgtccgccgcgtagtcaaaatactgattctgccgaaaatgatgccggtttaccggatgcgcaatgcaacgttcacagccagtaatggtttccggctcataaagtcctgtcagcaaaagtgccagaaatgtcatgtcatagctcaaagtcatctgcccgattcgtccatgacgcttcttcagacttctgcacagaccacagtagcttgctttgtaggtctcatattcccggaccttcagttccggtttgtgtacaataatatatccgaacataggcgcttagcttctcttctgaaactcaaaatgacatttcgggcagcgcaccatgatctttccttttccttttggaatccggatcttctgtttacattttggacaagtataaatatgatgatactttctctcctgccagagctttttctgttgatccagccagtaacggaattttgcagtcagctgcagatatttctgattttccgcatatcttgcactgtgattttttgacagcatccgaaaaatatccaggatcagaagtgcatagacgaccagattcagcatcggatttctcaaaaaggtgttgataatcatcaataccagtgccaaaaaaaagataaatcggtataactgatccacaccatatcttccttgcataaaacgataaaatttctctctcataaaatttcccctttattttcacataatgtattctatttacattaaatctatgaacctattgtaaacgaaccctgtgaaaatacaatgaaatttttcttaaaattcatataaccattcagagccatgcaaatgttcaaaaaatacgggaatcagagccatgctttaagtgcctccatctgtgcacaggcatctttatatcccaggtcatagaccgctttcactttttccggatttttctccatgcgaccgatctgcgggtcacggcttggacggatcacgaaaatctctcctgacttctccatctcctcaatctgatccatcgtttcgttgtaaaccttatagcgctcctccatggcctttacaaatgccggatatttccgatatatccatttcgccggaccaatagaagatttcttcttccgataaccagcaggtctggtcagcaccacgatatttttctcatagcccatctgccgaaatgccctgatcggcacactgtccgccacacctccatccagcagcttcatgcctcctacttccacgatctgcgaaaccatcggcattgaagcagacgcacgcatataatcgatttcatccatcgtgtccaacagaatatattccggtttccctgtctccacattggtacaacccacataaaaatccataggtgactctgcaaatgcttttcggtcgaatacatccagacgatctggaagttcatgataactgaactccgtctctaccagatttcctgtcttcaacaatgagcgaaagctcataaaccggggattcttcatatatttcagatagtagcggatgcttcttccatgctgtccagacacataagagcatccatgtaccgcacctgcagagactccgatgacaccgtccaccgtgatattctgctccagaaatgcatccagcacaccagcggtatagattccccgcatggctccgccttccaatacaagtccttttttcatgttcattccctttccgtcaagtctatccatagatacgaaaggggacagcaccggaaaacggcctgtcccttatcatcattctgtgatcttatgatcttacaggatctctttgatccatccttccggagctttgatacgacccatctggataccagtcagggtatcatacagcttcttggtgatcggtcccatctcttccataccactcggcagacagatctcggtatcatgatctacaatctttccaaccggggaaataactgctgcggttccgcacagaccagcctctgcgaaatctttcagctcgtcttttgcaatcttgcgctcttccacttccagtcccaggtactcttttgcaacatacatcagagaacgacgggttacagacggaagaatactgttggacttcggagttactaccttgccatccttggtcacaaagatgaagttagctccaccagtctcctcaacataggttctggtagccggatcaagatacatattctcatcgaatcccttattgtgagcatctacaatgttgtaaaggctcattgcatagttaagaccggctttgatatctccggttccatgaggtgctgcacggtccacatcagatacacggatagtgatcggctttgcaccgcccttgaagtacggtccaaccggtgttacaaagatacggaactgatactcagttgccggttttacaccgataaccggattgattccaaacatatacggacgaatatacaacgtagctccactgccataaggcggaacataagctgcatttgcttttactacatcaacaacagcctgcacgaaacgatcctccggaaataccggcatctgaagtcttcttgcagaatctgccatacgttttgcattcaggtccgggcggaaggtcacgattcttccatcctcagttgtataggctttgattccttcaaaacaggtctgtgcatactgaagtacacatgcgcactcgctcatggtgatcatcggatcatcacttaaggttccctcatcccatgctccatctttatagttggcaacaaatctcttatcggtcggcatataggcaaaacctaagctgccccagtcaatgtttttcttttccatcacattttacttcctttcctatgtgtatagaccatgtctgcgatgactttatcttgctttatgatacgcttttcacactgtagtgtcaagaagcaagtggagataaagtgaatctgatgttggacaattttcacacgccacctctatcgacaaccatacaaaaagtggcagactatcttgttttccataagataatctgccgcttctgcgatcttcctgttttaacttgttacggttgtaggctttcccgtttggaacagttctggtcaccggattgaatgtaccccaggttcctctctgttttgcataaaattctttttgcttcttcttcgactgcttgtcgatgggaatgaatttgtccattgtattttcctccatgtaaaatgtgatgattgtgattctcttagtatattctcttgcttgaggaaaaacaatagtttcacgcaaacatattctcttattacatccttgtctctttcatcgtggtcatgctatcataattacagaaatcttgttccacttgaggtatttacagatgaaaaaattgggttatatcttgattgcttttgtttttatattcgcagtgctgtttcttttattttcaggcagcgctcccacttcggaactaattgaagaaaccgacgattcacaaaacagagaaattatgtctggcaccatcgaaaacacgctgccagacccggaactaaacgattccacgtataacagcgtgtatcttcacacaaatacagcagactacgactgtggcatgacgttggctgaactcaatgaaaaattcggttcagatctgtcatatggcgattatgtgtctgtaactgcggaggtttctactgaagagatctatccacaacggatcgtattgtactctgttacaaaacttcctgcctcaggatacaccaccagtcgcgccacaataaaactcgacagtgataattttctcctgacttacaccaccatatgaaatattgcctgacacagaaatctgagctgttcttcccgcatcaatcaacaagtaattacttcccgtctcctgccatgttccagtatcagtggctttactcgaactgatattacttaccattgaaatatactgtctttcagcatgatattgtgtactgaaatctgctttgattttaatcatgatatcggcagtattttcaactgtaaagcttacattcttcgatgctgcgacagcatatctggtctcagatactaaatccgccatgtcatcatttttattcactgcaatctctgccatagcaaatgctttcacaattttttcaaattcatcaggtgttctccagtcttcatccgcaaaatcttctgcaggtaaaagagtaagttctacatctgtatctgaagatacttcctccacaatttttttatattcttcataatactccgatttctgctgattctcgtctgctgcacacacgaccattcctgccgatcccacagaaatacttaacatacagatcattgccactgctgttctcatgaattttttcatatgctgccctccttcatcaatttattacatcacaacacaaaatacataaaatccaccatgattttttcatcacttttatttttcacatacaatttgtatgtgtcatcttctttgatttcaaaattatgcattccatttgcatcaagagtcacatatctcttttctgttccttttatgactcccatatcaatcaccccactttcagaagaaaaacttactcccatggttacggtctgaccttttttcaggaagatatctataataacatttctggattctttgtctatttcccaggtatacgatccattggcagaagaattcgttgatgtgatttcctcgattataatatcctcaccgtccaatacatccccatactgctccaccagagaatcttcatattctggttgctcaatactttcctgaatacttatcatagattccccataaatcctgtttaagctgtattttgcaatatttccagttgcaaccactgccacaggacaactcacgccaaatataagtgcaagtacataagccatccatctttgtttttcttgcatttcatgatgatttttaactgacgctactctccacttcattgtattttctgtttcatataaagcggaacacattttgtagttctgtattccggatttttccatttcctttaccagaactgaataatattgctttgcagtccaatttgcatgttttccaatacacaaatccatatcacagatcacttcgctccacccatcatattcctgaaacagctttctgacaaatgggcaaaaccaatatgtaacagatattacggcacttaaatttttgaaaaataaatccttatgagatacatgtgtaagttcatggcttaaaatgattttcaatgtttctgaatcgtattgattatccggcagaaaaatatatttttcaataattccagtcaccatcggagcatgaattccccgacagatgataatcggaattttctttttataatgcaccgattccggcaattctgaatagacgatattcagtttttccttatccagttgctttccaagcagcctgatatttcgtaaatgcattttttctttcacatattcctgcaaatgatatatcgcacccgccaaccatattatgaaaataacaagaagaaatgctgcaatacggaaattcgcccacggataccaatcatagctgattcctgtactgaaatcgtaatttttcaatgttatataaaaccagccgaaaggaatcacaaaaagaacaagcactgttttcaggaaataatataaaaatctgtaggttcctttcttttgccatatcattctacataatttccaaagttgaaatgcaattcctccgactatcccatttactattactgtataaaagacgacacaaaatccagaaacaccaaaatcaaaaatccaactcatcaaccaattttttcacaagctctacagattcttcttccatccccttctctgaaaaaaatgctgtcagagtcttgttcatttgtcctttcccccaaaattcgtataactcttttacttgattcttctgatacgcttcctctgtaagtaaagcttcatattcatgtgttctgccaattccagcctgccttgatgtgagatatctcttttttaccaattttgccagatatgtcgaaaccgtctggggtttccattctttatctgaatgtacattggtataattcacgatttcctgaagtgtctttccatctcccatttcccatatgcttttcattacaagcaattccgtttttgttaactcttccatagataaatcccttttaaactatatttatagtttaactata

SEQ ID NO: 2414 - DNA, 16954 bp, Unknown
  16S sequences of unknown bacteria
gccgacgatggcgttggtctgcatgggatcaagcagcgtgaccatatcaaagtccacctgcacatcatcctgtgtgcaagggccgatctcacgactcgccgatatcgcgccggaagtgctggagcccacagagacaagcgcatcctcgcctggtttcagccgttctccgaagaagatatcctccagccagtatttgcccgccgcctgatcattgttgaacagatagatcttgccgatgtcatccggctgctgcgccgtagaacggaaggcaaagtcatccgcgatctgtgtctgcgcaccatcaggagaggtgacaacgacatcatacgttccggcatgcagatcgatcctgacctccagccggtatttttcattctgcgcaaactttaccgatgactgcacatatccatttccgtcataggcgccgaagcagtcatctttatacatgcggatgatgatcggcacctgtgaatatgcggtatatgccgaatctgaagaaccgatgccgacgatggcgttggtctgattcggcgaaagcacgctgatcatatcgaacgacaatgtcacttcttcatccgttgaaggaccgatctcacggctggccgaaaccgcgccggaagtgctggatcctacgctgatcagcgcatcatccgccggcttcggtgtctgtgcaggcggggtataatcaaaacgaatctcatactccggccgctctggataacgcccatcgctcagcccctgatcaagcagcgcggtcagcttggcatcgatcaccggatcgaacagctgctccttgtaactgacgatcgcgatgccatcttttatcgaagagaggatgcggttttcctggccgcatacgtcgttcagcgccgcatattcctctccttcatgcaagatgatatcgctcagcccatctgcgcgctcttctccatatatggcactgaggaaggacagcggcacataagtctttccatcctgcgcgatcgcggtcatcgtccccgtttcatccagcgtcgtcacgcgggaattgaccacagcgtatggcgagccttccttcacggcgacagcgccgatcatccgtttgttcagcgcaggctccacatcatcacgcacatagccctggctttccagcttagacagctccgaaaggaacagcactgccgcggccggcgcatagctttgcgaagagccgatgcccagcgaacaattcggattcggataagcgctgatcagttctgagcggccgaccagaccatccggacggaacgcattcgcgttcaatcccaggaacgctttccgcactgccggataataggtttccttatccagcagaccatggttgatgccccatgtcaatccataagcaaagaataccgttccgctggtctccggccggatatcatgtgcatgatcatccaggttcatgcgccagaagccatcttccccctgtacctggataagcgtttctgccattttcttgaacgttgtctcgtattccaaacgatcctcttctcggtcatccggcaaatcttccagcactcgggccaaagaggccattgcccagccattgcctcgtgcccagagcacctttttcccattcgggctgaccttctgattattgccgctgctggccgggtcatatactgcatccggatcataaatatagttgcggtcacgatagaacagaccgctctcttcatcatacagctcttgcttgcggtcatcatataattcccgctgcttgtccagatatccttcatctccggtcaacagatacatcttggtccagttcggcagttccatatagaagaaatcgatccgatcccaataaccataccggtttttcaggtcgctgacgctcatctccttcatctcttccatgatcggcaccacgtttgcgatcttttcatcgcttggatcaaaatcgccctctgccgtgatcgaatacatatccagataagtctggaagctggtgtggttatccgggaaatacttgccgatccggctggaattggcattggtattccaggcactgccatcatagagattattgctgccccagcgattcgcataatcggtataattctcatcaccggtcagataatacgcctccatattgcctgtataaaataccgaaggtgcccagaactcactgctcacagaatgaccgtgattgtaattcgcagcatctgagccagtgtttcctccagtgcggatccaatagtcattgatcttctgtgccagagaaacgatctgttcgccatcaggcatctgcgcttcatcataactggcttcagttccccataccttgaactcagtcagcgccgaaaacttcttcctgccatctaccggaatcgtttcttcactcaccggcagatttttcatcctcacccaggaaacgacctttttctctggcagcttgaacgtctgcggagaagcaagtttctccagttttctctccccctttcccttggccggaaaataaaatatcttcatactcattatactgttcaactgcttgtaattttttgcactttgatgtaatatttccccctcatcgctcgatcatcccctttacacgacacttccagatgatcgacgagcgctccatcgttactattcacttcagttttttgtatttttttcatttttcctgttgacattcatcctttccattggtattatatacgagcaaacagcgatggacccttagctcagctggcagagcaactgactcttaatcagtgggtctagggttcgaatccctaagggtccaccatttgaacaagaaagcttgagaaatcaagctttttttctgttttataagcatatagcagtcatactgatcttttttacaaaacaagaggtaaactgaatgatcagtgggaccgacaatcagacatacaaaaaagagcacgatccctcaggatggctcttcttgcaatgattcacgaagcgctgtgatccatcgatcgaacagcgcttcttcttttatggtccgattggcattgctcgtgctgggcagatagatctgacgcagcggaagctgcgagaaatgcttctgatagagtccctcgctctttttgccgttgcagatgaccgtatgcagcgtcggatattcgctgaccagccgatcgatcggattgacgatctccttgcggatgctggaatccagagacccttcccgctcacaggcatgaatgacatcccacaggatcagatgatgacttaggatgatctgctgcttctgggcgtaatgatctattggcatctgaaaacatgcgctcatgatcttccagaaccgattatggcgatatccataatactcatgcttttccaaggaagccacgctgggcatggaccccaggatcagcacatagggcgtttccgcaatgatgggatcaaaaccgatcagcacacttcttcaccgatcacatcgtgcggaagcacctgcgtgaccttgaccttgacgaagctgcccatctcgatcggtctgtcactggtgaagatgaccatgccgtccacgccatccggcgcatcccattcgctgcggccgcggtactttccggtcaatccttcctgatcctcgaccaggacctcgatcacccggccgatcttcttctgctgattttccagtgcgatctgttcctgcagcttcatcagctcatctagatagcgttccttcacttcatccgggcataccggcttcatgctgaagccaggagtgtcttcctccggagaataggtgaaagcgcccatgtgatcccagcgcacatcgcggacgaactgcagcagttcgtccatggtctggcgatcctcaccagggaatcccacgatgaatgtcgtccgcagggtaggcgaggcaaaggtatctctgatcttctcgatcaggcgcagcacctcttcttttgtcccccggcggttcatccggaccagcatctcatcattcgcatgctgcatcgggatatcgaaataagggagcaccttaggcagcttcgccatcccctcgatcagctcatcatcgatctcatctggatacatatagaggatgcggatccagtggaaaccatcgatctcatgaagacgctgcagcagttccagcagctttctggaaccataaagatccacgccgtatttggtcgtatcctgcgcgttgagcactagttccttcacgcccctctcggccagacctctggcttcctcgaccagacgttccatcggcacggagacattgtcgccgcggatcagcgggatcgcacaatatgtgcaatgattggaacagccttctgcgatcttgaggtatgcggtccatggcttgctgctcaacagccgctccgcatccgcaaaacgcacctttccttcatcgtgcagctcttctgcgagcacctcatgcagatggtcatagtcactgatgcgcacgacggcatccagctccgggatctcttcttcgagctgctccttgtagcgctgagccagacagccgacggcgatcagcttcttcagcccatgttccttgtatcgcgccatctcaaagatcgtagagatcgcttcttccttggcgctggtgatgaatccgcaagtgttgatgatgattgcctctgcttctgaagggctgtggaccagcgtatgtccgttggcctgcagcatgcccatgatcttttcgctgtccacaagattcttgctgcagcccagtgaaataaacccgactttcattgatctgatcttcctttccgcgtcaatcgctttgataaaaaagctgcaggcatctgtatcccgcagcgcttttcttactcttctccctgaacaggaagcttcttgaggatcacgccgataccgtaaaggatgcagccgaatccaaaataaggagcaatggatgacacgatagaatagatcatggagctcatcacatccgtcatggccacgccatagctttcagcggtctgtgccagtgacatgtagctggaaatgccggcgtagatgcccagcagcaggaaaatgaccgccatgatatagaaggcaagactgccgtttcctgccttgaaccttctctttttcgtttctttatcttttttcatgatactcttcctctcttttctgcgtatgtttttattttactatcaaagggacgaagttgcaattaaaaatcatcgcttgatgatgttttcatgcacaattcagaaaaaggcccatctcccattgggaaatgagccttgtgcgcaccgtttactgcggacgcttgcggatgctcaggcgaagctctctcatcgctttcaccatctgatccacttcatcctgtccggacgcttcctctcgcagtgcctctgcttctgccagcacctcgcgcactgcgtccatatcgctttcgtagtactccccttcgttctccagcatgctcttcgcatactcgatctcgaagtccagtccgctgtagtcggtctgtgcctcacgctccagttcgctgtatgcacggatcagcgcttccgctgccgcgtctacatcttcctggaccgcttcatcatcgtccagcaccgctgccgcttcctccagcgctgcggcgaacgcttcatagctctctgccgtatatccttcggatccggttcccttcaccgcgtcatagaacagctgcaggaagctcttgtctgctgcttccggctcctgcaccttcagctcgctgatcgcctggcgtacgctgtccgccgcatcattcagcgtctcgatgtcttccgttccgctatccagcacggcctgtgccgcgctcactgcgtttctcagcgcttccacgcctgctggttcataaatgctcacatctccgctcaggatctcctgtgcgtccgtgatggcttctgccaacgctttctgcgcatccagcaccttcagtccgtttccagcttcttccagggcgctgatcgctgctgtcgcttccgcttcgctcacttctgccgcatccttctccaacagcgtttccgccgtctcgatcgctgccttcatctcggcaaactcttcctcgctgtagcttccttccagctcgctgcctgccgctgccagctctgccaatcgttccatcgtcgcgctgtctgctctcacgatcagtcctgcgatggcgctctccagcttctgctgcgccgcatccacatctgcctgcagcgcttcttcgtccgctgccgttgctcttgcttcttctaatgcctgcgtgaatgccgcatagctgcttgccgtgtagctttcttcatcatccagctgttctgctctggcgatcgtatcattcagcgcatccagcgatacctcgaacacatgcaccacgcattctgcgcgcttgccgttcaccgtcgtcacgctgatcactgcgtcgccttctgccaccgcgcggaccacgccgtcttctaccgtcgccacttccgcgttcgatgtgctccagctcagctccttgctcatcgtcgtatccacaggattgatcgtcgcattcagcgtcgtctcacgtcctgccttcatcgtcagctcgctgtgatccaggctcacgctgatgatctcgatctctcttggctctacggtcacgatgcagctgtcgctcttgccattgctcgtcgttaccgtgatcgtcgctgtgcctggtgcgatggcagtgatctcgccttcattgaccaccgcgacttccggcgcatcgctgctccaggtaagcgtgcggtcatccgtcgtatcgcccgggatgatcgtcgcattcagcgtgccgctctctccttcggtgagcgtcatgctctcctgatccaggctcacgcctgtgatcggcacttcctgggtctcgaccacttctactcgacatgtcgtactgattccattgaccgtttctacccgaataattgcatatccttcacgcaatgcggtcacgttgccttcctggtctactgtggcaacagaaggtaccgtcgacatccacgtcagcgtcgtatcatcggtcgtatcgaccggctcgatcatcgcgcgcagctgctggctcgttcctgcctccagcgtcatccgcgtctggctcagacggaccgaggtgatcgggctgttgaccgtcacttcacatgacgcgctcacgccgttctcggcacgcaccgtgatcgtcgtcgtgcccggacccttcgccgtcacattgccggtcgcgctcacgagcgcgatcgtcggatcctcgctctcccagctcaggatcttgctgtccgtcgtattgcttggtacgatcgtcgcttttaatcctttacgtgtattgacatccatttccagctcggtctcgttcagctcgactgcagtgatcggcaactttcgatcatctacatgtaccgtaaccttagcctgcgcgccgtcaggaagctctgcggtaatgaccgcctcgccaccgctcttcgccgtgatcacgccgttttcgacagaagccacctcatcatcagtcgaagtccatgtcaaactagcattattgaccaccgcataacttcttctcatgaccgtcatctcgcgattttctccgacctgcatcgtgatctcatctgcttccatcgtgatctcatcgctcagtaccacatacgctaatcgtgagtttactgcataggaatatgctcccgatccattcaccacatacagcaccacgttcggtgaattataaaatactgtggagccaaatttgtctcgtgcgatcgagctgggcaagaacaccgtttctaacgatgggcaatctgcgaacgcgttgttgccgacctcgctgacccctgtcggtacgatcactttcttcaaattgtcacaataccgaaacgcctcgctgggaatcatctcaagatcttctggaagctccacgctcaccaggctgtcgcaatcgttgaagatgccgctgccgatcgtcgtcacgctttccggcagctcgatgtcgctcagcgcgatgcatgccgcgaacgcggatgcccctaccgaagtgatgctctccggcagctcgatatgctgcagggagctgcacgcgctgaacgctgagtccgggatcgactgcaggttggaaggcaggttcacctcgctcaatgagctgcatccggagaataccgaataccccaggttcgtgatcgattcaggcagcgtgatctcctgcaggccgatgcagttgaggaatgcgctctgaccgatctgccgcagcgtttccgggaacgcgatgcttcctaacgcgtaacattccgcgaatgcattgttgccgatcgtcgtgatccgatctgataatttgatctgttccaggttcacgcaggaacggaatgatgcgctgccgatcgatgtcacgttttccggcagcgtgatctgtgtcagtccgctgcagccgctgaacgcgctgtccccgatcgaacggatgctctgcgggatcgtgatctcactgaggctcgtgcagcctgcgaacatctcctgtgccaccgtcgtcagcgaggccgggatgttcacatcctccaacaggatgcagttcttgaagatgcccctgcccagggacacgatgctctccggaagttcgatgctgctcaggctcgtgcactgcgagaacgcatagtcctgcagcctcatcaccgtctccggcacgatcacgctctccaggctccggcattccgcgaatgcagcgtatccgatcgcactgaccgtcttcccgtccagctcctccgggatcgtcagatctctttctgatccgccatagttggtgatcgtcaccgtcccatcgctgttatcggtgtaggtatagtctcccaccgtccgcgcgatgaccggcgtagccgtcatgctcgtcgttaccgtgatccccgaaaggatgacgagcagactcaacatgatcttaaatattcttttcatactatttctcctgctcattcatgaagcatgtccatgtcagtggatatcgctcacgctgcacccatagttctgttcttcgtagtagtccttcgccatgtcctgcgaataatatccgcggttcttgtcgatgaactctccctgcagctcgtccacatacgggatctcctcgatatcgatcttcgtgtagtcccatgtctcctcgctgccaaacccggtgtcggtccgattcagctctatgctcaccccatcggtctcagagagcgcgctcgctcttactgccatgtccgtcagcacggtgttgctcgcctcatctttcggatagccttcatactgatgcgtgatctctccggtgagcatctgtccggtttctcctacataggtgaaatccgcggagctcgtataggtcatcgcatcgatcgtctgctcataggtgcagtgcatcatcatgtccgctttcggcgtattgctgcatccgcccagcgtagacacgaacagcaccggcgcaagcagtaccgacagtttcctgtatctcatctcattcatcctcctcgatgatgtggttctcctgcagccatgtctgatagctttccagggtcacttcctcttcgctggacaacagggtgtcctgcgtctctccttcgccgatgtaatacagcgacggcgtagagctgaagtccccgaagttatcatggacgagcgtcaggttctgttcctcgctgtactcttccttatccagcgtcacgcaccacaaggtgatccctgcttcctgcgtatacgcatccgactctgcgaaaaagttcatgcaatatccgcaatacgtctgcgtgatgatgagcaggaagttctcgccatcatctttcttggcgattgcatcatccaaagagatgctcttcacctcgccattgcccggatcaagtgtgatctgcggatatgtccggctttcgctgcatccgctcaccagcagcaggaacaggctcatgcatactgccatcattcgtttcataaacattgctccaatcatgtcattgtaatgaaagggtgacttgcgtcaccctttggtcgtgatcttctggttacgcgtttagcggtccttcttcagcgtgtttctcttcttgaatgctgctgccaatgcgcccagtgcaacaacagacatcgccgcgaatccggccgtgctgttctcagccgcggtaccagatccattcgtctgggttccgctgttgccagctccagtgccgctctcgccattgttgtctgtatcagtgtttccatcatccggcgtcgtgctcggttcatccgtgcttccgccaggtgtggtcgtgacatcctgcaggttgtcgatcgcgctcaacagagcgttggtcatgccatcgaccgtatcctgatctgcttcaggatctgccagcagtgcctttgcgttagccaacgcattcttcactgcctgtgcgcttgccggtgtgtacttgctcagatcaagcgcttctgcctgtgcgatcgctgccgccagcgcctcgacatcggccttcgtgcgggcattcagcgctgcttccatcagcgtctgtgctgcctcatcgatctcttcctgcgtcgtggcattggccagaacatccttcgcgtcattcagcttgtcttccagaccaactacggtagacggacgatagtcatcgatgttcgctaccatctgttctactgtttcgatccagttctccagtacggaagtgttcagaccttcacgtaccagtccggcgatcgcatccaggacggaagtgatcgcgttggtcacttcgctggtcgtcgcgtcatcatttgccgctacttccttcgctgcggcgatggcgttctgcaggttgttgtagctgtcttccgtatatccatctgcagtgattgcttctgcttctgtgatcacggcgttcagctcatccttgctgacgatgtcccacagttcatgaacggccttcgtgatgttcgtgatggcttccttataatcgtctgccgtcgcgttctcatcagccagcacgctctcgcctgctgcgatcgctgcctcagcggcttcgatcttgccaggacgtgcgttgactgcttcttctacctgtaccttcgcataagcgatggtctcttccaggtctttcttcagtgcttctgcagactgagatgcgttcagctgctgtaccgcttccgcgatgttcagcgttgcggcaacgacttctgcggaagaagcgtctgccggttcagcgatcagcgcgttggctgcctgaatcgctgcatcgacatcggcgaatgcctcgctcgtgtactgatctctcagtgcttcagcgttagcgaccgtcgctgccagtgcatcgatggatgcctgagaagctcttgcttccagggctgcctgtgctgcgctcaggctggcgatcgcattgctgatctgctcagcgctgctttcctcagtcagttccttcgctgcgttcagcaccgtttcgaatgctgcccagctggaagtcgtgtaatcttctgcatccagagcatctgcttcagcgatcgcatcctgcagatcagagaagtctgctccaggaacagatacctgcgtgccatagaagttcatctcggcgcaagatgcatatgcgttctgtctgtcaccaagagactcgatggcgatgaagcgtacataacgtgcttcggttgcgtcgaatttgatttctttaaatttcgtcggatctttcagggagtttccgtcggtttcaagataaccttcaacgatcggtgtgaaggtctcgccatccagactggtctcgatgcgataatgcgtgaccataccgttgtggctgccaccctgacgcggcagataatctacctgctccaggttgtatgtgccgcccagatcgatcgtgaaccactgcggcagagtgtatccgctgttatagttcgaatgccagatcgtgttcgtgttgtcatccaggacattggatgcatgttcctgttcaactgcactgcagctggactcatcgaacatgctcatgccatcatgagagatcagattctcgctggacggctgatcctcattggatcccttgaattccagcgcgtcaactgcgctcatgatcgcgatcgtcgcattgtcaatgtcggcctttgtcgtattcggatcaccgatcagtgcctgcgcagcagctactgcttcttccactgcggcccagctgtcttcggtatacagattctcatacaggctgttgaccttttcgatttcctccatcagacgatctgtattcagttcgtccgtgacattgatctgccatgtcgcagtatgcttgccatcttcagttgttgcagtcagcgtagcagttcctacgccagtgccctgaacgagataagtgtagtgatcacccatcggaatttctgtcacagtagcaacttcatcattgtcgctggtgatgtgatagaacgggttcgttgcgttagacggtgtgaccgttgcgaatacttcaccgaagtcaccgacagacagcgtgcttacgcttgtttcatcaaaggtaatgccagttgccggaacagctgcgtcctcttcgatctcgatctcaaacagagaaagcatgcggttttctactgaaccagtcgtagatccggtagctcttccatcagaagtcagcggtgtccatacgatgcggtctacgtcggcattgatctcaaataccggagtggatccctctactacatcagactcataaacaacttcatcgccgttgtaagcgaccagctggctggtacgcagcgtaccattgccactcgttctaccatatacggtgaagttcgtgatatgtcttgtgccatccagatcgatgttgaagtctgtcggcagcatgacttcctcgctgatgttgtcatttccataataccacttgaactcagccatacttccgctcgtagcgccatcgaacagcaacgtctgccagttgctctgctcccacagctcgctgccatcagagtttgtcagatgttcgttgtcaaacgcgatggattcgatgccattgcccggagtcaggatgctgcttgtttccggtgcttccggcttatcggtcagatcgatgatcgcatcaacggtgctcagatcctgtccgaccagcgttgcgctgcttgctacacgatcattgccccaggtaaagtcagtatttgcctgaatcgtgatcgttgcaatcgttcctgtgccattgatcagatcctggaatccgaggttagtgaatacggtgtagttgtcaataccctccgaagcagatgtatgcgtgcgtaatttagagaagtttctcatgaacgcagtgcttacagatgcagaacccggatttgtcaccgtaaacagtgaatcatcttgatggaactctacagagaatgcattgacattcttcagtccgataccgaaaatactgatattcactgtgtcaccagctttgatatccgtcttatccggaacaagcatgatctttccatcgacgccgtcagccggattagagattccaccgttgagctgtgtagcgacataagaaaggtcgtatgcgtcgatgatatcgttaccatcgatatctccgccagaatccttaatgtactcaaagtcagaatcacttggaatcagcccaatatagttttcatagaaggtcaggtcattttcatccagagaacctgaatggttaacatcaccgacgatcgatccatttttaccatctactttgtagacaaggatctcgcttgcagagaagaagttaccaacgctggcacgcgggatgaaacggacataacgtgcggttacgccatccatttctacggtcttcgtcgtgttgtcacgagcaaacgtgtaaacctgtccttcgctccagtgaatgccatcgatactggtcgcgatctccatctgcgtcacggtgccgtttccagcatcatcacgcggatagtactcgatcttatccagctggtaagccataccataatctacggtcaaagctttaccgatatctccgccgccggaatggaatccgccgtctccgatctggaatgtatggtcaaatgcccgatctgcagtacggttgctgtagatggtgccttcccaatcaatatcggtcggatacggagtgttgcggaacggatcatcatctgtcatcagcatgatcggttcagaccagttagaataatgaccatctgcgcttacagaacgtacacgataagtgtgctccgtagagaacatcagatcatcctgcgtgtaagtcgttgcttcgatgttgttgaatacagtgccatcgacttcgatgtcataagcattgattccatcaacagcgtcccatcctaccgtgatataatcatcagacttgtcgacctcacgcagatttgccggtacggtcaaagcctcatccagttcatttgccggcagcgtctgctcattggcaaagccttcgacaacgacctggaaatcatactcactgatgttggtcttcgcgccagacttgacatacagcttcggcgtagaagtcgcatcaagatccgcgatagatgatccttcatccgcgaactgcgtcacatatacgctcggggaaggatcatagaagtacacattgccttcagcctcttccaatgctttcatggaatcgaccttagtgaatgtgacatcctgtccagcaacagaaccagtaacagctgtcggttcctgagatacattcacgatgaactcagtagaacgctcatgcgtcatatccgtatactgaccaatggtcttgttcgctgtcagcgttgcggtatcaccatcaacaactgaagtatataaagtcgttgcgcttgcaccgcctaaagtcttaccatcatcttcatatgcttcaaattcggtgcttcctgcaggccagaactcaacgatgcgctgagaatcatccagaccattcggattcgtttctgtaatggcttccgggttgttgttttccggatacatcggaacgatggatccgttcttgacaaacaacggcagcttccagatcggtgcgtcaaagtagttcaggatctgtccgccgcgatactgttcaccagtgaagtagtcgatccatacatcgctcgtgctcggcagatagatatcgttacggatatcattgccatcttcatcagctgccgtatcctgatagatcggggcaacgaggaagttgtcaccaaacatgtactgatactgcgttgccgtaccaagtgtgtattcgttttcctcttcgaggaacatcgcgcggatcatcggcaggccgcctgctgcggttccttcatgggaaatcgtattgatgtacggcatcagctgtgccttcagcttcagatatgcgcggttgatggaagttccatcctgtcccattgcccatgggctcttctggttgcttccccagccatccatgtcaagcatgtatgtcgtgaaggtcttccactggaagtcacgcgtccagatggtcggatcgcctccgccgaagataccgtccatgtcagaaccgatattcggctgaccggacagagatgtaccgatgtatgtcgggatatggaagcggatgtattcccactgtcctccagactggtcaccggtccagataccaccgtaacgctgcgtaccggcccaaccgtccagcgtaacgatcgtcggcttcatgccggatctggaagtaatggcatcatatgcgacagaaatgccgttcaatgccatggagtaacctgcgcctacccacgcaacgtcggtcttgacggcgtgtacaccagcatctacttcagcgtagatatagcgttcacccttttgcgggttatcctgatcggccggccacagattagactgtgtccacagaccggtctgcacgcccttggaaatcgcataatccgcaaatgcttgcaagttatcgatatctccctggaaagaatcagtctggccataaccacagccataaccatcattcggcaggaaccagccaaacggcatatcgtaatcttcatattcatcaatgatggcacgtgcgctgatgttgtcatcgttatttaatgtttcacgctcgccgccattatcggtctgtgattctttataccatttgtcacccagtttgaccgcaccgcccgtgccttcatcgacctccagccaatagtcacggttgtagcagttcaagtgaccaagataccatgcatattctggaagttcgaccggatttccagtcagttcatagtaatctttgaggatacctgcagcgctgtcatccacaaagaagtatgcgtcgaaacgctcttcattgtgtgtcgttgtgatcgtttcatcgctcgtgaagtcataagcacccggcttccacgtattgcggacaacaccgtatccattagttgaccaatagaacgggttcgggctggctacgccgccatctacccagttgttgctgttagtgatgttgatgacttcacccttgtgtgagaagcgtccgttctgcgtaccgccgccatagaagtattcatccgggctggttgccagcgtctggatggtgcttccattgcgatactggatcggcgctgcttccttgatcacggtctctccctgtgcatttgtgaccgtcatcattgcggatgccttatctaccgtgatcgtgatgccgccttctgcgatcatcgttacagtagaatcatcttcgataagctgcggttctaccttataatccgtataataatcggcatcggtcttattcgtgatcgtagctgaatgatccgagctgttcggtgtcggatactcctggaactcttctccaggcgctgccatatacattctgaatacatttccttccaggaatctgaaacgaatgcgctctcctgcttccagggtcaacgttacgtcgtttgcctcctgagaaacagatgcgacgctgctgacataagtatagccgtcctgcgcagcaggataactagcagatgtctctgttccagcgtctgtctggctttccgtgttctcatcgttggcgaataccgttacgccagtgctgagtgtcggcaaagcaagagcaatggcaagagttgtctttccaattctctcaaacaatttactcataaaaaattaacagttcacctggtatattgtaaaagactcatctagcggtcactacaatataccttttccttt

SEQ ID NO: 2415 - DNA, 9469 bp, Unknown
  16S sequences of unknown bacteria
gtgcgcgctcgtgctcactcttatcctctttcaaaaagggcaaggctttttccctccgctgcctatcgccgctctgctcccccgcaggtggcgctgggcagactcaaaggaaagccagttgggatgttacggcgtaacttggctggttttgcagcaaaaaaacaggcttgtttttttcactacggttggcactatgcctactcaatcagcatcgcttgggatgcttcgtcgcggcctggatattcctgtaacacaaaaggccagcgggattttatatccacgttggtctttgttgcgagccatgaggcccgttgccgaatggcggccttttctattcaacaaacaaggaaaccacaccagaccggcgagccgcgaggcccgtcgccgagcggcggtaaaaccccggccaaaccgcatatccctctacgcccctgcgcgcccatggcgcgcagtccgggggtgcagggggtcaccccctgctatacggtgagggtttcgtgctcgccgaggagagcggcgttttcggcgagaaggggacggatgaaggtggaaaggaactcgtccacctgctgggcactgcggcccgtgtagagagtaggatcaagtaaggattgaagctccgcttccgtggtctgaaaaaggggatcggcggcaatgcgggaaagcaggtcgttgggcaggccttcttccttgactacgttgcccgcagcttgggaatgaatgcgcaaacgctcgtgaagctgctgccggtcgccgccccgcttgaccgcgtccatcagaatgttctctgtggccatgaagggcagctcgttcatcacccgggcatgaatgaccttcgggtaaacgaccagaccgtcgcagacgttcagcatcacgttgaggatggcgtccaccccgaggaaggactcgctgaccgcaatgcggcggttggcgctgtcatccaaagtacgctcgaaaaactgcgtggcgctggtgatggcggcgttcaaagtgtccaccatgacgtaacggctcagggccgaaatacgttcggaacgcatgggattgcgcttgtagggcatggccgaggaaccgatctgctgcttttcgaaaggttcctccatctccttgaagctctgcagaagccgaagatcgtagctgaatttgctggccgtctgagcaatgccggaaagagtggaaaccacgaaatagtccatcttgcggctgtaggtctgaccgctgacgggcacgacccggtcaaagcccatctgctgggcaatatcgcgttccaactgacgaatcttttcctcgtcgccgccgaaaagctccataaagctggcctgcgtacccgtggtgcccttgctgcccagcagcgccagcgaatcgagccgatgctccagctccagatagtccatgtatagctcgttcatccacagcgtggcgcgcttgccgacggtggtcagctgggcgggctgaatatgggtgtaggccagacagggcatggctttgtattcgtcggcaaacttggccagcttgtccagcacattgagcaccttccggcggatcagctgaagcccctgcttcataataatcacgtcggtgttgtcgcccacatagcagctggttgcccccaggtgtagaatgcccttggccttggggcactgcaggccgtaggcgtagacgtggctcatcacgtcgtgacggcattcccgttcccggcgctgggcgtcctcgtagttgatgtcgtcctgatgggcttccagctcggcgatctgctcgtcggtgatggcaaggtcctgcgccttttccgccttggccagcgcaatccagagcttcctccacgtgcggaacttgttgtcctcggagaagatgaactgcatgtctttgctggcatagcgggtggaaaaggggctgatgtaggcggaatggtcggacatggcgagacctccttgaaagatggaaaaggggtaagtcgatgcccccgatggttgacttttttggcaatgcggattttcagcttgcgcgtttcctccgcgacgagtcgccaaacggcggacattttccagaagggcaagggtcagtataccacagttgcgggggaaaggcaaaaagaaaccggccgagggaaagcctcagccggaaggaaatcatttctgcttgcggatgcggcgaaccaccggctgcagcacggcagcgatcactacgccgctgagaccctgcaccaggttgggacctacagcgcccagcgccgcggccagaccgtagcccagcgggagccactcgacgagaaaatagcccagcaccatccacagctccgccagcacgaaccagaggatgcgcagccagtcggactgagtcttgcggcagcccactacggcaatggccgcaacgcccgccttgatgaggaacgtaggcaggcagtacaggggataaccggcgatcaggtcggccagcaggctaccgatggccgcagcgggcaccgccgtccagtccagcagcaccgcgcccaacagaatgaacgcgtcgcccagatgaatgtagccttgggtgatggagatcgggatcttgaaaagataggtggccgcgaagaccagcgcggccatcatgcccccaaaagccagtttttgcgtgtttttcaggcttttgttcatgagaatacgcctccttggtattttagtggcttgccgattgagcctgcttttgcaggctggaaaggtgcttgtcctcttccccggcgatggtttccagcatggcacgggtgtcggcatcctgcgccaaagcggcgaactgtcggtatttttgggacgagcattcttccgccgccatggcgtaattcatcatggaggatacgtcgttcagcagcccgcgccgcaccgcgtccatcagaccgccctcgaacagcacgccttcggctgcggcggagagcatgagctgttcttccagcgtaccgtccaacggctgggcatgggcgcggaactgccgcagatgctcccgctcgtcttcgcaggtctgccgaatctggacggcaatcggatcgtccgcacgtccctgctgctccagcagcatcagagcgcgggtgtagagctgaatggcgctcttttccatttcacaggcaatgaacagcgcctcctgctgcgaacggatctccacgatgattcacatcctttccacgggtttcccatgggttttccacattttgagaataatttcccacacgttgcgcatataacggaaaagtgattgaatcacaagggattccatcactttttcgctcagttttccacagaattacttcttggagttcaaaaactcgttgagtttttccacaagttcatccgcgttggtgccgtgcaccgcgcaggcgtcctcgatgggttcggcggtggcgcaggggcagcccagacagtgcattccgaagctcatgaaaatcgcggcggtgtcgccatccatacgaagcacttcgccgatggacattttcttattaacaggcatggtcttctctccttttccgttcggactttttgcccgaaccgaagctatcttaacattgtaaaatgggattgtcaatggaaacgagccttgtcacggcagaaagaatcgtgctatactaaaactgagatcgcgcgaggggaaggagtgagcgaatggacgaaaaggcacagcggttttccgaggaatgcgggccctatgcgggcatggtctatcgccactgccttcatatgctgtcccgcccggaggaagccgaggacgcggcgcaggagagcatgctgcgggcattccgcgcctatgacggctaccggggcgaaggaacagccacgtggctgtaccgcatcgcccataatacctgtctggacattctccgttccgcccgctggaaacgggaaacgctgccctatgacgggcttccggagacggtcgatccgtcgcccacgccggaggacgtttatcagaagcgctcccggcaggagcagctctggcaggcggtggaacagctgcccacggatcagcaggtgatcctgtctctttattatggagaaaatcagtcctacgaagcgctgtcccggctgctgaagctgccggagggcacggtgaaaagccgcttaagccgtgccagggaaaaccttcgaaaggtgctggggcagggagatgcaacattttgaggaacttttgggaaagtctctcgtctattcccatgaaaggaggagaggaacatggagtcgaagcatgaaaacgaccggctggacgatgagctgatggaactgttcagcgcgcctgttccgtcttccttcgaggaaaaatggcgcagcgccattcagcgagaggagagtttaaccatgagtcagttcagcggccatttggaaaaggaacagaagaaaacaaagcggaagtggtggaaagcggctttgcccgccgccgcggcgctggtgctggtcgccggttcgtgttgggtgggcgctcagcaaccggagtacggcgcaagcgatcgttccttctctgcgcagccccgcctttacacttccgccagtgactacgacggcggctatcagaacgaagcggcggcctacgatctggttggctccagcgaggaaagcggctatgccaaaaaatccgtttccatggcttccggaagctcggcagatacatcggccttggaacccacagcggagactagccgcaagctgatccgcaccgccagcctgaccatccgcacggcgcagtacgacgcggatctggaagcgctgacccagctgataagcagtgtgggtggctatatcgagtccacctatcagagcggcgatctggaaagcggatctgcccgcagcaacagtatgaccctgcggatcccgtccgacaagctggacgagttcttgaacgggctggacagcgtgggccgggtggtggaccgttcggagagttccacggacatgaccgtgcagtatgcggacaacgaggcccgtctggcgaccctgcgggccaaaatggaacggcttaacgagctgctggaaaaggccgagacggtggaagacctgatctccatcgagagcgccattgcggacacgcagtattccatcgacagctatgagacccgtcagcgcaccatcgaccggcaggtggatatgagcgaggtggatatatatctgcgggaggattccccggtggaagtgacctcggagatgagtcttggggagcgcatcagccgtgccttccagaactccgtggaggacttcggacagttccttcgtaatatgctggtctttatcgtgatggcgctgcctgcattggggctgatggcgatcgtaacggcggcagtcctgctgatctgccgcacaaagaaaaaagggaaaaaggcaaaggagatgaaagagcaaaaatgaaacgcatggcaatgttgattctggcgttgatgctgacagtgctgcctgtagcggcgttgggcgagggcgaaagcaccgtaacggtttacgggtatggaaaaacgtatgtaacgctggacacggcggtcattacctttgaaatttccgccagtgccaagacggttcaggaagcccgcaagcagcatgatcagaagctggaggagctttacacgacgttggaatcggtggggatcagcaaggatcagctgcaaatgtccgattcctttctgaatacgcagtatgaattcaagttcggcaagcttgagcgcggcgtagagcaggatgagcagagcgtaggcagcgaatggatgctgactctgccggagaaagggatgctggaggggactctggatgcgatcctttccgccaacgtagtttcgggctataccttcacgctggagagcagcggcaaacaggaagcctatcaggaagcgctggatctggctatggattatgccctgcagaaggcagaattcgtcgccaaaaccaacggcatgaagctgggagcactgcgcagcctgaaggaagaagaacccgttttcgggcacaccattcgttcagagactgacgaattgatggacagcaccatcgtttccgctaccgtggaaatggtctgggagcttgtgaaataaggtagagtatatttttcaataaaacacccggcataggcttccatgccgggtgttttattgggttgacctgcaaaaatggtcatgtgcagccaacagggaatggagagacagtagcccattcgttcgtaattttctttgaaggatcacaaactgtctcattgtattatctaaaagctgacgctataatgctggcaggaggtggacattcatgccaaatgaaaatgaaaaagattttaattcgatgctcaatgatagcaaagatatgccgaaaatccaaataattacagacgagaaaagcatagaaaaatacggtggaaatagaatgtattttgcgccgccaatcgattatgatagagtgatgaagttgatcccgtatggcaaagtaatcacaataggaaaaattcgtgaatattttgctaaacaacaccgagcggattttacggagcctattacagcggggatctttgtatcaatttctgcatgggcgagttaccagcgttctgaaaacgaaacgccttattggagaacgttaaaagcaaatggagaattaaatccaaaatatcctgggggaatagacgaacagagattaagattagaagccgagggacacacaattctttcaaaggggagaacaaatgtgaagtattatgtaaaggattatgaaaatgttctttttgtgctaacataatctttttcactaagcaaacctagtcgagtctctcaatcgtcaagatgagcggcatcaaggtactctttatcagcttatcagccccgcacccaaagggcgcgggaccggggtgccggggcactgcccctgcaaaaaaacagcccgtctaaaaagacgagctgtttttcatacggaaaaatccatcaaacccgtaagtcgcgaagcccgttgccgagcggcggccttgggagtcaagaaacttcccgaccagccccgcgcccaaagggctcggaaccgggtgcagggacaatgcccctgcgattagaacttcaaggggttgaccttcacggccgggcccatggtggcgctgatatacaggctgcgcacataggtgcccttggcagcggcgggcttcgccttgttgatggcttccatcagggtggtcaggttttcggtcagcttttcagtgccgaaagaggccttgccgatggggcagtggatgatggcgctcttgtccacgcggtattcgaccttaccggctttcacgtcggaaacagccttggcaacgtccatggtcacagtgccgctcttggggttaggcatcaagcccttggggcccaggatacgaccgatgcggccgaccacacccatcatgtcgggggtggcgatcatcacgtcgaaaccgaaccagttctcagactggatcttgtggatcatttcctcgccgccaacgaaatcggctccggcagcttccgcttccttcaccttgtcgcccttggtcacgaccagcacgcgaatggtgcggccggtgccgtgaggcagaaccaccgcgccgcggacctgctggtcagcgtgacgggggtcaacgcccagacgaacggagatctcgatggtctcgtcgaatttggccttgctggtcttgcaaaccaggtcgcaagcgtcagcgggatcataagcagtcagggaatcaatcagctttgcgctgtcaacatacttctttccgtgtttcatgtttccgtccttcctgtggtactaacggcactatgtcctcccactcttggtcgtcttattcctcaaccgtgatgcccatggaacgggcggtacccttgaccatgctcatgatggcttccagatccgtggcgttcacatcggggcgcttgatctcggcgatcttctgcacctgctccttggtcagcttgccaaccttgtcgcggttggggcggccggaagcggtctgcaggttcagttccttcttgatcagaacgggaaccggaggagtcttggtgatgaaggtgaaggtgttgtcggtgtacacggtgatgacaacggggatgatcatgccggcttccttggcggtgcgctcattgaactccttgcagaagccagggatgttcacgccgtgctgacccagcgcagggccgataggcggcgcgggagttgccttcgcggcgggaacctggagcttgatcatggattttactttcttagccattcggtttgtacctccttattgtggttatggcggaatgcgtttcacattcctcccactgttcgcctgtaaattacttgccctggggaaccttttcgacttccgacaggtctacctctacaggcatttcgcggccaaggaacatcttgacctttaccgtcagcttttgacgaacggtatccacgtcctcgaccgtgcccgtgaaattctccagcgggccggccagaatgcggacttcctcgccgatggcgataccgaattccacgctgttttcctgcgtggaaagcattacctccacctcttccggggtcaggggaaccggcttgctgtcgggacccacaaagcccgtaacgccgcgggtgttgcgcaccagataccagctttcactggtctcgatcatgcgcaccagcacgtagcccggatacactttgcgctgagacttgacgcgcttgttgcccttgatctccaccacgtcctccacggggacgcggacgtcgaagatcaggtctttcatgccgttgttctcaaccgacttttcgatattatccttgaccttgttctcgtagccggaataggtatgtaccacataccagcaaggttctttgctgttttcggccatggtgttactccttaagcatgcagactcatgatcgtgtcaaccaaccagctggcgcccatgtccagaaggccgatgatgatcatcatgaacagcatgaaaagtaccacgatcaccgaataattgaccagcttttcgcgagtaggccatgtgaccttcttcagttcatgccacatgttcttgaacgcgttgccgatctttgcaaagaatttgacaaaacccttgccgaagcggacgaagaagttttccttcttgctcttatctgccatggttttcccatcctttcgcaaacccggaacggccgagaccgcccggtcaatgcaatcgcgttggttacttacttggtctcgcggtgaaccgtatgcttcttgcagaaacggcagtacttgttcagctcgatacggtcgggggtgttctttttattcttcatggaattgtagttccgctgtttgcactcggtgcaagccagcatcaccttattacgggcaacgcttgccacgtttgccacctcctagctagtggttgtcagctctccgggacggacgcccggggaaggaacgtcgtgcgccccatccgcccgaaggcggatgggggacggcgcgtgaaattactcgatcaccttggcaacaacgccggagccaacggtgcggccgccttcgcggatagcgaagc

SEQ ID NO: 2416 - DNA, 32759 bp, Unknown
  16S sequences of unknown bacteria
gcggagggcatcgagcgcgtaacgggacggtcggcggacatcaagtgggtgaacgacgtgttcgtatcgggcaaaaaagtttgcggtatcctcaccgaagcgtctttcagcgtggaaaacggcgggcttgaatacgcggtgctcgggttcgggatcaacgtcaaaacacaggcgttccctgcggaacttgcaaacgtcgctgcggcgctctatcccgacggcgaatgttcgggcgatacgcgcgcaaaactcgtcgcctgtattctggaacggttccgatattattatgaaaatattcccgtgcgcgccttttatcccgaatataagcgccgaagcattctcatcggtaaaaccgtgctcgttacgggcggggaatcgggcgaagcggaagttctggatatcgacgaaaactgttatctgcgcgtgcgttttgcggacgggagagagtgcccgctctcttcgggcgaagtcagcgtaaagatacaataaggaggctttgtggaaacatctgaaaagaaagtatctgccgcgcaggaattggcgaaatgcgcgatcttcgtagtgctcatgactgtggcggcctacataaaaattccgttctggcccgtgcctctgagttttcagacggtgatatgcgtgctcgcggggctgttgctcggctggaaatacggcgcgctgtccatgctctgttatcttatgctggggctcgtcggcgtgcccgtattcacgaaagggggcggatactggtatgtgatggaactcactttcggttatatcttaggttttgtcgctgccgcggcaacggcgggcgcgatcgcgcatcggaacaatatgccgtcgttccggcgcatgatctttgcctctctcgcggcgatgttcgcagactatctgttcggcacgatctacttttgctgtatatggcgtttttatatgcacgcttcgggtgtctgggcggcgctttggacgtacaatattttgtatattttcaaggatatcgtgctctgcgttctggcggcgctgctcgccaaaaaacttttgccgatcgtcaataaaaatttccgcgccgattaaatatttttgagccgaaatcgatttttatgaaattcgagcgcgccttcccgctgcaattttgacagcatggcggaaagcgcgcttctgtccgttcccaaaaagtcggcgagcgcctgcctgtcgaaagggatcgtaaaggaatccgagcctatgcgctcggattccttttttaaatagcagagcactttcccgcgcagcgtccgcctggacaggcactccacgcgttccgtcagcgcgacgctcttttgcgcgaggatctgtaacagattggcggctacgggctgtaaatttgcgtcggcgtcggcaaatttttgcgcgcggagccacagcgcctcgcaatcggacgccgctatcacgctcacggccaaaggcgttccgacgagcgcgaacgcttcggcgaacagttcgccgcttccgagttccgccacgagcacgggatttccctcttcgtcctcgcgcacgatatgcgcggtacccctcgtcaatataccgaattcgcgcgtcggctctcccgcgtgcaataaaaattcgcccttttcataattcttattgcgcgcgcacagtgctgcaagcgcgctgtcttcattttcgagattccgaaagagagggcagttttgatggaaatttttcatgatttctctccaatccgttgtcgttacaacgtattttatgcaaaaagtatagtataattcatgcgtaaagtcaaggaggtattttttttatgattcggaaaattataaaaatagacgaagaaaaatgtaacggctgcggtctgtgcgcggcggcgtgccatgaaggcgccatcggcatggccggcggcaaggcaaaacttttgcgtgaagattattgcgacgggctcggcgattgcctgcccgcttgccccgcgaacgccatctcgtttgaaacgcgcgaggcgcccgcctatgacgcggcggcagtggcgcgcgcaaaaacgcagacgctgccgtgcggctgtccgtccgcgcaatcgaaaaagatcgaacgcaggagcgcgcccgaaacggctaacgaagcacggagcgaactttcgcaatggcccgtgcagatcaaactcgtctctgtcaacgcgccctattttcaaggcgcccgccttctcgtcgcggcagactgcaccgcgtacgcctgcggcgattttcatggcagatttatccgcggccgcgtcacactcgtcggctgtcccaaactggatatggcggattattccgaaaaactgtcggagatcttaaaggcgaacgatattctgagcctcactcttgtccgtatggaagtgccgtgctgcggcaaaatggagagcgctctttgcgcggcgctggaaaatagcgggaaaaatattccttttgaagtttatatcgtctcgacggacggaaaggtgttcaaaaaatgatttcccaatttttgtaattatgtgaatgagaattccgtgaaaaaagtcacgatttgtcgaatttgaggatcatccgcttgctttttggcgtaaagtatggtataaattgaacaactgaaattgcagaacaaaacggaccgggaaaaatgattgaaaagaaatcagttttttcggtctgttttgcacgcgaaaaaaggagcaatgatgaaaaaaagatggttattggctgcattgctggctttgggttttgcctttttgttgacgggttgcattgacgcaaatatcgtaggcaaaacttataaagtcacgtttatcagcgaaggggaggagtatgattcggcggacgccgcattgggcagccgcgtcgtttttcccgaaacacctccgacgaaagaggacgacgaaacgtacacgtatacgtttaaaggttggagccttaccgaaggcgaggacgcaaagcccgtcgagagtcacatcgtcgtcggcgacgtcacgttttatgcggtattttcccgcgaagaaaaagaccccgaagacgtatatttcagcgtgtctttcaaagacggcgtcacgggcgaaaagatcggcgaagatcagaaagtcaaagagggtgaagacgcaactctgcctacgccgcccgaacatccgggatatactttcgagaaatgggataaaccgcacacgagcattacgagcaagacggtcataaccgcgctatatacgaaaaatcattatcggctcaccagaaatgttttgggcgaaacgaaagacgagagcgtcgaatttgaatccgcgctcgctttgaccgaacccgaaggcgtcgatcccgtgttcgtattcgagggttggtattgggataaaaattacgatacccccgtcgaaacgggcgataaaatgcccgccgataacgcggagattttcgcgaaatacagcgtcgatttttccggcgcggagatttcgaccgagggcgatctcatttacggaaaaggggacgatttcgctcttgtttcggatttgaaaaataccgaagaggaaagcatcgtctatacatttgtgtggaacgacggttccgcccaagaaaaattcacgctccgcaatgcgggcgaatacgaactttccgtaaccgtcaccgcggtgtacggcgagaacgtcttgaccgacacgcaggaattttcgaaaacggtgaccgtggaaaaagcggcgctttccgtcaccgtcggactcggcgccgacagcgtcgtttacggtacggcaagcgcgcctttcgtcacgtacggcgattttcaatacgaggacagccaaacgagtttggatctgcaccctcgttatacttataccgagaaagacggcatccccgttgcgggcaataaactcggcgtcggtacgtattccgtcgtcgcggaatttgcggaacccgataattatgtgcttaacgtcacggcggcgactctgacagttacgcccaaagatctcaccgttacggtgagcgcggaaaatttcgtctacggcgaaatttctgatatcttattgattttagatttgagtttcgacggatttgcgaacggcgacggtgaaacttcgctcggcggcgcggcagaatattcctatacgaaaaacggcaaacctttcacggcggaaggcttgttcggcgcgggcgaatataccgtttcggtgcagggattcacctcggagaattataacatttcctatgcgagagccgcatcctttatcgtttccaaacgcgaagcgagggctgtgcttaccgcaaagggcggcatttacggaacagatcccgaatgtaacgtaaaatttacgggaattttaaaagaggatgaatctctgttcgttcccgaatatacctttacaaaagacggtgaggcttatctgccgaacggtctgttcggcgcgggcaaatacgtagtgaacgcgcgttttgccgcgaacgaaaattatgaactgaacgtcgatgccgcagaatttaccatcgaaaaggcggatttgcagatcggcgtgaaggtcccctcgatcgtatacggagaaaagccgaaccctgaaattacgtacgacggatttatcgagggcgaaaacgaaaacgtgctttcgggcacagccgtgtacgcttacaccaaagacggcgaagtgcatgatttctccgcgcgttttgttgcaggcagttataccgtttccgtgagcgggctgacgtcggaaaattatgccatcgcatttgcagccgcggaaaacttcgaagttgcgaaaaaagatctcacgctcaatgtaagcgtggaaaaaacttctctcgtttacggcgaaaaacccgtggagaaaattacgtacgaaggtttcgtctacggggaaaatatgagcgatatcggcaatccccgcgccgtattcaaaaattccgagggcgttgttgtttcggacaatgttttccatgtcggcaactatatcgcgaccgtcgaggcgcaatccgaaaattatgatatattggtcaataaaacgccgtttaccgttatcaaaaaagaccttaccgcgacggtgagtctcagacagtcttctctgacttacggcgatctgcccgaggcgagcgtcgcttacgaaggctttatttcggagtcggaagaggaggaacagacgaagaacgtcgtattcgcgtatgcgcaaggcgatcagtccttcgacggctcgcaactcgccgtcggcaaatacgtagtttctttggaggggctggaacttcccgattataacgtacacgttgagaccgcggagttgaccgtttcgaaaaagtctttgacgatcgacgtaaaggcggacaaagaaagatatatttacggcgaaacgcccgaactaaaatttgttttcggcaaattcgcatatgacgaagatgaaaaagtcctggtgggtggctctctttccgtatcacgcgacgaatctccgtacgaagacgaaaaattcatcgtcggcaattacacggcaaaagccgtcggatttactgcggaaaattatgacatcgagatgagcggaatcggctttaccgtcgctccgaaagaagtgaccgttacagtgtccgctgaacgcgacgtttatactttcggcgacgaggtaattgtttcgcattccgtttcggcgctcgcgttcgacgaacccgaaagcatactcggcgacatgaccatcgtttataccaaggacggcgcagcctatacgcccgccgctttatttaacgcaggcgaatataccgcgaccattgaaaatcttttcaacgagaattatgatatcaccatagattcggcatcgtttaccgtggaaaaacaggttttcgcggtcgaacgttcggataatcagaagagcgggatcaaatggacgttcgggccgcggtttgcggaaggctcgcctttcgtattcgagggcatcgtgcggctgaaatcgacaaaacagggaacctatatggcgaccgacgaaagcagttttgcgcaacatttcgaatgggaaagcggttcataccaaattttttatcagaataccgacgtcacagccgattttgaaatttcatacaatttaaaagtcacattagtggattcgaactttggcgacggagtcattctcgaaccgtccgaaacaacgaaaacatacgacggcaaagcgcacgaattcgaggtgaccgttcaaggcgtcgccgctgcggtcgagtacagtataaacgatggtgaatttacgactgccgttccctcgttgaccgatgcgggcacgtataagatttcctacaaagtttctgcggaaaattacgttcctgtagacggagatttcgaagtaacgatactaaaggctgaaaatcacatcgattactccgggatcggcgcaacggaatttacctataacgggcaagatcatacggtagatttttctaaggcgaccgcgaccaacggcaccgtcgccgtcagcggcgaaaccgtatttaaagacgcgggcgaatataccgttacgctgtccgtcgcggaaagcgaaaattataaggcggtttccgtcgaagtcacggtaaaagtcgccaaagcagactatgaaatcgtggcggaaaaccaatcgtacgtttacaccggcagcgcgcagggcaaaggcatttccgtaactgcattcggggaagataacttcaccgttttatatggcggcaaccctgccgtgcccgttctgacaaacgtcgagtcggtgacggtgcattataccgttacgggcaatgataattataacgatgcgaacggaacttatgatctttccgttaccaaagcacccaactcgatcgacgtttcttccgttacgggtacggaatggacgtacgacggcgcagaacacgttattgatttgaacgatgtgaaagcggctttcggcgaggtgacttggggcgatcatgctttcataaatgcgggcacgcataccattacgctcactgtcgcgggaacggacaactatgcggacgcgaccgcaacgatagaggtcatcgtccataaagcggaattgacggtcacgccgcaggaaaataactttacctttaacgcgcagaagcagggcaacggcgtgacggtcgaggctttggatgctggttatacgatagaatatacgtatagtgacaagaaatcggataccgtgccgcagtttaccgacgcaggcagttatacggtcggttatcgcgttttcggtgcgaattacattgaaaagagcggctcctataccgtcaccatcgcacccaaagaactgacggtgacaaatccggggaatcagaataaaacttacgacggtgccgaattcggcgagggcataacggttacgggcaacgtagacgatcagttaaccgtcacgtatacagtaaacggaaaacctttcgaggggacgcctgcctttgcggatgcgggtacgtacgagatcacgtataccgtttccggatcaaattataaaagcgtcaatgacgtatatactattactataaccaaggcgcagggcacgatcgatacttccgctgtgcaaacggattatacctataacggcgcggagcaggtcgtagaccttagcggcgtgaaatggacgggggacggcaatcggagcaatacgaagaataaatttaccgacgttcccgatggcggttcgttcgtcataacgttgactttatcggaaggaaagaattatttcggtgaaacgcaagatatcacgatcacggtgcataaagccgattacgaaggtaagacgcaccccgaaatttccgaagtcatgggcgtcggaaaaacgctcgaaagcattacattggacgaatattttacttggaaagagccttcgcgtgaattggttttgggcaacaatcagtacgacgccgtttataacgccgatccgaaaaattacaacgattttgccttgaaaatcacgatcaacgcccgccgcgaaaaagtgaccattgccgtcgatccgcttgaagcggatttcgaggtaaaggctcttcccgaacccacatatcggattttgggcgaggaacgcgttttgagtgaggaagaaatcgcatatttaaatcttaaattcactgttactacaaacgcgaattttgatatcggttccacctattttgtattatacgctttggcatatgatgcggaaaatcaatatttcgagttgaccgaacaagaaaccgaaacgtatttcaaactgaaatcggtcggcgtaggtgatacactctacacgatcgaagatgcgctcgaggcggctacggagggcaccgttatcgtcaagcacgatacggctttcgcctctgcggaaaccctcgctaaatttaccgatttgtactccgctacaaactacgaagtgaaagcaggggttaccttgcttgtgccgtatgatgcgaattatagtacgaatacgaaagatgttgaaaggacttgggttgcagtaggtaaaactgcgtttgtcacgttaacggtttcggagaatacaaatttaacagtatacggaaagcttattgtaaatgctaaaatggttacagcgtccaatcctactacatcaacgcccaaaggtaattatttcggacaaatggaagttaaagatcatgcagtcatcaattttgaaacaggtgcttcgtttgaatgcatgggatttgcttatggaagtggaaatatagtagttaaatcgggcgcgaatatggttgaacctttcaatcttgtaggttataaaggagggactatatctttatctttaagatcaaaagtttttcctataaatcaatattcaatgtccagtattatttgcaatacagaaatacaattcggtgcaaactatattgcacgagcttttgtaacaggaaaacctttcttaacagaaaaagatgtgaatgcagatgtttcttttgtttcaaccacaaataaagcatttatacagttatcgagtggtagtgtttttaaatcgctaaatgaagaaaatggtgaaattacatttgatatccatggggatgccgcattaaataatttaacattaagccttgatggtttattaagcatggatacttcaaagctacaagttcctgtccccggtaatttcaatataattatctcctctggaacaacgacaatatcacaaggcgtgcaaattaaaatgctaccaggcatggatttgactgtagaaaaagaagcaaaattagttattgcaggaaaaggtgagaattcggctggcggtttatctgcatatggcaatgacaattatacgtttgccgataataaggtaatgcaatggcaagatggggaattgggcaacgtaaaagattatccatgtttaaatatgccgaatgtttatagaacaaaacctgtgtttgcatacaacgcaactactcctgcaagagttattattaaaggcgaattaatcgtttgcgaaaatgcttattttgctgtagcactttcagcggaaaaagatgcaaaaatcagcatagggactacctctgtattgacttattcaattcaagaagattatagtaaatctggtgcaattgattattttacaacaaatttcattttgaatggcaatttcaacggcgaatattcggcatcgttcgaagtcggcaaaacctacacctacaccgaaagcggctgggtagtcgctgtataaggcagtaaaacgaataatttacaaaaataggaaagaggaagaatatggaacaaaaaaacaactcgcccgcggtcgtgcaaattcagggcttgtataaaaagtactcgaaaaaagcggattatgcgatcgaaaacgtgacgttttcttgtcacgagggagagatcgtggggcttttgggccacaacggcgcagggaagtctaccacgctgaaatgtctggaggggatgctgccttttgaaaaaggcagcatctcgatctcgggttacgatatcaaaaaggaacccgtgaaagccaaaatgaacatgggatttgtcaccgataatcacgccgtgttcgtgaaaatgactggcattcaatacgtttcgtttatggcggacgtctacaaagtgtccacgaaacttcgcaaagagcgcctcgatgcgctcgaacaggtttttcagttgggggacgcgatcaacaacctcgtgtcctcttattcgcacggaatgcgccagaagatctgcatgatggcttcgctcattcacgcgcccaaactgtggatattggacgaaccgatgacgggactggatccccgcactatgcgcgccgtgcaggattttatgcgcggctacgccaaggcgggcaactgcattatcttttcttcgcacgcgctcaacacggtcgcaaaactttgcgaccgcgtcgtgctgatcagaaagggcaaacaaatttccgatatcaacgtaaaagaaatcatcgcgcgcgatccttattttgatttcgaggagtactttttacaaaatgaaagacaaaattgacgtttcgctcctcaaagcactccttcgcaagcagcggcaagaacgcgcctcctcgttcaaaaagggcaatttcgacgcggtcggctttacgctgcgcattttgctgaccgccgcttttttagtgatatttgcaatatttttcggaaaattttccgatatttatctttcgatcaagacggacggcgtttacaatcccaccgcgcggctctacgaacttttgagcatcgcgtataccgcgattctgatttttatggtcatcggcggcgtttcgcagatcaaccgcgcgctgtttgacgcggacgatatgaaattattttccgccatgcccgtcggcgcaaagacgctgtatgtttccaaacttttgaccatttatgcgggacagatattattcgcgcttttgacgattttgcccgtcaacatcacgatcgcggtgcattctccgcagcccgcctggtattatctgatgactgccgctgcctgcgtgctcctgccgctcatttccattgcggtcgcctcgcttctggcgctgccgtacaatgcggtcaaacagtttttgaaacctcgctttcttttgaattttatcatcgtcacggcgatcaccgcggcgttgttctacctgtacgccatgctgctcggcgcagtgaaagaaatgctgctcggcgacgagttgaaatatttcttcaatgaacgggtgatggatttcctgcaatcgtttgcgaacgttctctatccgggcaaatggctcgccaatttcatgctcaaacgcgagcgtttattcagcgggctgggcattttgatcatgctcatcgtctgcctgatcctgtcgatgaccatgatccgcgccatcctgacccgcgcgttgcagtcgcgcattgcgggcggagaaaactttatttatcccaaacgtaaactgacgcaacgcagaacgaccttttccgcgctcgtgaaaaaggagtttttgcagatcttccgcacgccgtcctatatgttttcttatttttcggtggcggtgatcatgccgatgatggtatatttctgtatgtcggtaggggcttcgctcgtcgtcaaactgatcggcgtaaactgcaacgtggaactggcaatatttttgacgctcttgttcggttcgctcaccaacgtattctgtaccacaaatatcagccgcgacggcgccatgttttattccgtgaaagccatgcccgtcagttataaatccgtattcttttccaaagtttttctgtgtatggtcgtgactgcgttctcgcaggcgatctcggcgcttttgctgtttgcaacgggatacttaagtctatggatcgccttgtttttattcgccgcgggaatgctgtgcagtttcgcgcagatctgctttgccacgcgttcggatttcaaccatgccaaattttccacggaagaagacggcgagatcaaggaatcgggcaataccgtcagtacgatcatcgtgctcggcatgctcgcctcgttcctgatcggcggcgcagtgctgctcattcgtatgctcttcaccctgcgcggttggaacggcgaatatatcacttatttgatcgtcggcgtcgtgtctttgtgcgcggcggcgctcgcttactattatctcgtccgcaaactcggtaaaaaatattacgagttcagcggcggaggcctgctatgagaaaaaatgtcattgcattgatgcttgtcttgccgttgctcttcatattcgtcgtgttttcttcgggcaacgtggcgagtctgggcgtgtccgtttcggcgagcggcatcgaaattctggaaaaacccgaacacgatactcttcgcctggatcttgcgagttataataacgatactcgcctgagcgcggaagtgcgccccgccaacgcgagcaacaaagaatattctttccgcgtggaagaagtggaaggcagcgaatttgccgacgtttccgtgaaagaagacggaacgctgatcgccaagagcgctggttcggcgcgcgtcgtggccgtaagcaaagacggcggttacaccgattctctgacggtgatcgtcggttcttcgaaaccttacgattttgattttactctcttttctttcggcgatgccgaccgcgaaaatattctgacgtcgtcggaaagcggctatactgcgcaagcgttttcgggacggttcggatttcagacgacgatcgtgccgagcgggtttgcgggggcgaagatacaagtgctgagcggctttgccgagatcgacgaaggagcggcgacgatccttttgcctttcagcggcagaacggtgctgtcggtgaccgtagagggagggctcggcggcgatctccgcaagacggtgacgctcgacgtttccaagaccgccaccgtatcgggctttaccgtcaacggcggcacggggcaagtgttatcgcttgaaaaagaaagcgaacagacgagtttctatgtagaatcggacagcgaacctacggtcgcggaaaacgcgaacgtcgcggaaagcgaggtgacgatgctttccgcagggcgttaccgcgtcgacgtgcggtttgccgaaatgcacgacagcgagtttaccgtttcggtgagcgcgggcggaaaaatcgaagaagtggggatttcgttcgaagacttcgcgttctctctccgttcggagttgcccgtgcagagcggcaacggcgcgaccgtacttttggatacgcccgtcgccttttacgcggtgccgtcggtcatcgtcaacggcataacctaccgttggtcggtcacgaatacggcggatgcggcgcagatagaactttcgcagaacgatagcggcagcgtctgtacgctgactgcgcgcgtgggcactgcgttcacgttgcaggcgcaggcttaccgcaacaataagccgatggatatttatcccgcggaactggagatcgaagcggtgcgttccgtcacggcggtgcagtttaccgataagagcagcgttgggctggcggggcgcacgacgatcgcgggcgagcgctatgacggtacgggcgataaaaccgtttccaatatttatgaactcaaagtattggcttataacgtggacgaggccgtggacggactgtccgatctggattttacagtttccgacgagagggtggcgaaactgtccgtgacggacgaccgcgtgacgctgagccccgtcggcacgggagaagtgaccgtgaccgcctcgtggcagggcaacgattcgttcggcaaaaacgtgcgcgcgaccgtcacgtttaacgtggcgcaccgcgccgtgcaggtgcagacgagcgcgcagttgtttaaggaaacaaaggcgggaaaagccgtggttttgggcggaaatatcaaactcggtacgaacgccgcgggcgaagtcctgccactttccgaacgcgaatccatgctcgggaaaatgaaatcaacctacaatatcgaattctataagaatacgaacgccgaggagaacgcgtacgtcaaatacgttcttgaattcaaaaacgacgtgtacggcaacggatactccatcgatgccgaatactttaccaacgccagggacggcacgggacagccgctgctgttccgaggccccttgtatttcgtcagttacgggcaggtcgcttccgtcgcggggcaggacaacgccgcgttccttatccgtacggacggcgtcacgctgtacaacgtgaccttgctcgggtgcagcgacgaatctttgcagacggagggcggcggttacgacctttccaatctgaacaacgtgggtacgacgttggagatcaatgcagacgcgcagattttgaactgccgcatccgcaacgggcgcaacgttgtgcgcgcatacggcggcaaccgcgacggaagcaagtatttcatcgacagcctttccgaaaacaagggcgcggagaatgagcgcatcgacgtgcgtatcgaaggctgcgtcatttcgcagggacgggaatttttgttgaagatcggcgcgaaccgcgctttgcgcgcgagcaaagcgctctcttccgacgttgcggcgtgcatcgaacccaaccttctcgacgaaaacgggaacgcgtaccgcgcgcagagcaaccaatatctgaacgacgaatatttttacaaaacgtacgtcatgaccgacgtcgtcttaaaggacagcgtgctggaaacgagcggactttttaccgtcggagtggaaagtaacttctcgggcaccgtgctgtataaagattcggcggatcagggcttgaatttcgagggctggtcgggttcgggcggcacgtcgttcgcgtccgtgctccgtctggaaggcgacgtgcgtctgtacgactggaaggatctgagccttgtggacagcagtacgctcatcgacacagaaatgtccgatctgaaactcaatatcggcgcaatgctcgattttgtctgcagcaaagatcccgcgcgctacggaaatctgatccagatcgtggacggcaaacagtacgtgcacggcggcatcgcttattacggcggcggcaaaaattacgcgcaactttctttggcgtcgcagatcgcctctctgtccgattattcctgttattacgtgaatatcgacgtgttgaaggacgcggagggcgacgtgggtcatcagggacagatcttaccgctcgcggcgggcacgcaggatttccgtttttatatgtacggatccgacagcgcgaacaattatcaaaaacagcagtccgacacggccgcgggcataaagtatgcgggcgtaaaggcagttccgttgttttaaattcggtttattacaggcgtccgcttatgcgggcgcctgtaaatattcatgattccatgaaaatgttgcataataattcaaattcaaaaccaaaacagttgcatttatgcgcgtatcgtgataaaatgaaaccgtatcataaaactgttttttatgctgaaaaacagcgcggaaatttttccgcgccgtaaatttataccagaggagttcaaaaatgaagaaagtagttttggctgtcatcgccgcgttattggcgtcggtactctgtttcgcgatcgtcggttgcgcatcgccggaaaatgtaaaagtgatcgacgtaaaactgacggacgaaagttatgcttatgctgtgaaagagggtaacaaagaacttttggacaaagtcaacgagtttatgggcaagctcaagagcagtgaaggaatcgacggcgtcacgctggattccatcgtcgaaaaggaaggaaacggaaaattgggcgatatcggctctgtgcagaccgtgtccaaagacaggagcaaagaattggtcgtttcgaccaatgcggaatttgcgcctttcgaatatatggacggttctaaattggcgggtatcgatatgcatgtcgcaaaaatgatggcggaatacatgggcaaaacgcttgtcgttttgaatatgaatttcgatgcttccattcttgccgcagcggatggcagttcagatatttgcatggctggcttgactatctccgaagaaagagataaaacgttggatttcagcgttgaatattaccaggccacgcagaagatcgcggtgaaagaatccgacacgacttttgataactgcaagaccgtcgaagatgtggaaaagattttgaaagaattgacaggcaaaaaggcgggcgcagctacagcgcagacgggatatttatatttggtcggagacgaagggttcggctttaccggattcaagaatatagatgcgaaatcttacgattccataggcttggcagtcaaagatctgtcaaacggaaagattgatttcgttgtcgccgacggtactacgctcggattggtcgtaaagggtattaacggttaatctgtatgtcgtttgggaaaatgtggaacatcttcgttgacgaattgattaacggagcatatgtcaatatcttgatcgggctgagaaatactctgatcatcgccattttgggccttttcatcgggatcattatcggaacgctgattgccgctattaaagttgcggagaatcggaatacgatcgctaaagtttttgcgcgtatcggcgatatctatactgcgttattccgcggtacgccgatcgtcgtacagttgcttgttttccattatatcgtttttcccgttttaggcatcaatctgaacgcggtgatagaggctgttcttgtgttcggaatgaacagcagcgcctacgttgcggagatcatgcgcggcggcatattgtctgtggataacgggcaatacgaggcaggaaggacgctcggtatgggatatacgtctacgatggtgcgcatagtttttccgcaggctataaaaaatgttttgcctacgctcggcaatgaattgattatgcttttgaaagatacttctgttgcgagctttatcaccgtagtcgatcttacaaaggcgtttacgcttattcccggtaaaacatacgaatatatggttccttatttgatgctcgctgtatgttatctgattcttgttttacttgctacggttttgatccgttttgtggaaaggaggttgcgtaagagtgaaagaaaacgctgacaacgtttctgcggaaaaaaagcatatgatcgacgttgtgcacctttccaaacatttcggcgatttagtcgttctggacgatatttccgatacggtgtacgaaggggaaaaggtctgcatcatcgggccttcgggcagcggcaagagcacttatctccgctgtctgaacgttctcgaagaccctacgtcgggcaaagtcatctttgacggcgaagatttgtgcgatttgaaagtcgacatcaatctgcaccgccagaaaatgggcatggtgttccagcagtttaatctgttcaacaacatgaccgtgaaaaagaacatcacgatggcgcccgtgcatatcggcaaaaagaagatacggaccgtcaaaagaaaaaatttctttacgaggatcgccaatgtattccgcagggagaaaaagccgctcctcgatttgccgtatacggtgagcgagatgaaagcaaacgccgaggcgaccgccatgcgcctgttggagcgcatcggtctttcggataaggcggacgtatatccctccacgctttcgggcggacagcggcagcgcatcgccattgtgcgcgcgctcgccatgaacccaaaagtcatgcttttcgacgagccgacgagcgcgctcgatccggaaatggtgggcgaagtgctcgaagtcatcaaggaacttgccgacgagggcatgaccatggtcatcgtcacgcacgagatgggttttgcgcgcgaggtcgccacccgcgttctctttatggacgggggcaagattgttgaacagggccctcccgcggagattttcgggaatccgcagaatcaacgcttaaaggattttctctccaaagtactttaaattcaacccgcatttctgatagaatgcgggtttttttcgcgaaaggttgacgcggggcgcgttccgtgatacaataatgcgtatggaaaacaacgaacaatattttaacgaatatatgcgggtgttgtccgcaaaatatcccacgtttcagtcggcggcggcggagatcatcaacctcgacgcgatcctgcgcctaccgaagggcaccgagcactttctgagcgacgtgcacggcgagtacgaggcgttctgccatatcatgaacaactgctcgggcgttatccgggaaaagatagaggcgctttacggaaaggtgatgaccaagagcgagcgcgacgagttcgcgaccctcatctattatcccgcggcgatcatcgctgagatgaaagccaagggcgttgcagaactcaaagaatggtacgcggtgcaacttcacaggcttttggaagtgtgcaagacggtcgcctccaaatatacgcgaagcaaggtgcgaaaatccttgccccgcaatttcgattatatcatcgacgaactcatcaatatggaccgcaccgactttaacaaagaggcgtattacaacgaaattttcgcctccattatcgaactgaaccgcgcagaggattttatcgtcgcaatcacggacgtcataaagaggctggcggtggacgcgctgcacatcgtgggcgacctgtttgaccgcggcgaaaatcccgataagatcatggatcttctcatgcagcatcacaatgccgatctgcaatggggcaatcacgatatatcctggatgggcgcgcatatgggcaacgaggcatgtattctcaccgttgtggatatttccctcaaatactgcaatatcgacgttctggaagaatgctacggcatatccctccgaaaacttgcggtgtatgccgaaaactgtatggacgaggacgcgcgcttttatcccgtggaaaccgacggtctggacggcgacggggaccgcgcgacgatcgcgaaaatgcgcaaggcagtctttttcatgctcatgaaagcggaagggcagatcatcggtcgccgccccgaatacgatatggacgaccgccaggttttgacgcacatcgattaccgaaagggcaccgtcgttttagacggggatgaggtcagactcaaccgctgcgactttatcacggtagaccctgccgcgcctcttacgtacactgcggcggaacgggaagtgctcgacgggctcaaacgcgccttttcgcatagcgaaaaactgacgcgccacgttgcgttcatgttcgaaaagggcgcgtcctttaagattttcaacgacaacctgatttttcacggctgtatcccgctcaatgccgacggcagttacatggaattcgagggacgcaggggcaaggaactgatgatttatgccgacaacacagtccgcgcggcgtacaacgcctttttaaagggcgaaacggacgaaaaagcgctggactttgcctggtatctctggtgcggaaagcgctctcctcttttcggccgcgaaaaactgaccaccttcgagcgcgtttacatagacgacgaaaaataccataaggaaaagagcaacgcctattaccgctactgcaacgacaaggcgttctgcgaaaaaatactgcgcgatttcggcattgacggaaaatacagccatatcgtcaacgggcacgtccccgtcaagaaaaaagacggggagagccctgtcaaggcggaggggaaactgatcgtcatcgacggcggtttctgcaaggcgtaccacgaaaagacgggcatcgcaggctatacgctcatctacaattcgcacggtctgaaactgtgcgcgcacgaacctttcgactccgtggaaaaggcgatcgaaacgcgtagcgacattcattccgaagtgaccgtattcgaaacgcgcgaaaaccgactccttgtacgcgacaccgacatcgggcgtgggatctcctgccagatcgacggtttgcaggcgctgttggaatatttccggaatcatcgtcccaccgattgctgatatttcgccccgaaccgctgaaagcggctcggggatttttttataaaattttttgtaaaaacttcgtcgatttactttactaatttagcgcgttaaagtataatggataagaaatttataatgtaacaaggagtttgcacatgaaaaaatttttcactctgctgctcgcgctcgtaatgacggctgcgatcggcgtaaccatgtcgggctgcagcaaagaactgatcggattcgatatcgaactcgcaaaagcggtcgcggataaactgggcgtgggtgtcagtttcgtggagatcaactgggacaccaaagaggcggaattggataaccgcagcattgacgcggcgtggaacggctttacctacacgaaagcgcgcgacgaaggatacttcgacgaggacagaaaccagcagatcggcggtttggattttacgggaatgtatatggaaaataagcaggtagccgttgtcaaaaaggagaacgccgaaaagttcggcacgctggaaggtttgaagagcgctaaatccatggtcgcagaggccggctccgcagggtttacgacaattcaggacgtgttcgaaaaggagcctgttcccgcgaaaaaacagttggatatattcaccgaagtatcttcgggtgcgagcgacgtcggcgtgatcgatgcggtgatggcagggtactatatcacctctgaaacgggcgcctatcacgaatctctgtcggtcgtggagatcgagggcgtcgaaaaagaattctatgcggtcggttgccgcgaaaaaagcaatcttcccgccgtattcaaccacgtcctcgcgggattatgggcagacgggaccattcgtaagatcggcgaaaaatacggtttgcaggacgtgctcgtcaacggattcggcgaatacgacgaaaactaccaattccctacggacggcgattatgcggccgtattgaaagcgaaaaaattcgttgtcggctatacggtattcgcgcccatggcgtataaaggctgatcggtccggagttcagaatgtttatcgaaattatcggcgaactggcgttggggttccttaccactttggaattgtttgccctgacgctcgttttcgctctgccgctcgggctgttggtcgcattctgcaccatgtccagattttacccgctacgtatgctcttcaaactgatagtctgggtagtccgcggaacgcccctcatgttgcaacttctgatcatcttttacggcccggggcttttggggttgcccgcgttcagcaaccgttttttggcggctgtcatcgcgttcgtcatcaattacgcgtgttatttttccgagatataccgcggcgggatccagagcatttccaaagggcagtacgaggcggggcaggtcttgggaatgacgcgttcgcagatctttatgcgcgtcgtgttgctgcaagtgatccgccgcgtgctcgcgccgatgagcaacgaagtcatgacgctcgtcaaagacacgtcgctcgcgaatactatttcggttatcgagatcatccgcgtcgcaacgacgatctcctcgacctacgcggtcaacatcatctttccgatcttatatgcgggcgtattttaccttgcgtttatcggcatcctgacgctgctgttcgggtggctggaaaagaaactcaattatttcagggtgtagcgtatggcgtttttggaaattaaaaattatcggaaaaatttcggcgagaacgaggtgctcaaaggcatttctttcgggctggaaaagggacaggtgctcgcggtcatcggctcttcgggcggcggcaagaccacgcttttgcgctgtctgaattttttggagatacccgacgcgggcgaattgtatttaaacggtgaaaaactgttcgacgctgccgaactcggtaaaaaagcggtgaaggatatccgcaaaaagcgcctgcatttcgggctggtgttccagtcgtttaatctgtttccgcagtacaccgtatttcagaatatcacgctggcgcaaaaccttttggacaaagaaaatttcaaaaatcagaagaaagaattgcgcgcgtctttaaaagagtgcggtcccgacgagcgtaaagaaaaaaaagaagaacaaaagcgcgtattgcaggagatccgctccacgcaaaaagcgcgtgccgaggaaaaggcgaattcccttttggacagggtagggctgaccgaaaaacgcaacgcctacccgtacgaactttcgggcgggcagcagcagcgcgtggcgatcgcccgtgcgctcgcgctcaatcccgatatcctctgttttgacgagccgacgagcgcgctcgatcccgaacttacgggcgaggtgctgaaagtgatcaaggggctgaaatcttcggacagcaccatgatcgtggtcacgcatgaaatggaattcgcgcgcaacgtggcggatctggtcatctttatggcggacggcgtcatcgaggagatgggcacgcccgcggaagtattcgatttcccgaagagcgacaagacgcgcgcgttcctgcaaaaatcattggagcagacgctatgaacgaaaacggggatatgacgaaaattctctgccgcacgctcctgaactgcaagacggaagaggactgcctcgcgcttctttccgatttatgcacctttcaggaacaggagcagatggcgcagcgcgtcgcggcggctaaattattgctggaagggaaaacgtatgctgaaattatggacagcacggaaatatcttccgctacgctttcccgcgtttcccgcgcggtgcaccacggcagcggcggctatgcgcggctgattccgcgcgacggacgataaggcggcggctatgatcgattttgaggcgcttaaacgctttatagaggcgaaaagaacgccgccccgcaaagtactgcgggcggcgttcaaaatcgatgcagaatgcgaaccgcgcgctttgtgcggcgcggcggaaacggacgaaaacgccctgcgcgaaaggatcggaaagcggggcaagacgttttcggaaatgctcttttactggatcgacgcgcgcggcgaaaaggacagcgacgtgtacaagcgtgcgggcgtcgatcggaaattgttttccaagatccgttcggacgcgaattacacgcccaaaaagcgcacggcgatcctgtttgcctttgcgctgtcgctcaacgaagaccaggcgcgcgatcttctcgcgcgggcgggttattctttgtccgatgcggatacgacggatatcatcgtacaatattttttgcagacggataaccacgacctttcggaactggacgaggcgttggtgcgtttcggagaacaacctgtatattcggaataaaaaagagaggggaccccgaccggggttccctctctaagcgtataggggcagcgattgctctgtaaactcctgtatgcggcggaacatgagttcgtgtcccatttcgttgggatggatcccgtcctcgctgatatagtcgggcatattgtttttcaaaagaaaatccgtgcggaaatcgataaagggacagcggttcaagagagccgcgcgcaaaattaaattgttgtagcattcctgatgacgggaaatgttggtcacgtcgcccgtgaaaaagtgcagcacggcgtctttatccgcacgagcggcgatgatattttgaaaatatcggtcggaatacacgggcggcagcgccgcgagataggtgtgtatcccgccttttttcagtttttgtacgttttcgttcaaaagggagaaaaactccgaaggcggcgtgttcggttcgtgctgcgcgtcgggatgttcgcctacttccttccagttatagtcgcagtcgttgccgccgagtgcgatgaccagaactttgttgggtttgtgcgcgttgttttccagatacgtatcgaaaaatcctttttgcaccgtctttttcagcgtctgtccgaacagcgaaaagttttcgatggaaaccccgtaatgttcctgcatcagttttacggtgttgcgctcgattcgcatgatcttattatcctttaaaaataatcccttggcgatggaatctcccatcacggtgatgtcgaaatcattgagcatagtcatagtcgtcctccttttccattatgcctgtttttgcggcgtcttaaacgatctataatattattttagtgcaatttttcgcaaaagtacacctaccgtgccgaatttgcgttatactcttatttatgaggcggtagagtcgacgtttttcgcctctaccgaaagtagagtgttgcaataatcacacaatgtagtctgtttgaaaacgggagaaaggaggttatccgcgaaaatatttgtatataaatacaaaatagccgaaaaatactttttacaagcggcgcggaatatggtataatagggatatggacgatctcaaaacgattatcgcgcggaacctggcggattgccgcaaggcggcgaatctgacgcagttgcaactcgcggaaaaattgaattattcggataaggcagtttcgaagtgggagcgcggtgagagcgtccccgacattaccgtgctgtgcgaactcgcgaaattgtacggcgtcacgctggactatctcgtgaccgaccgcggcggcaaaccgcccaaaacgcgaaaacaggtcacgcgggaagtacgcaaacgcattttgatcaccctcatatgctgcgggcttgtctggcttttggcgactttcgtcttttccatgctcttgatgtgcggcgtcgaaaattaccgcgtgtggctggtgtttgtgtacgccatgcccgcgtcgggcgttattctgatcgttttcagttctctgtgggcgaacaaatactgcacggcggcgtccgtttcctttctcgtatggacgctggcgctttccatctatctgtccgttcccatggtgcagaacatctggctcgtattcgtcatcgcggtgccgttgcaacttttaacgatcttctggtttatcctgcgcggtcaaaagaacaaataaagtcaccccgctcttcttaacccgcatacaatggtatgtacgtcgggagggaagtatgcagagaaatatcgctttggtcaatttggacaacgtcgtccgcaacgcggaaaatatccgctcggtcatcggttcggcaaaactatgcgcggtcgtcaagtgcgacggctacggccacggcgccgccgcaatcgcgaacgccctgcacggggtatgcgactcgtttgcagtggcgctcgtcgacgagggcgcgcagatccgcgcggcgggggtggacgaggatatcctcgtattgcagcccgcgcttgacgaaacggaagttctgcgcgctgccgcttacaacatgatcctcacgctcgcggacgacaacgactttttgctcgtgaaaaagacgtgcgaaaaattcggagtacgcgtgcgcgtgcacctgaaagccaatacgggcatgaaccgcctgggctatgaatactggcagttcctcaattcctgtctgctcgtgaaaaagcaaacggatatttcggtggaaggagtgtattcgcacttttatcttcccgaaagcagatcggaaacgcgcgcgcagtacgagttgttcctgcgcttttgcagcgtggcggaaggggtgttcggaaaacttaccaaacacattgcggcgagcggcggcgtatttgccgacgccgcctatcatatggacatggtgcgctgcggcatcgcattatacggctatctgccgcgcggcatcagatcggataagcgttttttgccggcgctctgcgtatacacgcatgcggcggcgggcagaaaatacgaattcggcggcatcgcctacggccgtgcgaacggcaggtcgggcgatctgacgacgctccgcatcggctacggggacgggtttttccgtgcgggcgggatcgggaatatcaacaatctgtgtatggacgcatgcgtggtgtcgggcgcgcacgctaagggcgagcccgtgctcgttttcgccgacgcggacgaatacgcgcggcggcataacaccatttcgtacgaggctctgtgctctgtcacaaagcgcgccgaattcgtgtacgtgcgcggcttggagcagaaaaataaggaatgacgatgcaaaagcaacaacttcgcgcccgcatgaaagcgctgcgcgcagcctgcgaagatcggcgggcgcgggataacggcatattcgaaaatctgttttcccaaccctttatgaatgcggaaacgtttttcgtctacgtttctttcgggagcgaggcggatacgcggcgcatcatagaggaacttttcaaacgaggcaaaacagtctttttaccccgcgtggcggggcaacggatgcagtgcgtccgctacgtcggacaagcgctcgaaaagggcgcgttcggcattatggaaccgcaaggggacgccgaagaaattgtgcccgacgtatgcctgacgccgcttctggcggctgacaggcgctgtgcgcggctgggctacggcgggggatactacgacaggttttttatggacaagcagttgtgcaaagtcgggctcgcctattcttttcagatcgtaaacgaagtgcctgcggagccgacggacgtttttttggacgccgtcgcgaccgagcgggaagtattatatcggaggtaaatcgcaaatgttgcaatgggcatgggaatataccaaacgcgtgggcacgctgctcattatgaattttctgttcgggatcacgatgttcctcgtattcgcgctcgataacgtggcggcgcgcgttgcgatcgtctttgtcatgctggcggcgatgttcgcgctggactttttcctcatgcgttccgcgggagaacaggatttcaagatgagcgtcattggcgaggcgaagcgcaggaataagccgagcggcgcgcccgaagggcattccacctatcatatcagcaaggaataccgcgtatataagggctttctgatcgggctgatcaccatggcgctcgctatcgttctgatcgtcgccgcgcagatgaccggctcgaacggcgtgaagatcgcgctgttcatcgtttacggctggctgtattttcccgtcgtcgccatcagtctggaagccaatctgtttttctgtctgatcgtgttcgccgttgcgctgacgctgttcggcgtttcctatatcatcggcggcgaaaaggggcgcttgcaacactatatcctgttgaaaaaaaccaatgctatttccgaaatggagaagaaaaattgaggatcatcggaggaaaattccgcggcagagtgcttacgggttttaaaggaaacgatatccgcccgaccgcggacagggtaaaggaatctctattcaatattctcgcgcccgaaattcacggcgcaaatctgttggatctattctgcgggtgcggcaacgtggggctggaagctatctcgcgcggcgccgattacgtggtgttcaacgacgtttccaaagacagcctcgccgtgctcagaaagaatctgtctcttttaaagacggacgcgaaaatttacaactgcgatttcagatcgctgctcggatctttggatatgactttcgacgtcatttatatcgacccgccgtataaaagcggtttcggcgcggaggcgctttcgattatcggcgaacggagattgctgacgacgggcggcgtcgccgtattcgagagcgataaaccattcgaaggggagatcgcgtcgctcgtgaaatacgacgagcgcaagtacggcagtacctatctcacgttttttacccccgattgaggagttattatgaaaaaatgcgtctttgcgggcacgtttgacccgcctaccatcgggcaccaggatatcgttctgaaatgtttggaaattttcgacgaagtcgtggtcgctttgatgatcaatcccaacaaacagccgcttttcaaaaccgaagacaggcttatgctgctcgaaaaggttttttcgggacacccgaacgtcaaagtcgtcgcgtacgacggacttttggtggatcttctgcgcaaagagaataccaaattttacgtgcgcggcattcggaacggtacagattacgattacgaaaaccaactcaattacatcaactgcgatatgtacaagcagatgatcaccatttttctgcctacgcggcagaatctcgtgcatatcagttccagtcttgtaaaagacgcgctcaggtttcataaaaacgtagacgattacgtccccgccgagatccgcggggacattcggaaattactagatacagaggtcagataaatgttcagaagagaagaaaggattcccgaagcggaagagatcattgccgaaacgccgctgcccgaaaatttacggaaaataaagcgcgggcgcgacgaactcgcaggcgaagttatccgcggcgatacggacaagttgttgctcatcataggtccctgttcggcgcacgagagcagacccgttttggactacgtggaaaaactcggaaaactcaacgagcgcgtcaaggataaaatcgtcatcgtgccgcgcatctacaccaataaaccgcgcaccaagggcgtgggttacaagggtatgttcactcagcccgaccccaatggtaaagaagatattttaaaggggatcaagacgcttcgtcaactgcatatcgacgccatcggcatcagcgggctttcggcggcggacgaaatgctctatcccgaaaactacgcctatgtggaggacttgctgacctacatcgcggtgggcgcacgttcaagtgagaaccagatgcaccgcctggtttccagcggcatcgaacttcccgtagggatcaaaaatcccatgagcggcagcattcccgtgctgctcaactccatttacgccgcacagagcgagcagatcttcaaatatcagaactatcaggtcaaaacgacgggcaacgaattggcgcatgcggtactgcgcggtgcggtggacaattacggcaacgatattcccaattttcactatgaattcgtgatgaaagtcatcgagggctattcaaagagcgggctgaaacaccccgccatcgtgatcgacgcgaatcattccaattcgggcaaaaagcacagacagcagatccgtatcgtcgaggaggttttaaacaaccgcctgtacgacaaggatttcaaaaagtacgtcaagggcttcatgatcgaaagttttctggaagagggctgtcagagagaggatatcgtctacggaaaatccatcaccgatccctgcctggggtgggaagataccgagcggctcgtgctcgatatcgcggacaaggtataaaagatgaagaccgcatatctcggccccgaggggagttattcgtcgcttgccgcccgcaaattgtgcccgacggcagagtatctgccccgcaaaagtttttatgcggcggtttcctgcgtgctcgcgtgcgaggcggactgcgccgttctgcccgtggaaaacacgttgcagggcgccgtggcgcaaaacctcgatctcttatatgccagcgccgaattattcgccgtaaaggaatacctgttgcagatcgaccatcgcctgatattccgccgcggcgtaaatctttcccgtatcgagcgggtattttctcacgaacaggccatactgcaatgcgggaaattcctttccgaaaatctgccgcaggcgaagatcgtctataccgactcgacggcggagagtttgtccgtcatgcaaaaggaaacggacgcggggatcgtgggcgcgcatatggcgcgcgaaggctacgaactttctgcggaaaacattgccgacgaaaagaaaaattttacgcatttcctgctcgtaaaaaggggagaggaacatctccccgtgcattccggacgcgtatactttgcggcgtcctgcccgcacgaaccgggcgcgcttttaaagatgctgcaaattctcgcggtgtacgatctcaatatgacgaagatcgaatcccgccccaaaaaagattcgccgggcgaatataacttttttatcgaattcgagggcgatatcgcggcaaacggcgtccgcgcggcgctcagccgcctgcaggagtataccaaaaatttcaaacttttaggttgttactgaaacagaaaacaaaacagcaggcacagcgcaaaggcggtaaacgcctgtatgattttaacgggcagaaaatatttaagtttgacgcccgcttttttgaaataacagatctgctgggcgagaatggatacgccgccgaatgtaatgacgaatgcggcgagggaaacggacagcattcccggattttgcgccagcagtttgcagccgtgcgtcgcctcgatgagcccctgcgtaaaggcggcggcgagttgtccgctcttgtcgaagggcgataaaacgagcgagaacagcgattctgcgggtaagagcagataaaagtccgaaaggatctgcgccagaatatagaatacggcgatgaacgcgcccaccacgaggatggaagtcaccgcgccgtacacgctctcgtacaaaatattgtcggctgcaacgagccttctttgaggcggttgggcggcgggttgcttttttgtgaaagcggaaaacaccaggcacacgagcacgaccgcgaaaatatgcgaacagaaaaggatcagtccgatcttttgactgtggaacatggcggcgccgacgctcgcaatgacgaacagcggtcccgaagtggaacacagcgggctcatcctcgtcgcctgcgcgtcggtgatcaagccgttttcgcgaaggtccgcaagcatgcggctgcccacgggatagcccgacagcgcgctcatcgcaaagcagtaggaggcgatgcccggcatcttgaacgccttttcgcacagcggcgacaggacgcgcgaggcgcgctcggcgacgcccagtttcgtgagcagcgccgtcagaacgaaaaaagggaacagcgaggggagcacgaaatacagccacaactccaatccgctcagacagcatttcgcataccgttcgggaaacattgccaaaagtacgatgatggcaagtatggccgccgaaagggaggcgtacaaaatttttttcgatttggtcatacagtaatttatgttacgggagtatacaattatgagtaaaacattgggtcttgcgctcggcgcgggaggtacgcgcggcatcgcgcacgtggggtttttgaaggctctcgaagaggcggatatccgccccgactatatcgcgggttcttctatgggaagcgtggtcggagcctgctattccaagggcatgacctgcgacgaaatgcgcgacatcgcatttgagttgaagacgacggatatcctggacgtaagcctcattgctctggcgaaactgggactgttaaaatccgtccgcgtcaggaaacttatatcgggctttttggaggattgtaccttcgaacagttgcatattcctttttgctgcgtggcggtggatttaaagacggcggaactgaaatgtttttccgaaggcagcgtcgtggacgcggttctcgcgtccagcgccatgcctacggtcttccgtcctgtggagatcgacggtatgcttctcgtcgacggcggcgttttgtgccgcgttcccgtcagagaagtcaaaaagatgggcgccgacgtggtcgtcgccgtggacgttctggggaaagttgaaaaactcgacaaggtgccgaacgtgctttcgctcgtgacgcgcgtttacgatatcatggactgcaagcgcacgcagacggtgcataccaagcacagccgcaagatcgatctgtggctggaacccgaaatggaagacgtgagccagtacaaagtgaaaaatatcgaagccgcctacgaggcaggctatcggatcggcaaagaaaacgccgaaaagatcaaagaattgatctcagagtaataaaattatggatttattcgatctcaataacaacgaatacgaggcgaaaccgctcgctgaaaaaatgcgtgccagcaatctggacgattttatcgggcaaaaacacatcgtttcacccaacagcctgctgcgccgcgctatttctatggaccggcttggcagttgtattttctggggaccgcccggctgcggcaaaacgacgctcgcgcacatcatcgcttcgacgaccaacggtaatttcgtcaaattgaacgccgtgcagagcggcgtcgcggacgtgaaaaaggcagtggaagaggcgcgcaacagtttgaaaatgtacggaaagaagacttatcttcttctcgacgagtgccatcgtttcaataagacgcaatccgattccctccttccttccatcgagcagggaacgatcatatttatcggttccactacggaaaatccctacgcctcgatgacgcccgccatcgtttcgcgctgccgcgtgttcgaattcaagcgcctttcggaagaggagatcacgggcgctttgaaaaccgctctcacttccagaaagggattgtaccaatacaagacggacgtgtccgaagacgctttgaaacatatcgccaatatgtgcgggggagatcttcgcgccgcgtataacgcgctggaactcgccgtcgtcaccacgcagccgcagtcggacggcaccgtgcgcgtgacgctcgaagacgcggaacagtccatccagagaaaggcgctttcctacaacgaggacgtgtattacgatctgttgtcagcgttctgcaagagtttgcgggggagcgattccgacgccgcgctctattacgccttccgcctcatcgaaggaggctgcgatccgattctcatcttccgccgcctgatcgctcattccagcgaggacgtgggtatggcggatccgcaggcgctcgtcgtggcgacttccgcgctttacgcgttcgaacgcatgggtccgcccgaagggctgatccctctgacaaacgccattatttatgtttgcgaagcggaaaaatccaattc

SEQ ID NO: 2417 - DNA, 21348 bp, Unknown
  16S sequences of unknown bacteria
tgcgcgaatggctcagtggtagagcatcgccttgccaaggcgagggccgcgagttcgaatctcgtttcgcgcttttttatttggttcaagtcgcacggcttgaacctttttaattatataggaggtgtgcggaatgatagtaggaacatgtttaattactcttagaatatcatgggcttcatctttaaaggaaaaaagaatggttgttaaaagtcttattgacaggatgaaaaataaatttaatatttccgttgcggaagttgaacatcaggataatcataagaaggctgtaatcggatttgcatgtgttaccaatgaaacgtctcacgccaacagtataatagataaagtgctggattttgtggaaaacaacacggaagcggaggttgaagaaacctttatagaaatattatgaaaatacatttttctttgaattttttattaaaaagaatttgaatatatttcggattatgttataataaagtgattatgcagtcaaagtcggattgcaaacgatatattttaaggaggaaattttacaaatgaattcgcagattattagtaaagagggaacttccgtaaaactctcttttgatgtaacacctgaaaagtttgaagagggtatgaagtattcatacaataagaataaaagcaaaatatctgttcccggtttcagaaagggcaaagtacccagaaaagtagttgaagcacagtacggcgttgaatttttatatgaagacgcagttaactgggttcttaatgaagaatatcctaacgtaattgaagaacttcagctcgacgttgtttctatgcctgaaattgatgtaaaagaggttggtaaggaaatcggcgctaagtttgaggctactgttacagttaaacccgaagttaaactcggacagtacaaaggtcttgaagttgaggatttctcatcagaagttactgaggaagaaatcaaggctcattttgagaagattcagaatgacaatgcaagacttgttcccgttgaagacagagctgctcagatgggcgatacagtaaacatttcttactgcggaactgttgacggcgttgaatttgacggcggaaagagcgacggatatgaccttaaattaggttcaaagacatttatcgatactttcgaagagcagatatgcggtcattcaatcggagaaaagttcgatgtaaacgttacattccccgcagaataccatgctgaggagcttaagggaaaagctgccgtattcgccgtagaacttaagggaataacaatgagcgagcttcccgagcttaacgatgattttgcacaggatgtttccgaatttgatacattcgatgaatataaagcaaaagaagtggaaaaacttacaaaagagaaagaaaagaaagctaaacagaaaaaagaagacgcccttatcgagcagattattgctaatacagagatggatgttcccgatgttatgtatgagaacagagtaaacgatcttatgtccgagtatgagcagaatatgaagatgcagggtattactcttgatatgtactgccagttctcaggtcagacaatggaagaccttaaaaaacagcttaagcccatggctaagaacggcgtagacgcgaagcttgtaattgaccagattgttaaggaagaaaacattgttcctacagcagaggatatacaggcggaaattaagaaatatgccgatcagtatggccttgaacctgaaaagattgctcagtactatgaaaacgatcccggatttatacaggaagttgcaatccagaaggcacttgagcttgtttgcagtacagctgttgtaaaagctgctaaagcagaataatatttatttcaaaaaggaggcttggatatgagtttagttccttatgttattgaacaaactaatcacggagaacgttcctatgatatatattccagacttttgaaagacagaataatttttttaggtgaagaagtaacggacgttactgcaagcgttatcgttgctcagcttcttttccttgctgcggaagatcctgacaaagatattaatctttacataaacagccccggaggttccgtaactgccggcatggctatttatgacactatgcagtatatcaagccggatgtttctacaatatgtataggtatggccgcaagtatgggggcgtttcttctttccggaggagagaagggaaaacgatttgctttgcccaactccgagattatgattcatcagccgtcaggcggggcgagggggcaggctaccgaaatacagatagttgccgaaaatatacttaaaactaagaagaaacttaatgaaatacttgctcagaatacaggtaaaccttatgagcagattgtacgtgatactgagagagacaactatatgtccgctcaggaggcgcttgagtacggtcttattgacgcagttattaccaagcctgcacagtaacaaaattaaggcgtgctttaaatacagcacgctttagctttttaaaagcaaacagggagatgaataaatgccagcaaaaacagacgataaaaaacagcttagatgctctttctgcggaaagccgcaggatcaggttaaaaaacttattgcgggtaaagacgtatatatttgcgatgagtgcgttaaactttgttctgacattatatatgaagactataatctcgataatgaggaaagcgaaacggcttctctgccgaaaccggctgaaatcaagaaaattcttgacgattatgtaatcggacaggaagaggctaaaaaagctctttccgtagcggtttataaccactacaagaggattatgtcaagcgacagcaacgacaataaggaagtagagttgcagaaaagcaatatacttattgtaggacctacgggagtcggaaaaactcttctggctcagacgttggcgaaagttcttaacgtaccttttgccattgcggacgctacaacccttacagaagccggatatgtgggcgaggacgtagaaaatatacttcttaaacttattcaggctgctgactatgatatagaacgtgccgaaagaggaatagtatatatcgatgaaatagacaagattacaaagaaatccgaaaacgtttccattacaagggacgtaagcggagaaggcgtacagcaggctctcttgaagatattagagggtacggttgcttccgtacctccgcagggaggaagaaagcatcctcatcaggaacttattcagatagatacaagcaatatcctgtttatatgcggaggagcctttgtcggacttgataaaatagttcaacagagaacgggtgaaaaatcaataggtttcggcgcaaaggttcagtcgaaaagagataactcttttgatgagcttatgaagaaacttcagcctcaggatctgcttaagttcggtcttataccggagtttataggacgtgttcctgtagttgtaacacttcacagtctcggagaagacgcacttgtaaagattttgagcgagcctaaaaacgcccttgtaaagcagtataaatacctttttgagcttgacgatgtcgagcttgaatttacggacgaggcggtaatggctatcgcaaaacaggctgtagagcgcgatacgggcgcaagaggattaagagcgattatcgaaagctttattaacgatatcatgttcgatattccgtcggacagcacaatagaaaagtgcattattacggaagatacggtaaataaattgaccggtccggaaattatccgcaatgaaaataaacttccgttgaaagaaagaagaaaaaatcaggataaagatacagcctgattcatacaaataattacaaaaactccggtgtttgtacatcggggttttttatgttattatatatttcagtaaagaaacaggggtgataagtttgaatgatgagaaacttggcttaccgcttattccggttaggggaattgtagttttcccgagtatgattacaagttttcctttggaaggagataactcggcggcagcgattaaggcggctgcgtccgaatataaaaataaagttattattgccgcgcgtaagggagacagtagagagttctgcaaagtaggcgtaattgcttcggtaaaacagacgctgatgctcccgggaaattcaacgcatataatagttgagggattaaacagggcaaatatttcagaaatcaaagacaacggaagttatttatttgccacggctgatgaaatagaacaggataaaaatgaggatgtagacgatgttacaggagcttatatgaaaattgcggcggattcgttcagcaaatattataaactcacgggagctaaaaatgcgaatcaggaaccgctggttaatgtaatgaacgccgaaaagccgggacagcttgccgatactatatgcgcttcggttacaatgcccgcctcggagaaacaaaaaatacttgaaatgtttgaccccggggaaaggctggaatatataaatgaaaagcttcaaagggaaataaacatattaaatattaaaaaagatatagaaagcaaagtaaaaaagaagatggaaaaatctcagcgggactattatctgagggaagaacttaaggtaatccatgaggagttgggagacgaagaagaggtacagtccgagattgacgatctcagaaagaagctgggagaaaaaaatcttcccgaacatgcaaaaaaagcggttgaaaaagagctttcaagaatgaaaagaattccggttactacgccggaagcaaatataacaaggacttatatcgaatatatgctaagcattccttggtgtgaaaaaacagaggacagtaaagatctcataaaagccgaacaaatattaaacgaagaccactatggcttgaagaaagtaaaagaaagaatattggaatatttggctgtaagaataaatacggaagagacaaattctactatattgtgtcttgtaggacctccgggagtcggaaaaacatctatagcaaagtctatagcaagatgtctgaacagaaaatatgtcagaatgtccctcggcggcgttaaagatgagtctgaaataagaggacacagaagaacatatgtaagcgccatgccgggaaggattatagccgcaatgaaacaggcgggaaccgtaaatccgcttatgctgttggacgaggttgataagcttggtgtatcaaatcaaggagacccatcggcagcgctgttggaagtattggattccgaacagaataatgcttttagagacaattatttggaagtagggtatgatttatcaaaggtattgtttatatgtactgccaatgacgtttctacaataccacaggctttaagagacagaatggaattgatagagcttacaggatatacttcctatgaaaagaaacagatagcgatgaaacaccttgtacctaaacagctgaaagaaaacggacttacaaaaaacgagcttaaaatatctgaaaaagcagttgatgaaataatagaaaaatactgccgtgaagcgggcgtaagaaaactggagaggactatcggtaaaatctgccgtgtttgtgtaaaacagatattaacgggaaaaaagaagtctgtaagaattacggagaaaaatatagccgactatttgggaagtcctaaatataaggtagagccaatgctgaaagagccgtgcgtaggggttgccagaggtttggcgtggactcaggtaggaggagaaacgctgcttattgaggtcaatacgatgaaaggcagcggcaagcttgaacttaccggaaatatgggaaaggttatggaagaatccgcaaaggtagcattatcttatatcaggtctcgttcagatgaattcggtattaaagacgatttttataaagagatggatataagtctgcatatacccgagggagctgtaccaaaggacggtccgtcggcaggtattacaatgacgactgctatgttgtctgcgcttacgggaaaagcagtcagaaacgacgtggctatgaccggtgaagtaacaataatgggaagagttctttcaataggaggccttaatgaaaaagtgcttgcggcaaagcgcataggcataacaaatataatactgcctgaaggaaacaactccgatattcaggaaatgccgaaagagataaaggacggaatgaattttatttttgttaataatatgagacaggttgttgaaaacgctgtcttcggaggtatttaatatgaaagtcaataatgtttcactggcggctgtcggtgttaaaatgagccagtacccaacggatggcaagcctgaaattgcctttgcaggcaagtcaaacgtaggaaaatctactttgataaacgctatgataggaagaaaatcattggcaagaacaagttcacagcccggtaaaacgcggacaataaatttttatgatgttgaagacatactctatatagttgacctgccgggttacggatatgctaaagctcctaaaagtgaaatcgataaatggggaatgatgatagaggactacctgaacaaaaggcaagtgttgaaaggcatagtaatgctggtggatataagacatgagccgggtgaaaacgacaaaataatgtataactggctgaaacactatgattatgacataattgtagtagccacaaaaatggataaaataaaaaggtcgcagatacaaaaacaactatccgttataaaaaaaggacttaatatggctccggaggatacgcttattcctttttccggagaaacgaaagtcggagttgaggagctttggagcgttctggaaaatataataggatatgaagagaataaggagtgagagcaatgaaacaaaaaattcatctgtcggattccaatatgatgatagggggagtatgcgggggactcgccgaaagcttaggcatggacgcttcgtttattcggattgcagcagtactcttgtttataatgtttcatgcggttatgctgcttgtgtatataatattgtgggccatactccccagagggataagataaacaaaaaacggtgtaattttttacaccgtttttagtattccgtaaactgtacgggatccatcagcattccgtttaaagtaaccgtataatgcagatgaggacctgttgtaagacctgttgacccgacataagctataacttctccttgtattattttttctccgatcttaggaaatactttttgaaggtgattatatgtaattgtataaccgtcgtcggtattaaatgatattacgtttccgtaggtgtcggagacatgtacatcggttacatatccgcttctaacggcgtagacattgcttccttcttcggcggcaatatcaattccgttatggaattcttcggtacttagtatcggatttattcttgaaccacatggagatgttattataccgttgtcgacgggatttatccagtcttccgaaataaggggttctgtagttacacaggtggagactcaacggaactttcgggagattcgctcgtactttccttagttttgttttcatttatagtctcattttcggtatattcggggttttccgtagagaatatacattctacaaatccgtatatattatcttttatattgcctttgtcttcaaaattatcaagaacatttctgcttattgccgttgcaaggctttcttttactttttttgttccgctactgtttgtatatgctattaccattataaatacgcataatatgacagccgctgacatttggtttgccaggcggtttgattgttctttggggatattgcgtgctgatgcagttctttttttataattgcgtctgtatggaggtctgtttttcattgttacacttccgtaataatatttaataaattatatggagcttgtattgtatatatgatacagacataaaaaataactcctttcaaaaatgaaaggagttattttccgattatacaatgaaattccacgcaagcctgagtacgcgtgtggctgtaccgcgcatacgttttaacaagaatgacgttatatcaaatgtttcattataagcgtccgatataccttctgcaactgtatttgctgtatataatgccttttttgcaataaacctgcacagaccgcttccggcctccataacggcacagaatttatcggaaaaagaaacagctaaggattctttgaatttaggtctgcttattgatacacacggccacatatgatttacaatagcgtctttttctatatcattcagattaaatattctttcggagtttctgagagcctcaaaaggatgttttttgaggagcttctgcccgttttcgtcaatacttgtattttcgaaaaagtacaggtcatgcataagacctgcccttgcggcagaacggtagtcccatccaaagtatctgcaaagacaatagctgtaataggatacgttaagagaatgctgaaatctcgttgtaaaatgatgatgcttgtaatcaatcagcgagttaacttcatcattgtcaagtatgccggagatacagctgaaaaatgtaactgcttttgtgtcatcttcattatacatatcgaatttagaaccagttattttcacagtcaaactacctttcccggttggatttttctttctgtccgtataggcgggcggacagaaacagaaaagcgttttgcttttctaaataatattatagcacataggtataatggtttccataattatattattaaaaaaacaggtattatatgtattaaatccaacaaaaataaatgtttatagaccgtattattttgtaagcgaaagcattttggcatctacataagacgcgaggacttccggatttattattatctggcagcctctttgacctgcgcttatacttatttcatcaaataatattgcggtttcgtcaataaaagtaggaaacttttttttcatacctatgggggagcatccgcctcttatatatcccgtaagcggaagcagctccttgacatgaatcatgtcaactttcttgttgccggatactgaagcggctttttttaaatcgagttcttcgtcaacaggtatgcagaaaacgatataacccgttttgtctccctttgtaacaagcgttttaaacacctgctctgcgggaatacctaaaacctccgcagcatgatgacccgaaaggtcgctttcgtcatattcgtattcttttgttgaatattctatagttgcggcgtctaaaaggcgcatggcatttgtttttgtcatatataaatcctccgatttgaattgcgtaaagcgtataataatgtacaacctctgtaactgatgatataatagtatatattaattatatatataaggagctgaatttcaatgaaaagatttcttgttgaatttgccatgggtactgatcttcacggacagaatgttacaaaagcggcttgcaaagctgtaagaaacgccatatcaaactgctgcttatgcggtatatcggattgtctcggtgttgaagatttggataataaaatgcatatacatgttaaactcggctctacaaatccggacggaatagatgtagaacaggttaaaaaggaacttccgcttggaacagtagatgtagaatgcgtacccggaggtatgcagtgcgaaggacttcatgtcgatgaattcggtgaaggcgataaaattacaatggtaatagccgctttgacggtatatataaaagactgattaaaatatattaaaaaggatatacggattttttcgtatatccttttttgataatcttagcagtcggatgatataatttctttaactttatttctgtaaaagcttacagcatcggaatattcatttccgcatagaatttccagacctttttcgcttaaggcataaacgcctttggatattttctcaaaccaaccatagtaatttttatacaaaataagactgctgtttgtatctccgacaaatttattcagttgagacggtgtgatatttttcatatattctactatacacagaacaaaaatacttttttctctgtatgcggtaaggatttttgttttgcttacgccgcctatattcgttcgtagattccttgtttcaacttctttatttacagaagaacgctttttactgcttttcggaacagagacgctttcgggaacagatactatatctacggtctttaaaggactgtcaacggcaacggtgattatgccgatgttaagttttttcataagttttagcatattgttccattcggagccttttgcgcctttttttggtcttggaattactacatacaccgaatcggttattgattgacgctcgattgcctgataaaccaacttaagacagaaattttttttcagttccgcaataattatttcactatctttttttgcaatgaggtcgcaggattttacttcggcctgaacgtcatacccaagttcggtaaagtaattgcatacgggagaatataaatcagattctttaaagtccatattatttacccataaacgcttctatttcttctgttgttttcataaaacctgctgataaaacttcacagccgttatcggtaacaagaacgtcgtcttctattcttattcctattttatactcgtctatataaagaccgggttcgactgtcaaaaccatgccgggttcgagtcgtctgtcgccgtatctacctatatcgtgcgtttcggcgccgagataatggctgacgccgtggtaataatattttgaaacgtcttctggggtttctgccaaacctattttcttaagctcttcaaaataatgttctttaagaacttcgttaagccatgaaaatttaacgccgggttttattgtttctataactttttgctggcctgacagtactatgtcatatatctgcttttgaagcggagtaaacttaccgtttatagggaaagttcttgttatatcgccgttataccagtcgacctgtgcgccacagtctacaaggaggaggtctccgtctttcataagtgagttatttttattatagtgaagaatcgttccacgctctccggaagcggctattgttttaaaggctttgtcggttactccgttttttgtaagaacaaaatcaaaatatgcttccagttcatattcatacatttcggctgacgagtgcttcatcatttcactcaaaccatcggttgttatttttatggcttttctgataagttctatttcatagggctcttttattattcttaggtcggcaaagaacggataagagtctatgatgtcaagggcaggatatttttttctgaattcataggcgaatttcaggctttcactcccctctgcattccaatctctgtcttctaagtcgatatatatatgcttgatattatttttgaataccgtttcagagatgtcctcataaaatttatcaatgtacgatatatttttgatacccgactgttccgaagcttcatcgggagtgatatttgcgccgacccatttggcaagataaccgttatctctttctatatagagcgttacggtttcggaagcttcggtttttgtaaacataacgatttcgttttcattgttcaatcctgtaacataatagaaatttctgtcaggtgagaacggatagcgttcatcgccgcgcttataaggagcacgaccgttaaacagaacaagaatagaattgttaagcatgcgtttaaatactttttttcggttgtttataataaaatcttttttcacttatattcctcctaggtttatgtgatattttatcataaagcataaaaaataatatgtcagtaaatttttaactgtttttgcaaatacgcttgtatttgcaaatctaattttattccgccttaaaatcattgccgtatggtattataacaatattacatgtatggcaattataggcatatacagcggaatcagatgttttatcgcttatgttttgaagagaaattcggtcttttcccagaaaggataaagacgctatcggctgcttcttcagcgtccaattaacgccgtctctgcattgaatatacccaagttgcatttcattaccgcaataaggacatttcataaatattcctccctaaacattattataaagcattgaaatttataagataagtttgatattgattatatcataaaagctgatataatcaaaccacatggaggaagcttaatatgtataatatttctttatataaatgtgatgattatgaatatacaaaaatcaaggagataataaaaaaggaaattgacgatataggcggtatagaaaaatttgtatcaaaaggcgaccgagttgccataaagcctaatctcgttatgaaaaaagctcctgaaaatgcagctacgacgcacccgtctgttgtaagagcagttgcggaaatagttaaagaggcaggtggacgcccgattatagttgaaagtccgggagggccgtttaatgaggttttattgaaatccatatataaagtatgcggtattacggaggcggcggaactttcgggagcggagcttaattacaatacggaaacacgggaagcggctttttcgggtggaaaattgctgaaaagaataacagccgtagatgaaatactaaaagccgataaagtaataaacgtatgtaagctgaaaacgcatgcaatggctaaaatgactggcgctgtaaaaaatatgttcggaattgtaccaggaacaatgaaagcggaatatcatttaaatcgttcccatataaacgattttgcaaatgcgctcatagatatatgtctttttgcaaatcccgtgttgaatataacagacgcggttgaatgtatggaggggaacgggccgacgggaggaactcctaaacatgtcggcgttattatggcggctgataatccgtttgccgcagatgtgctgtccgcatatttgataggactggatataaaagaaatacccgtgtgtgcggaggcggtaaagagggggataggccccgaaaaaatagatgaaataattataaaaggcgacgatataaacgggcttgttgtaaatgactttgtattccctaaaacaaagccgataaatgtaacggaaaaaatgccgaaatttatgtatagggtagttaacgatgttttacagccatacccttcgtttaataaagacttgtgtataaaatgcggcagatgtgtggataattgtcctccgaaggctttggagatgggaaaagaagtgccgcagctgagtaaaagtaagtgtataagatgtttctgttgtcaggaactttgtcctgcaatagccatagaaattaaacgaccgatactttataggatattttcttctttataataaaatatgaattaaaaagtttttattgacttaataaaatttcagtgttaatctaaatatagcttaaaaattaatatacggaggtaatataattatgaaatttacatctacaccaaaggctccagctgctatcggcccatactcacaggcagtatctgtaaacggattattatttacatcaggacaggttgcttttgatcccgctacaggagaaatcgtaggaacaactatccaggaacaggcagagcaggtttgcaagaacctcggtgctatacttgaggagaacggacttaagtttgaaaacgttgttaagacaacatgcttccttgcagatatgggagattttgcggcatttaacgaagtttacggaaagtattttacaggaaaacccgctcgttcatgtgttgcggtaaagactcttcccagaaatgttctttgcgaagtagaacttatagcggaaatgtaaaaaataaaaggatagagaattttctctatcctttgttttttatcagtttttatcgggatttttcaggtttctgatgtgcatatatactgtgtttttggaaattcccaacagagaagcgactttaactacagaatccttcatattaaatattccgtctgaatacagtgatgaaataatttctctgtttctgtttacagcctgaatatttctgtcggagaaaacattgtcccttgcagcggtcagcttttcaaaaataagttcgtcaacgttttcagcaagagtttcgttaattatattttccttttgcgaggcgtcgggacgtatagaatctataaaagtatataacggagaatccatatacagattaatgcaaagcataccgatgacttttccgtgctttccctttatagctattgtacatgattttaaaggctttccggcattatttttattatagtaagttatatgtctgaaatccggattttttttgatatcgcttaacatttttaatccgagatcggttatgggagagccttctttcctgcccgaatgactgtgcactatttttataacggagtgatcgaagctggcgaaactatgtattacaagctcgtaacattctccgagatagtctcccaatccttccgcaagattacaatactccttcagtatgattttatcaaattcagtaagcgttataggcagatgttccataatattccccttttcagtaaaaatacaaaatcgactaactaaaacgaaggcataaatgcgtatagttttgtctaaaatcgtgtgtattataaaaatattatatagtaaattattgatattgtccagcgaataaaaacttgccgagaaaaatgtgtaattattttaaatcttaaggcggttttttctaatatttttgtattgataggtttttttgtctaatgtataattgtttagactcagaccggacagtctgtaggggactgttcatacaacatacagaaagcggtatgcttatgaataacagagaaaagattgtcctgaaagcttttgatttgtttatgacaaacaacggaatcggactgtctttgaatgatattttaaaagaactgaatatgacaaagggaggtttctactactattttaaaagcagagacgagcttatagaagaagtgattcaaaagtacatgctggatatactttggaaaccgctgaattatattagaaataatacagacgagagtatggatacatacgaaaggcttaagcagtgttactgtatattgccgaaaccggaggtactggactgcgaaggtaaagtgataaaaaaatacagtataaaaagctattttttaattctttacagcttgctggaaaaacatccgattctaagcatatcatataaatctttttatgaagaaaacataggtatgatagtggatgcaattaaggcaggaattgaaaaagaagaaataaaaagctatataagtcccgagtgttatgcggaaatgcttatagcaatcagggatggaatagtagcgcttagtttgatagacgatgaaataaatatagaaaacagacttgaaaaatcttttcaaactgcgtggaaagaaatatgtagtggggtgttgtaaatggaaaatttacttagaatgggcatagatataggttcgacaacagtaaaggtagtcgttattgatgaaagcaacagcatgcttttcagcagatacgaaagacactattccgaaatattggatactgttaaaaaattggttacggaagcgtatgatgaaataggcgaaagacctatttccgcaatgataacgggaagcggcggagtgtctctttccgaggccgtaggaataccgtttatacaggaagttgtagctacagcaaacgccatagaaagcgtaataccggcaacggatgttgctatcgaactcggtggagaggacgcaaaaataatatattttgaaggcggtaacgccgaggaacgtatgaacggtatatgcgcgggaggaacaggctcttttatagaccagatggcaagccttttacagacagacgcaggcggacttaatgaattggctaaaaatcataagataatatatcctattgcgtcaagatgcggcgtttttgcaaaaaccgatattcagcctcttataaatgaaggcgcggcaagggaagacttggcggcttccatatttcaggcggtcgtaaaccagacaatcagcggacttgcctgcggaaaacccataagaggacacgttgcgtttttgggaggacctctccacttcctttcggaactgagaaagagatttatcgagactttgaaattaaccgatgaaacggctcttcttcccgaaaattcacatttgtttgccgcgttcggttctgcaatatcatctgacgaaaataaagcgcaaagcttttcggaacttatagataatataggaaaaaataatgttcttgccgttgaaattgcaagactttctccgctgtttaaaaacgaggcggagtatgacgagtttaacgaaagacatttaaaggcatcggttcccaaaaagaatcttgcaaattataaaggaaacgctttccttggcattgacgcaggatctacaacaacaaagacggcgcttgttgccgaagacggctctctgctatattcgttctatgcaagcaatgagggaaatccgctcaaggtagttatacaatcgttaaacgaactgtatgacattatgccggaaacggttaaaataaaaaattcctgcgtaacgggatacggagaaggtcttataaaagaggcgcttatggtggacttgggatatattgaaacagtagctcactataaggcggctgcattttttaagccggacgtagactttatacttgacatcggcggtcaggatatgaagtgcataagaataaaggacggagttatcgaaagcgtattgctcaatgaggcgtgctcttccggatgcggttctttcatagagacgtttgcaaagtctttgaattacagcgtacaggattttgcaagagaagctctttttgcggaaaatccaatagacctcggttcaagatgtacggtgtttatgaactcaagggtaaaacaggcgcagaaagagggggcgaaagtcagcgatatatcggcaggtcttgcctacagcgtaattaaaaacgcacttcttaaggtaatcaaaatatccgatccaaaggctttgggaaaaagcattgtcgttcagggaggaactttctataatgacgcagtgctgaaaagctttgagcttatttccgaaagggaggcagtacgtcccgatatagccggaataatgggagcgttcggcgcaggtctcatagccagaaataagtataaagatggatacgagacaactcttatagacagagatgcaatgaatagtcttgagataaaaacaacgctcacaagatgcggcggctgtacaaataattgcctgctcactataaataatttctcaggcggaagacgatttattacgggaaacagatgtgaaaaaggtctgggaaaagaaaagacagcaaaaaacatacctaatttgttcgactataaattccatagattgtttgactatgaaccgatagccgaggaaaaagcaaaaaggggagtaattggtataccgagagtccttaatatgtacgaggattatccgttctggtttacattctttaccgaactcggattttcggtaaaactttcgcctgtttcatcgaaaaaggtatatgaagcaggtatggaatccatacccagcgaatcggtttgctatcctgcaaaacttgctcacgggcatataaagctgcttatagacgaaggggttaaacgaatattttatcccggaattccatatgaaagaaaagacataatggcagccgataacaacttcaactgccccatagtcgcttcatatacggaaaatattaaaaataatgttgaagatttaagagccgacgatattgactttataaatccgttcctttcactggcagataaagacgtagttacaaaaagaatgtcggaggaactgaaaaagtacggcgttgaaaaaacggaagtagctgcggcggttgaaaaaggctggacagaatggacgaatttccgcgaggatatgcatagaaaaggtgaagaaaccctcgaatatataaaggaaaacaacttgacgggaattgtgcttgcgggacgtccttaccataccgatcccgaagtaaaccacggaataccggaacttataacaagctacaatatgcctgtgcttacagaggacagtatcgcgcatctcggacatgttgaaagaccgcttgtagtaagagaccagtgggcatatcattcaagactttatgaagcggcggcatatgtaaagacaagagatgaccttgagcttatacagcttaactccttcggctgcggacttgacgccgtaacaacagacgaggtaaaagacatacttgtcgcggcaggaaaaatatatactacgcttaaaatagatgaagtaagcaatttaggcgccgcaagaatacgtattcgttcgcttatagcggcaatagaagacagaaacgaaaagggtattaccgctaaaaaaggagatgcgtcccttaagcgagtaatattcacaaaggaaatgaagaaaaattatacagttatatgtccgcagatggctcctctgcactttgacgtactggaagcggctttaaaggcatgcggctttaacattgtaatgatgcctgcggcagaccccggaagtatagatatgggtcttaaatatgtaaataacgacgcatgttaccctgccttgatagttgtcggacagatgttaaaggcgctgaagtcgggcgaatacgaccttgacaagaccgctttgcttataacgcagacaggcggcggatgtcgtgcgaccaattatatcggctttataagaaaggcgcttaaaaatgcaggaatggagcagataccggttgtttccataagcgcccagggattggagaaaaaccccggtctgaaatttacaccgaaactgcttaaccatatggcacaggcgttcgtatacggagatttgtttatgagagtgctttacagaacaagaccatatgaggctgttaagggttcggcaaacgctctttacgaaaaatggaacgaaaaggttaaaaaagatattgccaaagccgatttaggtacatttaagaaaaatatcaggaatatagtgaaagagtttgacgagctggaacttttggatatagtaaaaccgagagtcggcgtagtcggagagattttggttaaatatcatcctcttgcaaataataatatcgtagaacttttggaaaaagagggtgcggaggccgttgtgcccgaccttctcggattcggacattacagcgcatataattcggtgcagaaagaaaaatatctcggaggttcatcaaatgccagacgattctccaatatagccataaaggctcttgaattttatcagaagcctatggtagacgcacttaaggaaagcagcagatttgacgcgcctgtaagtatagaaaaactcggcgagtatgcggaacctatagtatcgttgtgcaaccagacgggcgaaggctggttccttacgggagaaatgatggaacttatacataccggagtaaataatatagtatgtactcagcctttcggatgcctgcctaaccatgtggtaggaaagggagtaataaaggaaataagaagaagatatcctcttgcgaacattgttgcggtcgactatgaccccggcgccagcgaagtaaatcagcttaatcgaataagacttatgcttgccagcgccaataaaaatcttgaaaaaacttcaaatcattaaattttcttaaagattgttgattttataattatttttaacggttatatgataaaataagatttactaaccggaggtgtgtatatgaaagaggaaagaatggctattcttcgaatgctggaaaagggtactatttccgcagacgaggctgaaagactgctgaatgcgatgaatgaaacggaaaataaaaaagatatttcggaaagcattaataacgtccttgccaaaacaggaaacgttttggaggggcttgctaaaaatcttactaaaaaggcgggagccgccgcaaaggttgtaagcgaaaaagcggaagaggcaaagccggaaattaaaaaagccgctaaggcagttaaagaaaaagtcagcgaagcagcggtaaatataaaggaagacataaaaaacagaaaaaacggtgaggatatttttgaagccgattacagagaaaaaaatgatgatgagacctttgggaataccgatgtgaatactgaaaataagacggatactcagaaacaggaaaactctgtcgttgaaagtaatgaacctgaaacagctgagttcaagacagaagaacagacagataatttctttgaggatgatgacagagactacgaagcggagttcaacagaatgatgagcgagacaaacggcggagacattttcggggaagtatttaatccgataaacgacgcaattttcgaggctcagagagaatgggaagaacagaagaaaaatgatgacaacggagagttaagatgacgggaaaagctaaagaagagctggtcagctggataaaaactatagtactcgccgttgccatagctctgtttattaattttgttattatagtaaatgcaactgttcctacgggatcaatggaaaacacaattatggcgggagacagggtaattgcctccaggttaagctatacgttttccgatcccgaaaggggagacgtggttatttttaaatatcccgatgacgaggacgttttgtacgtaaagagaataataggacttcccggcgatgtggttgaggttaaaaacgggggagtatatgtgaatggagaagcgctgggggaagactatattaaggaaacaacagagggattttacggtccctatgaggttcccgaggattgttattttatgatgggtgataacagaaataactctcttgactccagatattgggacaataagtttgttgaagaagataaaatattgggcaaagtattgcttaaatattataaaaaaccggctcttgttaaataacttcaagagctactcttacgggagccgcttcggtatctgtgttaagaggaaaacagtataatctgtatttacccgggcgcacagatgacaaatcgatattttcaagtatcggtatttcggaattgagaaaagtaagatgagaagtaaaacttgattcgttgtcgactgttatatagtcgataccgacaagttttatttttttgcttacaagatacttcgccgcgctttcggaaatatatgcagggtttttcagcggttttttgccgtcaaatatgctgtttgcggtcttaaaaaggataatgtctccgcattctatctccgatttttctaaatcggattttttgatttctgcttaggtcagtttacaaggaactacacgcagaccgtgaaacgggctgctgacaaca

SEQ ID NO: 2418 - DNA, 32759 bp, Unknown
  16S sequences of unknown bacteria
tcgaggacatgtatgcaagctatcacaagctgggcggaaacggctttatcactggaatcatggcagaggttcgcgctctgccgaagaaataaggagtgttgtaaaaatgcaaggtatcattctcattctggccctggtcgtcgtcgtggaggccgtcgtggagtacatcaaaagcatcgggaaaatgtttgcgaccggcgactggaaaaccgccgtaacccagctttcggcggcggccatcgccattgcgctgtgcttcgcggcgggtgctgacctgttcgctgcactgggactgcatttcggcctgtggtggatcggcgttgttttgaccggcctgttcgccagccggggggccaactatgtaagcgacatcattcgcaagctgcaaagtctgggtaagcccaaggtggaataggtacatagaaaaagccgggcggggattactcctcgtccggctttgttgctttattttgaatctgggctacaattttacccacaagggagtttgcaatccttagaaagggttgcaataatgagggggacgcaatacaattcgagacgctttttacttttcatttttcgacacccctgtgaggcacggaacatttatcgcggccaaccgtctctttgtttcattgatggatttgaaaagcactggttgaacgacagaagcccacaccctcatgcgctcctgtatctctaaaatgcttttattcattacgctctctacccccattctttttcctccaatctttatatttgccgctcttcacccgcctatcttctggcggctgcgtgtcggctggtatggcccactggttgccaatcttcacggcggggattcggccttcagctataaggcgtcggacattgccggtatataacccgtgcttttcgcagaactgcgtgacggatagatactccattgacttttcccgcctttcgtggtatattaggtgtaggcaaggggcgctttggtgttcgcctttgctatctgctagtcctcacgctgtgcaagagcgtgggggctattttactttaacggcattcaccgctaagagcagcagcagagcaaccagacaaattatgtaccggacaaccctttttcgcattggcctcacctcccttctgtcggaggtgtgcgccccttgactacgatattattataatacgaaatcgtttaaatgtcaatagctttttcaaaaataaaaaagaaaaagcgggtagggtctaaaccctatccgctatcttttgtacaaaaccgaacacgctacaatttataagtaaaatgttcgcctttgtttcatttggtggagacgaagaggatcgaactctcgaccttacggatgcgaaccgtacgctctcccagctgagctacgcccccatatactgtggattttcccgggcgactaacaaaaaaccgcaagggatttttaatccgtacaatatattaccgtaaagccgaccgtttgtcaagccaaaaccgcaaaattcttcatgaatttattcgggtaaaccgaaggtcagccggccggtcagcggcgccggcggcagctccagcaccgccgcccccagctgctccgcttccgcccggatatgggtgaccagcaccaccaagcggtccgcatagcccgccgcgatgtatccggccagcttccgccagcttgcctcgtccaccccgctgaacggttcatccagcagcagcacgtcgggctgcacggccagcgcgcgcgccagggcggcccgccgcctcatcccgccgctgagcgccgccggacgcttgtgcgccgcgtcggccaaccccaccagctccagccaagccgccgctctcgcgcgggcatccggcccctccagcaccaccgccacattctccagcaccgacagccagggcagcagccgatcctcctggaacagcatagccgtcctcttgccctccagccccgtgaggcgccccttgtctggcttttccaagccggacaggagccgcagcagggtggtcttgccgcagcccgacgccccgaacaggcacaccgcgccgctcttcgggaaccgcagggaaaccgcctgcagcaccggcttttgcccgtaagcgaacgatacgtcctccaacgcaatcatgtaccgtccccctctcccccggtgttgtagcgcttaagccgccggacagccagcagcagccccttctccagcaccatgctcagcgccaccaccaccgccgtccaggcgaatacctcaggcgtttccagatacaccttggcgtcctgcagctgcctgccgatggacatggccggccggcagatgacctccgccgcgatccccgatttccacgcgaaccccagcccggtggtggccgccgccagaaaatacggcatcaccgaagggatccgcacccgcaccagggttttccaccagcccagccggtataccttcgccatttccagcagccccgcgtccgtctcccggatccccttttccacgttgccccaaaccaccggcaccaccatcagaaaggcgataaacgccggcagcgtgttggtgcggatccagaccaaggccagaatgataaacgaagccaccggcgcggcccgcacgattttgagcagcggggacagcagcacgtccgccgcccggaaccgcaccgtcagcaccgccagcagcgaccccgccgccagcgccgccgcgaacccgacggccacccgcagcagcgagccgcccgccgcctgccaaaaccgcgcatctcccgccagccgtcccagcgtgcgcgcaacctgaagcggcgcaggaaccaaaagttcctgcgccaccagcagactgatcccctgccagacaagcagccaaaaggccgccgccagaagggccgtcccgatccgttttcctttagccgagatagtagaggctgtcatcaggcagctttcctccgatggaagcgggcttcgccgcaaacagcacgtcgaaatagcccttaatctgcttcatcatatcctgtccgtccacatatgtcaagttgcagcgcggaatcgcctgcttggccaccgccgccttgggaatgatcccgtaggtctcgcacagcgcggccgttccgtccacgtcaccggtcgccttttcgatggaggctttgtactcgctgaggaacgccttgaccgcctgggggttcttctccacaaacgcggaacgagccaccacgcagcccatcatcagggtgctctcatcccctgcggcattcttccactccttagtcatatccagggccacccgcagcttgtcgttcttggccagcaccgtggtcaccaccggctccggcaccagcgccaccccggctttcccggacgccagctgggtggccagctcgtcgttctcgctcaggaactccagcttcacgtccttgtccggatccaggccgtttttctccagcacataccgcagcacgtattccggattggccccctggccggtggaataaatggtcttacccttcagatccttcacactgttgatagccgtgccgttttccagaatgtacagcacccccagcgtgttgaccgccagcattttcaccttgccgttcgtcttggcatacagggcggacgccagattggtgggcaccgccgcgatatccgcttcgccgctggccaccttggccaccgcctcgtccggtgtggacagcacagagaaggtgtagtcgttctgggccgtcttctcctcattggctttcatcagattgaccaggccaatgccggtcggccccttgatgccgaatacattcaccttggttttctccgccgccgcggaagatgcgggctgctgggatgcgtttgaggaagcggtctcccccgtggaacatccggccagcagcgcgccggccagcaggacgctgagcagtccggccgttatttttttcagttgcatacgttctccttctttctcccatcaacctatccgattcaaggctctccaaggagcctgggatcgtccacataaatccgccgcccctgccggcggatagcgccgctctgcgtcagcgcgtccagcgagcggtacagactggaacgcccgatgttcagggactgggccagctccagcaggctgcccggcagcgtcacctgaccgtcctctccgcggtgggccagcagatacccagtcagccgttcgtccgcctgcccgccggtaaacccggcgattttgccgttgaggaagcggatgcgcccggtgaggaaccggatgtagttctccgccactggaaaatgggcgcgcatccacccggtcaccagctcctgggacaggaacagcaccacgcagggccgcagggccgcgatttccgtcacataggattctgcttcgccgaacagcgccgccgcgccgaagacctccccggtcgtcagccggttcatcaccacccggcggccgtcctctcccggacggtatacctgcacctcgccctgcagcagaagccccagcgcccggcggaaggcatggcaggaatagatcgcctcgcccttttcaaagcgcaccggccggggcgcctgcgcccacagctgccgccgtgtctccccgtccagcccatccagaaggaacaagccgtcggcggtttgccgcatcgcggcggtaaacgcgatctcctccataccacccctccaaaattgtcccaaatgggacaattacaggattagtatagcatagattttccaaaacgcaagccctttcgttaaataaataacggtttttctcttctctttacgcctcatccaaaaatccccagaaaccaccttgtatttttttcgttttccgtgtatgatacttatagaaaaaacagaaatggcgcgggatttactcccccgccgcgaaaggaggcgacgcccatgcgcggtatgcggaatatccgaagaaagacaagctacgacaaggcgcgggaaattttgatgcaggcggattacggtatcctgtccaccacctgcggggacggtctgccctacggcattcccctgtgcttcgctctgtccggcaattcgatttatttccactgcgccaccgagggacagaagctggacaacctggtgcacgacagccgtgtatgcctgaccgccgtcctccacgcggagaatcggcccgcccgcctgaccatgacctatgaaagcgccatggcgttcggcacagcgcgcatcgtctacgccgaggatgagcggcacgccgccctgcgcctcctgtgcgccaaatattcccccgatatgagcgaggaagccttggtcgcctattttaaaaagcatatcgccaacaccacggtggtgcgcatggaggtggaatacatcagcggcaaaagcaaccgccccggcaaatagaaaaagacggttccagattctggagccgtcttttttcgcctgcatgcacatattctccgagccggcaacgcacactagctttgtatcaattgccggaaaggaagttgttctcgtgatcaaaaacaccatcgaggcgccgctgtggccctccgtcgatacaatccccgcccagtacccttggctgtccgccgacgaaacctgtgaggtggccgtccttggcggcggcgtcaccgccgccatgtgcgccctgcgctttgccgaagcgggcatcgacaccgtcctggtcagcgccagccccgtcggcttcggcggttcagcctgctcgagcggtatgatgaccctggccagcggcgattccctggtgtccctcgtggaagaaatcggcgccgaacgggccatgtccgccgccgagctgctgctcggctctctgaaaaacctggaagatttctgcgcctccaccgaggacggctgcggcttccaccgcaaggacagcctgctgtataccagtgaagaggcctgtacctccaagctgcgccgggaatactccctgcgcctgcataacggcctggatgtcgagctgctcaacgccgacaccgccagcgagcagttcaccttccccatggaagcgggcgtgtatacgaaaaacgccgccgcgcaggtggatccctaccgcctgacccatgccgccgtccgcgccgccaaggagaagggggcccggatttatgaaaacaccaccgcctccgccatcaaccagtcggcgcaggacgatatcaccctggaatgctccacccatcaccggatacaggcccggtatgtcatcgtggccgccggcctggagacgcaccgctactgcggcggcttgacccaggcgggcaccacctacctgctggccaccgagccggtggaggagtttgccggctggcggggcacctgcctcattcatcgggagggcgacgcccggcagtatatcaccgtcacccccgaccagcgcatcctcatcggcggcctggacagcagcgtcctggatgaaaagggccgggtagcccgcctcatcaacctgcaaaacctggcggagaagcgccatcacgccctggcgtataccctgcgggatatgttccccgctatccgcaatattacagcggaatacgtctgggcggccaaggacggccgcacgtcggacggcctgccggtgatcggccgcctgcccgccaacagccgcgtggcctatgccatgtgctgcggcgataacggcatcctctacgccgaggcggccggtcgcctgctgctcgatcagtatcagggcgtggacaaccagcagctgggcctgttctcccccaaccgggaatggcggatcaagcgctaaagcgcttgatcctggaaaaacctcttgccggccctctaggggggccggcatttcgcggctctgccgcgaaaccgcgctttttctccgactccttctcctattgaaataacagataatgctgactcgtttttcaactcctgctctctgtaaaatgaaagaaaacgctaaaaaaccactagccgaccctttaagccggctagtggttttcgtggttttctcttcagaagaagccagcgacaaaagggaaccgcgcttacccgatgagcgcctgggtgtcccgcgcgatgaccaattcctcgtcggtggggataacaaacgcccgcacggccgaatccgccgtggtgatctccctttccttgccgcggcagtcgttggcctgctcgtccaccttcagcccgagataaccgaaggagctgagaatttcccgacgcagatcgatctggttctccccgatgccggcggtgaagacgatggcgtccaccccgcccagggccgccacatagccgccgatatacttgacgatctcatacgtgcgcatatcccacgccagcttggcccggtcgttgccctcttccaccgccttggcgatgtcccggtcgtcgctggacacgccggaaatgcccagcataccggacttcttgttgaggatgttgtccatctcctcgggagacagatcctccttctccatcaggaaggtgaccaccgagggatccagcgcccctgaccgggtgcccatcaggaagccgtccagcggggtcaggcccatggtggtgtcaacgaccttgccgtccttgatggccgcaatggaggagccgttgcccaggtggcaggtgatgatccgggtgcctttcccgtccggcttgcccagcagctcgcagcagcgagcgctgacgaagcggtgggaggtgccgtggaacccgtaccgccggatgccgtatttctgatagtattcgtacggcacgccgaacatatacgccttggcgggcatggtctgatggaacgccgtgtcaaacaccgccacctggggcacgtccttgccgaaggcggccacggcggcgttgatgccctgcacatgggcgggattatgcagcggggccagggaggaatccccctcgatgtccgcgagcacctttgcgtcgatgcgcaccgatttatcatacttggagccgccctgcaccacccggtgcccgatggcggatacctcggagaggctgtcgatgacctttccttccccttcggtcagagccagcttcacctgctcgaaggcggcggtgtgatccggcatggcgacttccttcgtcaccacccggccgtctcccgtcttgtgggtgaaccggccgtcgattccgatgcgctcgcacagccctttggccacgaccacctcgccgtccatgtcgatgagctgatacttgagggaggaactgcctgcgttgatgaccagaattttcatgcttgtactcaatcctttcgcgggttcgccctttcccgggcaacttccacaattgcattttgccccaaaacaacgtatactatcatagtacggttttgcttgtttttcaagggcttttctgcccgaaaggcgggattttattgaaagttgccggaatcgtggcggaatataaccccttccataacggccacgcccatcaaatcgaacgcacccgcgccgcggacaacggctgcggcgccacccacgtcgtcgccgtcatgagcggccattttgtccagcggggagaacccgccctgctgcccaaggccgaccgggtgaaggcggccctgcgcggcggggtggatctcgtcctcgagctgcccgtcccctggtgcctgtcctcagcggagggcttcgccttcggcgcggtctccctgctggacgccctgggctgcgtggatgtcctcagcttcggcagcgaatgcggcgacctccaggcgctggagcaggccgccgacgtgctggcatcccctcgcttcgccgatctgctcgcctaccatctggaaggcggcctccccttccccgaggcccggcagaaagcggcggcggagctgcgcggcggcgtcgccgccttgtttgagagccccaacaacaccctgggcatcgaatacatcaaggccctgcgccgcctgacctccggcatagtccccttcaccgtgcgccgcttcggcgccgggcacgacgctcggctccccgccggggacatggcctccgccaccttcctacgttccctcatcgaggccgatcggcttctgaacgccaccgcctacatgcccgccccctgcgccgccgtcctggccgaggccgcgcaggaaggccgctgccccgcggctgtttcccggctggaacgcgcgctgctggcccgcctgcgcaccatgtcgccggcggaattcgcttcactcccagccctgagcgagggactggaaaaccggctggcctccgcggcccggcaggccggatcctaccaggagctgctggacgccgtcaaaacccgtcgatatcccctgacccggatccggcggctggtctggtccgcctttctcggcctgtccgcctctctcgcctgggacgcggcggcaggccggtggaaaaagccgccctatctgcgggtgctcggcgccaacgaccgggggctggaaattctccgggcggtgaaaaaccccgccctgcccctgctggcccgccccacccatatcgaccggctggacgcggatgcccgcgccgtgctggacgccgaatgccgcgccgccgacctgtacgccctggccctgcctcagccgcccccctgcggcggcgaattcaccgccggcctcattcggccttagcgggccggaaacgtcccttttttcacagtctgagggcctgcgggccctcttttttttgcgcgccgccgactaggccttgtttgataaatgtcaaaacgtccaagcggcggatctttttccgccactctgcgttgattttccttgccatacataaagtatggcagcgtcaaatcgccttgattgacgaaaaaatctctcgccattgagcattctgccatttatcaaacaaggcctaaatcacagcgaattttccatccgaacaaaatctgccaattccatcggcaaaaaatttccaccggtaatccgggcgattcggtttacactatagtcggaaaccatcatcgattccggtcctctcggccgttcgattttgataggtcaaaccattggaaaggatgaaccgattatgtccaaccagcccaaagctatgcaggatccggccatgaagcaatatttcgacaccctgcccaccagcgtgcaggaaaccattgtgcaaagcggcgtggagatcaactccgtcgaacagctcaagcagtgcgccgagcacttcatgcagaaaaacggataatcctccctcccccgaaaccccgcaaatcccgcaaatgctgaaaaacgcccgcagcattcgctgcgggcgtttccaacggaaaacaatcttattcgttgtcgaccttgttcatgtgctcgatgaggttcagcaccttgttgctgtagccccactcgttgtcgtaccaggacaccagcttgaagaagttggagttcaggccgataccggcggtcgcgtcgtagatggaggtacgggagtcggaatagaaatcggaggacaccaccgcgtcctcggtgtagccgaggatacccttcatgtaggtctcagaagcctctttcagggtggcgttgatctcttccatggaggtggctttctcggtgcggacggtcaggtccaccacggaaacgtccagggtgggcacacggaacgccataccggtcagcttacccttcagctccggaataaccagggcgcaggccttggcggcaccggtggaggaggggataatgttgccggcagcggcgcggccgccgcgccaatccttcgcggaggggccgtccacggtcttctgggtggcggtggtggagtgcacggtggtcatcaggccttccacgatgccaaatttgtcgttgataaccttggccagaggagccaggcagttggtggtgcaagaagcgttggacacgaccttcatgtccttggagtacttgtccaggttgacgccgcacacaaaggtgggggtgtctttatccttcgcgggagcggagataaccactttcttggcgccgccctgcaggtgggcgctggccttctcggtggtgcagaacacgccggtggattccaccacatagtcggcgccgcattcgctccacttgatgtcggccgggttcttctcggcatacacgctgatggccttgccgttgacgaccagcttgccgtcctcagccttgacgcagccgtcgaatttgccgtggatggtgtcatatttcaccatgtacaccatgtagtcgagatcgataaagggatcgttgatgcccacgacctcgaatttctcgggctgggaaacagccgcgcggaaaaccagacggccgatgcggccaaaaccgttgatgcctactttaatagccatgaaattacctccatacgtttattcttgttccattttaacgcgtttgcgcccacttttcaagaagtttgtcacctttttaaccagatgttcacacttttgtgaggttcaccaaaagccatatgaattcccccaaaaaggggtgtaataccgccaaacgattacgcgcgcaaggagtctgaagctatggttgtcaccgatcctcccaccccgcccgcctgtactggggaaaccgaaggcgagctccgggaaaagctggccgcttactttctttccgccccgcctctggacaggcaggacgacgaacagaagcgccgccataaagcagccctccgccgtctgctgcggctggaaaaccgatcgatcctccaggccgccggcctgccccgccccctgtcgcagggagatctggccgtgctgctgcgcgcgctgctggacgcctgcctgcaaaccctgggggccgcccggcagcgggacagtgccgttccgctcatgagcgtgcagattgccgagggctttcccctgcgggaagcggcgggcttcgagccccgccttgtccaagcgggcgtcgtcggcctgctgcgcgccgcctgccgggccaacgcggccgatttggtggccgtgtccctgtccgccggaacggaagccttcatcctgaccgtcaccggggagcgcccgcccgccgaggccgaggcgctggccgtggccgaagaaacggccaggctgcacaagggcggcctggccgtctgttccggcaccgttgggctgtcgctgtccaccagcctgccgggggacgcggggctgtatgtcgcccccaccccgacccagctgctgcgggacaccctgtcggccgtgcaggtcggtctttattcgtcgttgggataaaggtccttgaggatgtcgtccaccgtgggctgctccggatccccagccggaaccagggcctcctccgacgccggacggttcttcccgaaggcctggacaaaggcgaacagcagggcgaaagcccccactaccccgtcgatcacgccggccagccggctggcattgtaagcgtccccctgccctgtcatatacaggcacagccgggtcagcggcccgctcaggcagaacagcgccgtcatcagcgcaaagaagaacagcagccggtttttgcccgcgcccacccccgacagataccgggcaaaggagaagaagaacagcagggcaaaaatcagcatgacgaaatcgtaaaagctctcgctgacggccaccgcgctggcatacgacacctcataccgcgccagccgcatccagacccatcccaccggcgcgagggcccacaggcgcatcagccccgagcgaacccggttttcggtcagccagacgatgccggtgcgcaccaacatcacgccgcccagcaggccgaacacgatggtgaaaaagagggtgacgccgtcgatcccgctgatcacatgctcattgggggccggcgtctcgccgaacagcagccagttaaaaccgtccagcgccgacacgatggtcatcaccgaacccgccagcatggcggatagggacagcggggtcagcagcttgcctcccggcggcaccccgtcgttctgcgacagccaggacagcaccgccgccgccagcatggtcaacgccatcagcccgatgataagatagctcagatgaaacagcccggtgtccgggtcctgcatcctgggcgtcagcgccacccgcagaatcagtaccgccagcgtcatcaccgccgtgataacggcggctatttttttgcccgccggcaggtagcctccagccagccaggcatgtttctgtccggaatcgtctcgcatcttcatgaccagtccttccgcctttccgcgggcgccgcccgcctggaacaatattttacagtatagcacaatcctttgaaaaaaaccagccgttttctttaggcttctcccattccgaagggttcacgcgatacgggctttacatggatttcctatatacttgttgaagggtcggcaaacgccccggaaatccttggatttccggggcgtttctatcggcttatccccgctccgccagggggatgtagggctggggcttggcgatggccttgtaggcggggcggatgatccgtccgccggtgtagagctcctccacccggtgggcgcaccagcccgccatgcgggccacggcgaacagcggggtgaacaggtcgggatgcagccccagggacttgtacaccaggccggaatacatatccacgttggcgcacatggccttgtcgctgcccttgacctcggcgaacacgccgggggtcagcttctccaccgtttccagcagccggaactcggggccgtagcccctcttttcggccagatccaccgcgtatttcttgaggatgaccgcccgcgggtcggacagggtgtagaccgcgtggcccatcccgtacaccaggccggagcgatcccccgcctgcttgttgatcatccgcaccaggaaggcgcgcacctcgtcctcgtctccccagtcccggatgccctccttcaggtactccagcatctccatgaccttgatgttggcgcccccgtgcttgggccctttgagggagccgatggccgcccccatggccgagtaggtatcggtacccgaggaggtgagcacccgggccgcgaaggtggagttgttgccgccgccgtgctccgcgtggagcatcaggcagagatccagcagccgcgcctcctcctcggtataagccgagtcggcccgcagagagtgcaggatggtctccgccgtggacagaccggggacattggggtggaaatacatgctttcccggtcgtaatggcggcgcttgacctggtaggcataggccatgatggagggcaggcgggcgataagctcaatagactgccgcagcacgttttccatggacagatcgtcgggcaggtcgtcataagaatacagggccagcaccgagcgggccagcttgttcatgatgttgggggagggcgccttgatgatcatgtcctccgcgaagtattcgggcagttcccggtaggcggagaggatttcggtgaacttcgcgagctgccgcgggctgggcaggctgccgaacagcagcagccacgccgtctcctcgaaaccgaagcggttttccgacacgcagccccccaccagatcgttgatgtcgatgccgcggtaaatcaggcggccctctaccggggccttctccccttcgttcatgacgtagccgtgcacgttgcagatccgggtcagcccagccataacgccgctgccgtccgcgttgcgcagcccccgcttgacctcgtacttttcgaatttttccggttcaatccggttattctttttgaattcgtcgcatagagatgttaatgtgctgttggaaattcgcatggtggtcttgtccatcgctctcattccttttttgttcgtctgaaggcggacaggcagccccttcggcgtttggatatgattatagagtttcccccggccaaagtcaatagaaacgcgcgaaatcgtttgaaaaaacgcagagattttgaatttcgtttctctttgtctttcattttgcttcttaaaattcaaaataaagcgaaataatgcgcgcgaaaatgaaaggtacgcatgaagtttttgcatgttccgccaatcccttcaccagggatggcgcgggaaaagaaaggagtaggcttgtgaaacggtattgtgcgctggtgctcgtggtgttcgtcatgcttttgctgctgcccctgccggccttgggcgtcctggagggggacaagtctcccctgcccccccgcccggctcagagcgcccccttccccgacacctcctcgccctctgcctccgacaccttccgggtgctggatacggacagcgggaaggtggtggagctgagcgagagggattttctcatcggcacggtggccaacgagctgtatcccacctatcacatcgaagccatgaaggcccaggcggtggccgcttacacctattacagccgcaagcgcactgcccagcgggccaatcccagcgccgatttgaagggggcggacttttccgacgtcccctcccggttcccggaggggtacaccaccgaggggctcaaggagcggtggggcaaaaattatgatacctattataaaaaggtatgcgaggcggtggacgcggtggcaggcaagcggctgtactacgacgggcagccgattatggcctcctatcacgccatcagcttcggcgccaccgagacggcgggggtggtctggggcagcgattatccctatctccagtcggtgcccagcccgggcgacaagctgtcgcccgactatgagacggtggtttccttcaaggcggccgacttctccgccgccctgtgcaaggaggtcaaggatctgaagctggagggggacgcggccgggtgggtgaccggcgatcccaagctctccgaggccggcaccgtggaggaaatcaccgtgggcggcatgaagatcaccggccggcagatgcgggcggcactctccctgcgctcggcctgcttcaccgtcaaatacgcggacggcgcgtttcagttcaccgtccacggcttcggccacggggtgggcatgagccagtacggcgccgactacatggcgcggcagggctccacctggcaggaaatcctcacccactactacaccggcgtcaccatcgaataaaggataagaaatttgtaaggaaaaatttatgcgcgtccgtccattccatgctataatagaaaaaccggacaactttgccaattttcttgacataacccggttgtttggtagaatactaaaaaacagtatgttaaaggaatgggctgcgcatgagtaaaaaggtttcgaaatccaagaaaaagatttacggacgcaaccggcggatcgccatcgtcgtcgttctggcatccctgctggtggtggcggtcggcgcggtggccggcgtcctgatatgggtgcttatgaaacagccgcagccggccccttcctcgtccgccgcctccgaggcgccggcgaccactaccgccgcgcccaaggtgacgctgcccgtctccttcctggacgccaacaccgcctgccagaacatcgccctgtatgacgccagcagcgacacgctgctgtataccaagcaggcggatatgaagcaggagccggccagcacgaccaagctgctgaccgcggcactggccattcaatacacccccgagggatacgttttcaccgtcggcaacgagctgggtcttgtacgcgaccaatccagcaaggccaatctgctcaccggggacaagctggatctcgacaagatgctcaaggccctgttgatcccctccggcaacgacgcggcctataccatcgcggccagcatcggccgggtgacggccggggacgaatccctgtccgccgccgacgccgtgaaaaaattcgtcgccctgatgaaccagacggccgccgagctggggatgaccaacacccatttcaacaaccctgacggctacccggaagccgcccattattccacggcgggcgacatgctcaagctcgtcaagcacgccgacagcctgccccaggtgcgcgaaatcgtcaagcaggtcacggtgaccgaatcgctgctgaacggccgcacctgcacctggaaaagcaccaacaagctgctgcttgccgacgacgagaagcactacaacccctatgtcaccgggatgaagaccggctcgggcgataccacctactgcctgaccgtatccgccgaaaaggacggacggcggctgctcctcgtcctgatgggggcacgcaaggaggaagaccggtggacggacgccaacggccttctccaaatcggcttcgaggcctgaaggcttaaaatgaaccaagccctccccgcgcagcggagagggctttttctatgagttggggacagggcggtttgaggggcgctgtgtattgacgcggaaaagcctttcgctgtcagccgaatagggacacgccgtttttcagcagcttctcctgtacagccgcagccggcagcttccggggggaaatccggctggcggccgacagagcagccgctatccccgcggcctcccccaccgccatgcagatattcatcacccggtaggacgaatgggccttatgcgtgccggacagacagcggcccgccaccaacagattctccacgccccttggcagcaggcaacggtagggaatatcgtagggccgtgtatcccgagccgcctccaaatcctccgcctgtccgcccccggcggggttatgggtatcaaagcagaaattggcgtggtgcaccaccacatccgggaaggttctccccgcggagatatccgaagccgtcagcgtatagtcgccctggatccgccgggtctcccgaaagcccggggcttcggcactgcctgtcaggcggcagttctcgaagcctttgacacgcttacgcaggaaatccaccacctgttgaatctgcccccgcagcatccgatcgacccgggcgatatccgccggggaggtaccgtccacccggcagagctgattggcgttgaccagccgctcatccggtgcttgaccgccatataaccgtacgatggtcacgtccggcggcagttcaccgcagcggctggcctgctcgcacagctgcaggtaactcaccccgtccagcatcgtatcgtccgcctcatgcgtgcaaaccagatcgctgtgcacccgatcgatggtaaagagaagggaggccggctgaaccaagccgtccgatgggcgccccatctggtagggcgccccggccagagcggccgccgtaccgtcgccggtggcgtccaccgtcgtccggcccgctacccgggccaacccgcgcggcgtggagaccaccaggccgcggacgttctcgcccgctttccagacctctgccaccggtgtctgcaaatacaggatgaccccgttgtcctccagccactgagacaggacatattttgccctctccacatcgtgagggatacaggcgccgcccgtatccagcagccgtccgatttcctcctgcatggttccggcggcgatctctcccatgcaggtgcgtacatgaccgaccgtcaggctgccgcccaccgccccaaaccgttccaaaagaatgacccgagcgccctgccgggccgccgccaccgcggcgcacaggccggcgggccccgctccggctatcacaacatcaccgctgtccagcagcggcaggctctgcacaaatgcctctgtcatataccgcgtctccttatgacagccggtgtgttttgtcatgccccggctggttattccacgaggccgctgcgttccacgccttccatgaaccagcgctggagcaggaaatagaggatgagcagcggcagcaccgaaataacggtgccggccatcaccacgccggcgtggtatttggtggcttcggcggaggcggtcaagtccccagtcgagctggcggtcaggcgggcgaacatatcgggcagtacctggggcagcagccattttttcggggtggtgaggaaaatggagggttcgtagtagtcgttccagtgccagacgatggacagcaccaggcagaccaggatggtggatcccgccgtgggcagggcgatgcggaagaaggtgacgaccgggcccgccccgtcgatatgggccgcctcctcgatggattttggaaagcggaggtaatattggcggaacaggaagatgaacaggccgccgttgaggccgaagccgaaaaaggcgggaacgatgaggggcaggtaggtatcaaggattttcacgttcagcagctgttccatggaggaatagatgatataccgggggataatcaggttctgggccgggatgatgatggacagcaccacgaaggcgaaaatccatttggtgaacccgtaggaataccggcccagaccgtacccgatgaaggcgcaggccaccacgtggcccagggtgcacagcagggtgacaatgaggctgttcaggccggtgaggggcacctccagggtctgaaaggccagggcgtaattgcccggcgacagcaccttcgggaaccatttgaccgtggcgtccacgatgtcgttatagctcatcagggaccgggagatcatgaacaggaacggatacaggaacacgaagcccagcacgatgagaaaaaagtacagtgccgccctgccggccagccacaggccgttcttgcgcagggtgtttttccaggttccccgggcggcgtacgccttgaaatccgtccaattcataggggccctccttgcagatggtggcatatccaagctcatcctttctccgccgtcggcaaacggcgcgcacagactgaggaagcggggcggttcagccctccctgacccgtttggtggcggggttcagcagcaggaacagggccgccagcaccaggatgacgaacagaaagtacaaccagctgaccgccgaggcatattcgaactgcgaccattggaagcccagctcgtggatatagcccagcatctcgttggaggtatccaggaagccggccacgatggtgtacaccgcgcccagcagcagggtgggcgccatcatgggcagggagatgaaccagaagcattcccactcggtggccgcatccacccgggccgcctcgtaaaaggagcgggggatcgcctgcaggccggcgaggaagatgatgatctgcacccccgatttccacaaaaccagggtgacacggctgagaaattcgagaatcacctgggtgacgccggggttcaaaaagcgcaccaccttttcgggcaggaggatgccccgggccacctccacggcgtcagcgttcatctgcacgcccagcagctgctgcatgacaaagccggtgcccaggatgaccggcaggaaaaagacggagcggaacagccccttgccccggatgtccttgctcagcagggtggcgatgaacagggcgaacaccacgatgaggggggtgttgatgagggtatccttggcgatgctgagcagcatggggaaaaagcgggcgtcctccatgaaggcgacccggaaattctcgaagcccgcgaagacaaccttctgggtggcgggattttcgatgacgccgaagctcaggcgcagggaataaaacagcgggtacaaaaagaacaccgccgcgcccaccagccagggcgatacgaacagcaggcaggtcagcacgccccgccgttgaaaggacacgcccctgcgtttcggtttttctctcatggcaatcccccactccgcttatggtcgttattgaatgatgattgatatagaggcggcggcctttggttgctttatccgggcagtacgcggtagctgcgggccgggacgggttcgccggctatccgcgcgtcctcgtccccggcgttcaccaggatccgggtgccgccgctgtaggtgcagacggccaggttttcccctgtccgttcatggccgcacagccgctggcccttcaggctttcccgcagggccgcccattcctggagcacggcggcggccgaaaccttctggtcggcgtagccggtggaaaacagggactcggcggcggtgtccgtcagcttttcgctgctttccccgctgagcaggaaatagggcgccgcgccgtattcgatccaagtcagcttggttttctgcaaatcgggcgacaggttgccggcggtctccagggcgtagggaatgctgccgttgaccaccaggtaatagaagggcaccgattcgcccagcagggcgtagcccgacccgccctccggcatttcggtgaggaaatcggcgtagggcagggcgtaggcgttagcccggggcagcaacagcggccccgcctgcccggccttatccatcagcgcccgcagggcctggagggtctcctgccgggtcatggcgcttccccggttatagtcctcatacagcagctccgccgccccggtgagcagcaggcccttgccggagaaggcgtcgaagcccgccagccgcttttccagcagccggtactgggtattggcgttgaggaggaaggcgctttcgtcctcgtttaccagggtgacgccccgcacgttgaccacggcgtcccgccgccgcttggcgccggttttctcggtgccgccgaagacgacgggcaattgcagtgccagggtaaccccgtcgggggacagggcttgcaggccccgtttgccgcccacgcccgcggcggcggacaggctgcccggcgacacgccgtagccctccttctgccagcccagcagggaggcggtcaggccgttcccggccgcccgcagctcttcgaggatcgtcccggcctcccgggcggtggtcatggtctgatagctggcgcccagcatgccgcttttctcggcccccatgagcagctccacataggcgccgccctctgtttccgcgctttcgggcagcaggccggcgtccagcaggtggccccgaatagccccggccatccaggagtagccggcgggctccccgccgctgaaaaagaacttgacagcgaagtcgttgccccgggaggcctcctccacgtggaaaacgtcgaagccggcgtcgtttttggtggaggtcacccggcggtagaccgcgcaggcgtagacccggtgaaggggatagacatagccgctgggggccagggtgatggcagcggaggcgtccccttcgcagatgacggcggcaaaggcggcctctccccgcttcatgccgaaggcggggagcatcaggttggggatacgcttggcccggttgtcctccaggtcgtccaggctgaggttccgcgggccgtaaacgtccagggtcagcggggtggtggagggcgggttcccctccccgaagcggtagagggcacccgcgccgtcgggatagagcacatagcccttgtccccctgccccgccgcgccgaagaagggcagcacgtccaggttgaccaggtggtacccctccccttcccgcacgccctccagcgggacgcggcagagcatcccggagtcgtccaggaagacctgcagggtcagggtcagctcataggcgggaaaggtgaaggccagctgcacgccgcctttcaggccgctttcctggacagtgcaggcgtccttgacgttatccacggtgagggtgttgccggtgttcgtatcggcaatgacggcggaaaacagggcgccgagggaatcggtattctccgtttgcagccccgtcaccgcagtctcccagcgggaggcggcggccttatcctccacggcgaaggcatgccgggcgctgttgtacagcagccgggcggcggcggtctcccccaccgtctgataggcgtcggcgccgtcgaaggcgcgggactgggcctgcggggcgtaggacgcgccccggtaggaggcgaaggcggccgggtcgtaggcgggggcgcggttcagccggttatccgcccagaccgcgccgacgccgagggcacacaccagcaggccgacgccgatttttttccatgttttcatacggttcctcccgttcagccgcccagcgcttctaattctttgagcatttccccgacgctggtgatcacgtgggcgctcaggctgacgaacagcatcagcagcgccgccgtcagggcgatggccaccagggtgagcagcagcaccagcacggttttccagaagccgtactggttgctccggctgacggccacgcagaccagcaggacgatccagaccaccagcagcgccacggccatgtggtaaaacaccgcttccgccgcgccgacggcccgggaaaccagggtcagaaccggcagcacgacaatggcgggggccagggaatacgacacgtccagcagcagctccttgcaggtgcattcccccagctgcagggaggtgaccaggtagcacagcagggagaaggccaacaccggcaccacgatgacccccatttccagcgcgaggctggtctgctggagggtggtgtccgccacggtgtaattggtccaggctatttgcgccacccgtaagaggcagacggcccccaccagcacgaaggcgggcagaacgcccagcctgcggcggacatgcttgatgcgctcgaaggcgcgcaccgggtggaccagggtgagaggaaagagcagcagggcggttttcaaccggccggggctgccgaaatacagggcggtctccgcccgggcggccagcttcacccccaggcgggccagcagcacgacggcgacgagggcggccgcgatgcccaggacggtgagcaggaaatactgctgggaaaagaggtagcgctccttctcaaaggccttgccgtatttctcctgggcccccgccaggcgatattcggtcatggcggcggcatagtccttctgcttatagaggatatcgccgatcttctcccgcaccagcggataagagggggccagggcgcgcacctcgtgcagcacgtccagcgcctgagcgtagtcgccggaggcgtacagctggctggcctcgtggaggcgggaggtgaagcgggtaggctcgagcacctggatgttctgctggccggcgtccagcacgtagagccgcccctccccgtccatggcgatggaggcgatgaggtcgaaatacccggcggttttgcccttgccgccgaagacggccagcaggttgccgtccatgtcgtactggtagatccgggagttgttttcctgggccactgtgacggtctggcgggcgtccacggcgatgtccgcgagaatcggctccaccggcaggccggtgtcggcgtcgatctcccgctcgccatagctgccggaggggaaaatgttattgccgatgctgttgatgacccggacgttgtccttgccgccggcgctgacggcgtaaatgcggccgtcctggtagtggatgttctggaaggagacgggctccggcttgcgcagccgctttttctgctcctcggtggcgaacatctgaatcaggcggttcttcaggctgaagcccagctgattggcggcgaaatagcccttgaactcgttgttcgcgttgagggtgagcagctccttgcccatgatggtgtacaggtagccggtgctggcgctgaacagcaccttggtgggggtatacaggtcgatggaggtgagatacccggtctccggcttgccgaaggcctcgataaaggttccgtccggggacagatggacgatgcgggcgttggaggaatcggcgatgaacaggtggcccagctcatccacgaacaccccttgaggcttggacaggggaagaccgccggcctcggtgatttcccgcttcacctcgccgctgggactgagcaccaggacgcggttgttgccggtatccgccaccaccaaatccccggagggggcgagaaacagatcctggggggcgttgaggctgcggccggtggaggcggtcaccgacagggtgcgcaccggcacgtagggccgcggaatgggccgcttctccccgtcgtccagcacgtagtcggtggtcacggcggcgctggccgcgacactcaagcaccacagaagcaggagaagcaggacggcggcccgtttacaaaatcgcatatggctcctcctatcccttgatgccggaaaaggtcatggtttcgatgacccgccgctgcatgatgacgaaaatgaggatggtgggcagcaccatcaggaaggtgcccaccgccgccgcgccggcccgggcgatgttgccgttttcggccagggaggtcagcaccaggggcagggtcttgcgggattcatcggtgatgaacaccaggggggaaaagtaatcgttccagttggagacgaaagacagcacgatgagggtggcccaggccggggtgagcatggggaacaccaacttgaagaaaatccgtaactccccgctgccgtcgatgcgggcggcctccagcagggagttggggatctggtcgcagaactgcttcatcaggaacaggttataggccaccgcgattttggggatgatgagggcccacagggtgttgatgaggcccagggcgttgacgatcatgtaattggggatctgggtggcgtggacgggaaagctcagagccatgataatgagggtgaacagggcgttgccgaagggcacccgctttttggcgaagccgtaggccgccagggcgcagacgaggatggtcagggccaccgagaccaccgtggtcagcaggctgttgaacagatatttgaggaaggggacggacgaagaatcgaaggcccccatcagattggcccagttatccatggtggggttcttaacgaagaaccggggcgggaacaggaacagctcctcatacggcttgaaggccgtcaccgccacgtagagaagcggcagggccataaacacggccagcaccgccatgccgagatacagcgcgattttccccggcgttaccaccagcatatgggcgcggcccagccggatgcgcagacctttctgcaccatgattcccacctcctttactctttttcccttagggcgtgcatgacgatgcggctgatggcgaaggtcagtacgaacagcaccaccgcgatggccgacgcgtaccccatctcgaagcggatgaacgcgaaatcgtaaagatgggagacgatggtgtccgccgcgtagttgggactgggcaccccggcgaagccggccgagatatcgaacacggcaaagctggcggtgatggcgttgatgcagccgaacagcagctgcggcttcatctggggcagggtgatgtacacgagctgctgcagccggccggacacgccgtccacggccgcggcctcgtagtattccgcgttgacattctgcagcccggccaggaacacgaggaagccgttgcccatgctcatccagatttggatgaggataatgacccccagcaggtaacgggcgtcctggttccagagaatgggggtattgatgaaccccagctggatgagcaagttattgaccaggccgtagcggttgggggaaaagatgtacagccagacggtggacatggcgatgccgctggtgatggagggggcgtaaaaggcgatggcaaacaggctgcgcagcttcatctggttgatgacccaggctaggataaaggaggccgccagccccaccggcccggcgataaaggcgaacagcagggtgttgcgcacgcagatctggaacacatcgtcatccaagaacagctgcttataattgtccagcccggcgaaggaggggggctggatgatgttgtagctggtgaagctgagcaccaccgagatgacgacgggcagcaggacgaacaccaggaacagcagcatgaagggcagcacgaacaggacgccctgccggtattcccggcgctgtcctttggtcagagatcgtggcatggcggtcatcctttcatcacgtacctagagccgggtctgcttgcgggcgagctctttgttgatctgctccaccgcttcctccagcgcggatcgcggcgggacgttctccaccacggcgcggttgatggcgttgaccaagtagcggttggtgtaatagctgccgcgcaccacgggggtttcccgcgcccagtcccaggcggaccggatggcggccttttcatcggtgttccagggaagcgcccaataggcctcggtgttggcgctcatccaccgcgcctgggatcccaggcggccctccacctgggtggtgtaggcgctctgggtatccgtggaggtccaccaatccagcagggaccaggcggcctccggctccccgcaggaggcgaggatacaggcggcatcgacggacaggccgctgttggcccgggtgacgctgccgtcggcctgcttgtggccgggcacggggtagaccttccagttgccggcgatttccggggccgcgtagctgaactggagataggcgttgtggttctcgatgccgatgggcatctccccggtgcggaagcggctgaagaaatcggtggagatgggcaggccgttatcggtgaagagctggcatagctcggtgaaggcggaaaaggcggcgggggtgtccagggcgctgcgcaggccgtcggcggtgtagtagcttccccccagctgatagaggaaaatgtccaggatggtgggcacgtacatctgcatgctgttctggctcagggcgggcagcacccgattatacacatcgtcccaggtgtcgggcacggggatgcccagggaggtgaaaatgtcggtgcggatatacatggcgcggaaggacatggtttcgggcagggcgtaggccccgccctcgaaggcgtagggcaccagcatctcgggcaggaaacgccccgccgcctcctgatagccggagaaggccgacaggtcgagcagcgcgccccgcatggcgtattccaccggcaggttgtaggtcaggcccatgaccacgtcgggacccttgcccgcgccgatggccagcagcagagggttgaccgaggtggtcacgctgccggagggcaggatgttgacgttgaccggcacgccggtttccggggtgaaatccgcgtcgatgcgctccttgaggatctggccccattccttgccccggctgacccagagctccaggggcttgccggaatacgcgccggtttcgccggcggccacggcgttatagtccttttggaaggcggccaggaagttttgcagggtgacgctgattttctgccagatggtggcgtgggggttggcggcccgctcgccggggggcaggatttcgatatagtccagcgccagcggcatctcctgcagggaggtggcgtaggtactgagattggtcaggttgttgctgacgtccggcagggacaggggaattttcgagggcttgtcgataagctcctgcagctccagggcgatgcgctccagattgttggtcatggcggaggccttgcttgaggaagccagcaggcgctcccggcaggcttccacctgctgccggatggcggtcaggcggggaatcagatcggggatttccagatccagctggtagtcgtagttggcgtccggattctgcccggtgacgcgggtgatgtcgaacagcacggcgttgagctgcttggcggcgtcgagcaggctctccaccgcctgggttacggtttcgcccagggtgacggtcagggacagggtgttgcgccccttttgcagggcgaagagatagggctccccctccccgtcgcagagggtgaccgagttccaccgcttgtcgtagggcagctcgtaggcgagcatctcctcgaagggcaccgcgccgttgattttcaccgtgcggtagacgggcaggccgtcgctgtagctttgcagcgcccgcaggttgatggcgtacagccccgcctcggggacctcgaactcccagcagacctcctgcccgcccttgcggaaggaatagccgcccagaatgttcaggcggatattggcggcggaaaagggggtgagcaggggatcgccgtcgctgccgatggagacggtggcgtcgctgcggtaggcgatatggcggcgatcctcggcctcgaagcgcagggactgcgtccccgccgggagggtataggcgcctcgcgcctcgctgtaagaggggatcgcctggtaggagacaaccgccacttcctcgacgatgaggggctggttgatatatcgcagggtgatggtgttttggccctgttcgaagggaaagagcaggggctccgcgtccttgccccactggtcggtcaggcgcttgacgctgcgaatgttcagctccttctgatcggggcgcacgtcgtcccccaggcggttgcgcacggggtcggcggcgtcctgccatttccgctcgaaggcgaggacgctttcctcggtataggtctgcttgccgttgatgagaatctcccgctggggggatacggcggtgcccggctcggtgcggtaggccacttcgatgtgataggccccggccgcgggcacctccaccgtccaggtcagggaggccgtgctttcatcggtatagacaccgcccgtttcgcttatggcgggcttctccccttcccaggcggtatagccctcccccgcggcggcggcgcgcacgccggcggggcggacggtatagccgcccttgacctgggagtaatagggcagcgtatcctccgtgacgccgccggcgctgtccgtccccacccggtcggccagggtctggccctccgccgcggccgacagggcgaagccccggcccagcaggcaggccgccagcagcagggcggcggcttttcgatatgcagtaaagcccatagagctgtccctcctatgcgatggtgttcccggcttgaccaagcggccggatacaggcccccggccgcttggtcaagccgggagaggcgcgtgtcctctcccggcgcggcacctatttgtccgcttgcgtttgtttccgttttctcaccagcaccacggccaggacggccgcggcgatcaccaggacagcgcccgccgccacgaggatccacacccacacgggggtggaggcctccggcgactggccggcctggctgctggccggcggggtcggattatcagccggctggctgagctcgttgcgcacggtgtagcgcacctcttcgccgtccgccttggtggcgatcagggtgaagccgtcggccaccaccgcgccgccggcgcagggggcgccggacgtatcggccaggctgagggtgacgccgtccgggacgttgaaggcgctgaagaaccgggtggcggccatgttctgccgcacggtgacgctgccctcccccagctccacgagagcctgcgcgctgcgcttgaccgtcagcagggcgtcctccccttccccaccgccggcgtcaggctcgctctcctccccggcgggatcgtcctcaaagaggacgtcaaccaccacgcggtcgacggtgactgtcttgtccgggacggcgggcttgcccggctgcaccagggttttctggtcatccggcacatccttggttactaccgcgccgggaatccgggcgacaatggtctccccgcgcagcacggccagcaggaaggtgggcgccagcgtatccccgggcttcaccggctgttcgccggcgtccagcagacgaagggagacatcccccgaaaccgtcagcagggcctggagcttctcataggtcatggcgggatcgtacacccgcagggcgtcgccggtcagggtcacgaactcgctgcccgcgccggtggccgacacctggaaatccctcgggtcgcagggcgcgcccaccatggtttccagctgatcctggctggcgtaaaagcttaggttgtcaagtgtgaaaacgacatcgccctgctcggcattattcggctccgccgcgatggtgacgcgggtgacgccgtcgggatccaccttcaggttatccggtacgctgccggcagcgggcaggaaggtctcgaaggggaaatagacgaccccttcgaacccggcgggcaggcggatcgcgtcccgggagaccttatacagccggccgcccgttggggcgtagtagtaatccccctcgtagctgtcgaactcgtagagctccaccgcgtcggggttggtctcgtcgacgaggccaatggtgaaatcgagacccgccacggcctcatccgcccggatgtagaacagcaggccggcggttcccttcagccgggagtccccggcgcggaagttcttcagcgccacccggaacgccttctgacccgccacgagcaggccggcgccgtccggggtatcggcggtgggcgacaccgccgcgccgaagccgccgaaggtggtggcgcccgtatccagcatgttgttgaccaggtaccagccgagatcgtcggtgccgaagttgaaatacacgtcgtcgctgggcttatcctgcgcgacgaagccgcacagggccgcgtactcctccgggtcggaatagaagccgaaattgtcgtagaggtaatccacgttggcatcggcctcgttgggcttgtaatacccgatttcgatggaccaatcctcccaggagttgagcaggtcaaaatccacctggcccgggctgccggcgtacagggcctcgtaggggatgaacacaaagccctcgaagccctgcatatcctcgaagggcaggaactggctgaccgacttcttctcccccatcaccgacagggtggtcagggtcacgctggtgccgatctcaaaccactgggaccagtcgtccttgatcaggcggatgctcaggttggtggccatggccgtggtgggaaatttgatgtacacggccaggcccttggtcttgctgaaatcaaagccctccggcttatggacggggatggccgcgaggttgccgctgtaggttttcttgggatagatggacagcgcgtcgccgaactgggtggcgtcctcccgcacctccacggcgatatccttgtcgggctcggtggtggatccgccggtgatgcgcacgccgtccatggtgccggtattggccacaaagttggggtgacgggcgtccatggccgcgacgtaggcgtccacatcggtgtagaagccgaagctgtagaagatatagtcggggccgatctcgtcggcgttgcgcttgtaatacccgatctcgatggaccagtcggtccagtcgttgagggcggcggtgtctaccgtggggctgctgccggcatacagcgcctcataggggatgaacacatagccctcgtagccctggaggttctcgaagggcagggtctgccccttctcggttttgaccccgtttttgtccacgagggtcaccgtgatgccggtgcccacctcataccaggcgctccagtcgttcttgatcaggcggatggtcaggttggtggcggtcacgccttcggggaagcggacataggtcacgacccctttggtgccccggaagtcgaagccctccggcttgttgaccgccacggcggcccagccgcccccctccaccttggtggggttgatggccacgcccttgccgtacttggagacggccgcggcctgtttgacggcgatatcctccccgtggccgacggtgatgccggcgggatcgccggcgttggcgacccattcgccgccctcgaagcccggatcgtccggctcctcgtccggatgctccaccacccggcccgccgcggcgatatagccctcgatatcggtataaaggccgatgttgtcatacaggtagttggggccgatttcgtcctcgttgcgtttgtagtagccgatttcgatgttccagcccgcggcctgcatatgctcggtgatggcgcggccgggggtgctgccggcggtcagggattcataggggatgaacacgaagccctcgaagccctgcatatcggcaaagggcggggcctgcgttttcgtttccaccgtcccatccagggagacgtaggtcagctccgcgctgtcccccacctctgcccaggtggtccagccgtcgtcaatgaggcggatcatgaaattggtctgggtgacgtccggaattttcacatacatggcgataccggacagggcggagaaatccacgcccgcggcaccggccagggacagggcggccc

SEQ ID NO: 2419 - DNA, 32759 bp, Unknown
  16S sequences of unknown bacteria
aaggggagctagagatgataacagcggaagaaaaagaacggtattcccgtcagcttctgatcccggaatggggagaggaagcccaggaaaaattaaaagcggcaaaagtgctgataatcggagccgggggcctggggtccccggcctccctgtatttgacagcaggaggagtgggaaccatcggaatcgtggatggagatgcagtggaccgctccaaccttcagcgtcagattctccacgggacggggaatctgggacagctcaaggtggaatccgccgcggagacccttcgggatttgaatcccaatgtggagatcattcccattcaccggatggtcaccagggagaacatcggagagttgattgaagactatgattttattctggatgccacggacaattaccataccaaattcctgattaacgacggctgtgtggagaagggaaaaccctacagccatgcgggaattctgggactgaacggacaactgatgacttacgtaccgggaaaaggaccttgctaccggtgtatttttggggaagaaccgaaaccgggagaagcgccgacggcgaaagaagggggcgttatcggacccattgccggaatcgtgggatcttttcaggcggtcgaagcgatgaaatacatcaccggagtgggacgactcctcaccggaaaaatgctcaccttcgatcttctgaccggacgcattcgggaagttcctttgccggatgccaatccggaatgcacggcttgcggaagccggcggaaaggatagagattatgtttaaagaccctaaatgttatgtggaatacgttccggggaagagctttaaggaggcttttgccaacgaccgaattccccttctgtccatgcaccggcttcggggaatggattaccggattacccggaagatttcttatgaacggacggtgaacgactttctgctggtgctgaatgtaaatgattccatgcgttcccttcggaatcggcaggatatggtggtcctgctgaacgagcagggagccttgattcgggaggacggacagtggaccctgtattttacgccggacgaatttgaacgttctaccctgtcggatgaggactccttgattccggttctggcgattttggaagaaaaatgggcctccggaaagctggcacgctgccggattccgaaccgcagtttgaaaaccctggtggccaacaccgcgccgttctccattctggatgaatactgcaaatcccagccgggacagtatctggctgtggcgaaacagattgtcaccgacggacccgatgaactgctgcaccgcgttccggtatgccggtacaaaaatctcaccaccgtggatgtgcgggaaatcgagaattacaacaccgtcaagatgttgctggacgattatgcggaacagtgcgaggcggcggatctgggcgagtgcatccagcctttatccatcgccgttttcggctatccgggctccggcaaatccttcggcgtgaagcagattgcggaaaccagcggaaattttgcggtgtatgccatcaacctgtctcagattgaaaagccggccgccctctttgaggcgctggacgaagcgctgtccaacgcggagggcagcatcccgctggtgttcttcgacgaattcgattccgaccgggagggaatcaaccgaggctggctccggtacttcctggcaccgatgcaggacggagaatactccctgtggggcaaaaccaagaaaatcaacaaggcggtattcgtctttgccggcggaaccgcgcattccttcaatgattttctgccgggggacgatgaagagcgaattgcggagttccagcgggtaaagggcccggatttcgtcagccgcctgaagggcatcctgaatatccgaggcctgaatccggattgtaagacggaccgcagccatatcatccgccgggcgatgctccttcgccagcagattattcgccggattccttcggtgtacgatgaggagaccggaaaggtaaacatttccaacggacttctttccgcactccttcgggtatcggaataccgtcacggagcccgctccttggaattcattctggccatgtgccggctgtctcacgtgagccgatttacgccgtccaacctgcccatgaacacccagctggatatccatctgaacgtggcggatttcgaaagaaagctcaccttcgagcagatcctggggagcatggtggagaaatacgccttcatttcccacgaagaatatcgaaagcgccgacttcgggaggtgtccatgaagttggcaaatgaaagcgataacctgaatccgaaagcgctggaccgcatctgggaagaagaggaaatggcggactgggaagacctggacgagttcttcaaggaaggctaccgttcccgcattcgctttctgggagagcatctggtgcagttcgatgcggtgctgggcatccggccgattgtgccgaacgctgtggacaccattcgggaactgtacggtccggacctggagctgctgtcggaaatcgaacatcgacgctgggtaaaggacaagttggaggacggctggaccgccggggtgaaagattccgagctgaagcattcgccggagctggttccgtacgacgaactgccggaaagcaccaaagccttcatccgaaaagaaatccgtgaagtcccaaaactcctgaaatccgtaggatacgagctttaccgaaaatcctattaaatctcataaaaaaagacgccatgccgaatccttgggtgtggcgtctttctccttttctattctatcctattcttccggtggtccgaaatgcaccggctcttccggctgcagcggcgccaaataattgtttttctgaagttcctcctggatgacatccagaatctcctcgctgtctgccattacggtatggtagtggtagccggaggtggagcgggaaagcaatctgcttttacccccgtgcatctccgccatgtaatgggagacgtccagacgggagcggatgttcagttcaccgcgaaccacgccgtacacccggtggtagataaaaacatctttgatggtgccgcccagatccacaattcgggtgagttcgtcttccacttcctcttccgtgtggatgaccttaaagacgcgagtcgcccggccggtgcttcgctccaataggtagccccgattggtgggggtgatatgaatgccttgtgcccgaagcagggcgatgtcctgcacgatgacctgccggctgactccgaaggttttggccagggcgctgccggagatggcacggccgctgttctgcaatttctgaagtatttcggatcgtcgaatttcgccgttcatgaggcgcctccttttcaagttctgtcgggttctttgtttctattatacaccatcgaggcttgttcgtgggactttacaaagatttgatgtttgatttacatctcgctgatagttgtaaaacccatcctccgctacaataaccgtagaagaacaggaggatagaaaaatgaacgagactttacagacattattcggtctgctgggaggactggcgattttcctttacggaatgaataaaatgagcgatgcccttcagaaggcggccggagataagatgaagcggattctgggattcctgaccaaaaatccggtaatgggtgttttggccggcgcactggtaacggcagtgctccagagcagttccgccaccaccgttatgattatcggattcgtcagtgccgggctgattagcatgccccaggcgatttccgtgattttcggtgccaacatcggtaccacaatgacagcacagttgctggcgtttaagctcagcgactacatctacccgattattttcatcggttttatcatgtacttcatctcgaagaaagacaaaatcaaacaaatcggcatggtgatcttctccttcgggttgctgttcgaaggaattgaaatcatgggcagcgtgatgaagccgctggcaaccagcgatgtgttcatccagctgatgggtcaggtaaaggatatgccgattctgggcgtcgccctgggaaccgtgatgaccctggtggtacagagcagttccgctaccatcgcggtgcttcagaactttgccagccaggcgggaccggacggtgtcaccagcatcatcggattggccggtgcaattccgattctcctgggagacaatattggcaccaccatcaccgcagtcctggcatctatcggacagtcccgcgacgccaagagagttgcggcggcgcactgtacctttaacataacgggagctgcagtggcgttctgtatccttccgtactttgcaaaagtcgtacagtacatttccaccaaaggtccggaggtgtccgtcatctccagacagattgccaatgcacacacgctgttcaacgtaacggtaaccctgatctggctgccgctgatcccgctgatggttcgttgggtcagctggctgattaaaggagatcggaaaccggcagagagcctgggagagccgaaatttctggaccgccacgtgctgacgcagccgtccgctgcactgtatctggtgtcccgggaaatcggaaacgttgccaacctggtggtggacatgctgcagtccgcaaaggatatcgtgaagaaatcgacgtccacggaagaacagacccagctgcaggatttgtctgccggcattcgcgaacttcatcagaaggtttccgaatacatcgtacagctctatgaagagagtaaaatgaatgacacgcagtccgagcaggcggccggacttctgggagttgttaccacgctgaagagaatggcgattcgaagcaacgaaattctgtcgcagattcacagtatcatgaacagcggacgaaacctttccggcatcgccagaggggaattggtggaatgcttcgaggaaattcagcaattctttacactggccatggatgcggtagcatatgacacgccgatttccatggagcagattaacaaatcgaaagcacagctccgccgctcgcagaagagctttcgaaaggcgcacctgaagagagtgcagaacggagaatgcgatgcgggactgacagatgatttcaacgatattatctacaatatggaacgtttggtggacgattgcgtggaaattgccaccgaagcgcaggataatgtgcatttcgtacagcgttcccaggtcggcgtgattctgccggatacggtggaatcggaagaagggttgccggagggaccggcaggcgcagatttcagcagtgtaaacgggtaaattatcggattcggttcctgtagttctatcctgtaagctgaaccggtagtttaatacattcatagaggaaatgcaccattttgtggcatttccttttttttatgaaaaaaatatgttactatagaacaaaatgtgtatgatttaatgaaagaaaggggaaaacgacccatggcggagaagatggcaagggcatatgagggcgcggagacttacattccggtgctggacgattgcagcgatgaggagatgaatctggaagtggagcaggtcgtggacggaattctgaaggattaccaaaagggccgggatatcgacaatctcaagttcttcgaacagccggaccgagatcagattgtggtgattctggatgaacttctggcagtgctgttcccgggatattatcgggagaaggtataccatacggtgcacacggagaccaagatttccgtgattattgaagacgtgatgtatcgtttgcggaagcagattgagctggcacttctgtatgatgaacggtatgcggatgtggatcgggcgcagcggaaaaaggcggcaaaaaaaatcacgctggagttcttccggcggcttccggaaatccgggaatatctggatacggatatcgaggcgacctttgaaggcgacccggcagccaacagcaaacacgaaattgttttatcgtacccgggaattctggcgacggcaatctatcgattggcccacggcttgcagcgcttgaatgtgccgctgattcctcgtatgatgacggaatactcccatacccagacgggggtggatatccatccgggagcaaagatcggaaagtatttctgcatcgaccatgccaccggcgttgttgtgggatccacttcggtgatcggggaacacgtgaagatctatcagggcgtgaccattggcgctctgtccacgaaggacggtcagaagatgcacggaaccaagcgacacccaacgatcgaggattatgtaaccctgtactccggcgcttcggtgctgggcggtcgtaccgtaatcggcgagggggcggtcatcggcggcaacgcattcgtgacgaagtccgtggatccgcacaccaccgttaccattaaaacccatgagctggtggtggaccgaaagagccacaagaagaccgacgagaaagaattggaacaggacgacagcttaatttagagcgtgcatggaaatatatacagcagatttgcttgaaattgaagtataatggctgttatgtatcaccgctgagagaagaaaggggaattaatgaataattcaaaagctgatatttccaatatttacaacttgaacggaagagttccgctgggaaaagcggttcccttcggactgcagcacatcctggcgatgttcgtcgcgaatatcgcaccgctgatcatcgtggcaaacgcctgccacctggggtccggtgaaacggccaagctgattcagaccaccatggtgattgccggaatcggtacgttgattcagctgttcccgatatggaaggtgggctcgggattgccgattgtaatgggcatcagctttacgttcgtgtccgtagcctgcaccgttggcgcccagtatggctacaacgccatcgtcggcgcggtaatcgtcggcggctttatcgaggggaccatcggtctcttcgcgaaatactggaccaaactcatcacgccgattgtttcggccagcgtcgtaacggccatcggattttctttgttgtctgtcggtgcctcttccttcggcggcggcagcggaaacgagcggttcggttcggctcagaactggattctgggaacggcaacactgctgagctgcctgctcttcgatatgctggcgaaatcctactggaaacagctgtccgtacttttcggattgatcgtgggttatatcctcgctgtattcatgggggcggtggatttctccgcactgcatgacaccgcagcggtaagccttccgtccatcatgccgttcaaaccggtgttcaaagccagtgccatcgtgtccatgacattgattttcctggtatccgccacggagaccatcggcgatacctccgcgcttacaatctccggattgaaccggccggtaacggtaaaggaaaccgaaggctctatcgcctgtgacggatatgccagcatgctgtccggtatcctgggatgccttccggtcacttccttcagccagaacgtgggactgattgccatgaccaaagtcgtgaaccgaatggtcatcggagtaggagcctgcatcatgatcctggcaggaatatttccgttcttcggagctgtgctggcgacccttccggatgcggtactaggcggctgcaccatcatgatgttcggcagcatcgtcgtaagcggaatgaaaatgattgcggcatgcggtttcgaacagcggaacatcaccattgcggcactgtctctgggaatcggaatcggtttcacccaggttccggaaatcttcagcgtgttcccgccaatcatctacaccgtatttgcggaaaactgcgttgcggtcgtattcatcgtggcgatagtggcaaacctgattctgccgaaggacagcgaagcggcgaaggaggaatagttcgaataagaaaaacaaaaattctgtgcaagcatctctcgaggcgcctgcacagaatttttttcattaatcctcttgctttttctgatgtattagtgctataatgtaaaactgaataattttaggtacatattttccgtaaacggaaaaaagagtaaggaaaaaggatggataagacggaattttacaatgttctggatatttcagatccggaagaatttacctattacgagaacatggcctccctgctggaggaggatcagaccatagagcagaacctgattgacgatttgcttcgggaggtggatttcacccgttttcgggatttggcgaaatcctattttgaagaattcctcaaccgggtaccggacgaggagacggacctctactttctagcagataccatgcgccgctcggtggtgggatgcgaagatccggaaagcctggcggatgccatttaccggttccggaagtggtacatcgtggagccttcggtcatcgatcgaaataccggagaggaaatttgcgttcgggatgcacggtacaatatcagtgcagcagcgttcctgggagagaaaccggaatacgatttccacaaggcctacaactacgagattgacggctacgatgtctccgtacaggatatggtagagggaacagagatatagaaaggaatcatctgatgaagttaagaattatttccgagagcggaaacgttccggcgtatgccacagagggtgcttccgggatggacctaaaagcctatcttcaggaacccatggtgcttcagccgatggaacgtcgcctggtacccaccggaatctatgtggaaattccgcagggttatgaagggcaggtgcgggccagatccgggctggcgatcaagaagggcatcggtctggtgaacggaatcggcaccatcgattccgactaccggggagaactgaaggtgccgctgattaactgggggtcggaaccgtttgaaattcagaacggagaccgaattgctcagctggtaatcgcaaaatacgagcgagtggaagtggaagtgaccaccgagcttcaggataccgttcgcggcgaaggcggtttcggtcacacaggaatcaagggctaggattacaatgaattaccgggaagatatcgagaaacgggaatatgaaatactggatgcacgggcggcgaaagcggcggaatctcgggggcggcagatgccggaagcgccttgccgttaccggacagattttcagcgggaccgggatcgaatcattcattccaaagcgttccggagactggtgcacaagacgcaggtgtttttggcgccggagggagatcactatcgaacgcggctgactcacacattggaagttgcgcaggtatctcggacgattgcccggattctgaactataatgaggacctgacggaggccattgccctggggcatgacctgggacatacgcccttcggtcacaacggagaggcgattctggaccgaatctatcccgctgggttcaagcaccgtgagcagagccttcgggtggtggaccgattggaatcctccgccaagcgtcggggactgaatcttaccgcagaggttcgggacggcatcctgaatcacagcggaccgaatcttccttttaccatggagggtcagattgtgcgcttcagcgatcgaatcgcttatatcaatcacgatattgacgatgccattcgaagcggcatcatttccgagaaggaccttccggagaagaacatccgggtgctggggcgaacccattcgaatcgaatcaacaatctgatcgacaacctggtacacgccagtgccgatcaagaccgcattcagctcagcccgtcttttcaggaggcgttggatgaacttcgggaattcatgtttcgaaatgtttatgacagcgctcgggtaaaaagagcggaggacatgaacaaggtggagatggtgattcgtcagctgtatgattatttctgcagtaatccggaccgcatgccggacctgtaccgggaaattgccggagaagacgggaggtcagaagcggtaaaggattacatttccgggatgacggatcgatacgcgatttcgctgtattcggatctgttcgtaccgaaagcctggacggattacaagggatagccggaggatgtaggaggcaaggatggcatttgacaataattttattgacgaattgaaaaccagggtcaacattgtggatgtcatcggccgagaagtctcgctgaaaaaagcgggaagcagctataagggcctgtgcccgtttcacagtgagaaaacgccttcctttaacgtgaatgaggagcggcagttctaccactgtttcggatgcggagagaaaggggatgtaatccattttgtggagcgctactataacctgtctttcgtggaggcggtggagaagctgtgcgaggattacggaatccggatgccggagcagaagcgggggcatcgcacggattacaacaagtattatgaaatcaaccggaaagcggctcgattcttcttccggaaattgacggaaggacccaatccggggtatgcctatcttcggaaacggggactgaaggacaataccatcgggaaattcggactgggatatgcgccggacagttggaatgccctgatgaaccacttggaaaaagaaggtgtgaccacccaggacatgctgaagctggggttgatccagcagggccggaaggggtattacgacaaatttcgaaatcgggtgattttcccaattatcaacacggcggggaaggtgatcgggttcggcggcagagcgctgggagacgtgcagccgaagtacctcaactcttccgaaagcgatattttcttaaagaaaaacaacctctatgccctgaacatcacgaagaaggatatctcttcggaagatcaggtgctgatggtggaaggatatatggatgtgatttccctgtatcagaatgggattcacaacgtgaccgcttctctggggaccgcgctgacggagaaccagggacggttggttagccggtatacgaaaaacgtggtgctgtcctacgatgcggataatgccggaataaacgcggcgatgcgaggaatcgatatcatccgcaaagcggagtgcgatgtccgaattctgcagatcaacgatggcaaggatccggatgagtttgtccgcaagaatgggaaggaagcgtttctggaactgattcgaaatgcggttcccgcaacggatttccggctttccgtcttgagacggggattcgatttcaaatcggacaaccaggtgctggaatacatccgacgctgcgttccggtgctggaacagctgagcccggtggagcaagatatctacattcgaaagctttccgaggagttcggaatttccgagtatgcgattgccggcgaaattcgggcggacagcggaaaacaggccgcccgggtaccgcagtaccgcaaccggcgagagcgcagtcaaggaagcagtaccgaaatacggatggactttacctttctggtgttggccatggcgaatcggtattatgtaaaaagaatggaagcggacggcatacgcttccgcaccgcagtgggaagtcggattttccaagcggtgaagaatctggccggggaagagtacccaccgggagtgatgggcgtggacgtgcagagagtgtacaacgccttggatccggaggatgaagtgcttctccgaaatgcagtcaagaacattcggcttgggccggatgatgaaatattttataacgaatgtctggcatcttatcagaagatttactttcgggagcgaagggccgaacttcagaacgagctggcgacggctcagaagatgggtaatgaagaagatatgacccgaatagcgaaggaactgatggagctggatgcacaaatgcagagcagaaagatgaggggtaattaatggcaaaagtatccgcacgcacaattgaagaacatgtgaatgcaatgattactcagggaaagaagaacggaaacgtgctttctcttactgaagtgggggactacctttcgaaattaaacatcagcaaggaggaaatcgatgaaatctacgatcgggtagaaaagaatgggatttctctggtggattcccgtgaaccgaattccgaagagctggcagacgaagaaggcgatgatgacggcgtcgttcttaccaaaaccggtgaaatcgacgtagaagccaccgttccgaaaacccttccgacggacgatccggttcgtatgtatttgaaggaaatcggaaaggtatccctgttgacggcagatgaagagcgggaattggcgattcgtatggagcagggcgatgaagaagcgaagaaaaagctatgtgaaagcaacctgcgtctggtagtcagcatcgcaaagagatatctgaatcgtggactgtctttcctggatctgattcaggaaggaaacctgggtctgattaaggcggtcgacaagttcgattacacaaagggatataaattctccacctatgcaacctggtggattcgtcaggcaatcacccgatccatcgcggatcaggcgagaaccattcgtattccggtgcacatggtggaaaccattaacaaactgattcgaatttctcgtcagctgcttcaggagtacggccgtgaaccgacttcggaagaaatcgcaaaggaaatgggaatcaccgtagagaaggttcgggagatcaagaagatttctcaggatccggtatctctggaaaccccaatcggcgaggaggaagacagccatctgggagactttattccggatgatgatgtaccggcaccggtagatgcagcggcatactccatgctgaaggaacagctgatggaagtgctggacaccctttcggatcgggaaaagaaggtattgatgcttcgtttcggactggaagacggcagacctcggacgctggaagaagtcggaaaagaattcaacgttactcgagagagaattcgtcagattgaggcgaaggctcttcgcaagctgagacacccgagccgcagcaaaaagctgaaggattatctggagtaagcgatgagaatcagtaaaagacttgaggcactgtatgaggcagtgaatccgggagagtcggtggcagatatcgggacggaccacggttacgtcccgattcttttgcttcaaaacggcatctcggaaaaggtgattttgagcgatatcagcaccggctccctggcaaaggcagaggagaatttccggcagattggaattgagattccggagacctgcttccgtatcggggacggtctttcctccatccagcccggagaagtggatgcgttgattatcggcggcctgggcggacgaaccatccgtcaaattttggcggacgacccggagaaaacggcgacttatcgcaaattgattttacagccccgaaacaacagcggcgaattgcgatactatttgtatcagcagggctatgatatccggcgggagattctggcgccggaagggaaattcgtgtgtgaggtcatcgtagcggtaaaaacaaccgaggagaagagaacgccgccgtacgatgcgcaggacattagatggaagtatccagagagtatgatttcctgcgatccggagctgctggggcagcgcatcggctggctgtcggggcggcttttggagcaggtggagagcctgcggaagagcaaggatgttccgcaggagcgaatccggaaactgctggagcagcgggactacatattggaattagagaaaagaaacaagcaatatcacgaggaacattatggagagaaaactcagtgcaattaatatcgcaatgatgtatctgggggcgattctgggtgcaggatttgcctccgggcgggagtgctggcagttttttggagtgttcgggagaaaggggtatttcggtgctgtttttaccacggtggttttcgtggtactggctctgatgctcacttacattgcgcgaagtaaaaataccatggacctgggaaagctgatttcgccttttgataattatgcgttggaatcggccatcggatatattcttgcgggaatctattatacgttaatcatatccatgagcgcggcaggggggtcgctcctgcatcaggagctgggaatcgaccggcgaatcggcggaattctattggtagtgctggtgttgctgacggtgttcggcgattttgagcggctgacccgagcctttggatttctggtgcccggagtgttcgtcatcggcatcgtaacgatttccacgataattgtatcgggaaaatttcatcagagcggcgcagtatccggatttccggccagtgagatggcaccgtattggtggatttccggaattgtttttgcggcgtacaacagcttgggatttattaccatggcgggaggctgtgcgcttcaggcaaaggattctaaaaccgcttatcgaggggctttcttgggctcctttctgccgggactgatgacggtcttgctgttggtggctcttcgaaaggatatggccttttccgccacactggatcttcccatgctgggatattcgctgcggatttccaaggtgctgaatattctgtatgccctgattctctacgggtccatctattccaccgcggcgggaaccttctacggcttcagcacgaagcttccccgcaatcgattcaagaaaccgattatggtggcggccgcttttgcgggattcggcatcggattgtccggatttaaaacgctggtggcatacctgtatccgccgcagggatacatcggtatcattttcattggaatgattgttatgaacttttttaaagaaaaaagtaaatcttcacagaaacttcatgtttaaaagcagaaaaaatgtaaaaatataacaatgcatgggtaaacctgacgatcgcgcacttcggtgtgaggaaagtccgggctccgcagggcaaggatgccggataacgtccggcgtaggtaactatagggaaagtgcaacagaaacattccgccgaaacgggtaatgccgtggtaaggttgaaatggtgaggtaagagctcaccggcgttctggagacaggacggccgtgtaaaccccatccggagcaagactaagaacgggtcgtagagtgcagttgcccgctgccgccctaaggtaagtcgctggatgctgcaagcaattgcagtacaagatggatgatcgtctaatacagaacccggcttacggtttgcccatgtatgtttttttctgtaagataggaggaggggcacgatgcagaaatgcatcgttcttatttttaagtatgagactaggaattgatgtaggttcaacgacggtaaaactgttgattctcgatgagaacaacaagattatgtattctcgatacgaacggcacatgtccaacgtgttcgagaaagtgggggaattgctgcagcagcttctggctgaaaagggcgatatggaagtggaggcggtgattaccggttccggcggattgtcgctggcaaagctgttcggcattcgctttgaacaggaagtaatcgcctgcagtgaagcggtgcagaccctgattccggagacggatgtggccatcgaattgggcggcgaagatgcaaagattacattctacggatctaccgtagagcagagaatgaacggaacctgtgccggcggcacgggtgcttttattgaccaaatggcggtgcttctgaacacggatgcatcgggattgaacgaggcggcgaaggattacgaaaccatctatccgattgcctcccgctgcggtgttttcgccaagacggacattcagccgctgattaacgatggcgccaaaaccgcagatattgcggcgtccatcttccaggcggtggtgaatcagatgatcagcggcttggcctgcggtcatccgattaagggcaatgtggcgttcttgggtggcccgctgcagttcctttcggagttgcggaagcgcttcgtggaaacactgaatctcacggaagacgaggtgattttcccggaaaatgccaactacttcgtggccatcggcgcggccttgctggcgaaggaaaaggatcgggtcaccttatccgatttgatttacaagattgagcatgcggatgccacgcagatgaacggaacaaagcgactggaaccccttttccgggatgaagaagagtatctggagtttcaggcgcgccatgcgaaagccaaggtaaaaagaggtgatattcaggcggcagagggtccggtgttcctgggcatcgatgccggttcgacaactaccaaggcggcggtcatcaatcgggacaaggaattgattttcgaacactaccagaataacgagggagacccgctggcagtggttcggaatattttgctggaaatgtaccgggcactcccggaaaaagcatatatcggccgggcggtggttaccggctacggagaaggtctgattcgggcggcatataaaatcgatgccggtgaaatcgagactatggcgcactacaaaggcgcggaacagttcctgccgggagttacgtttattctggatatcggcggccaggacatgaagtgcatgaatatcaaggacggggctatcagcaatatcatgctgaacgaggcgtgctccgccggctgcggctcgtttatcgagacctatgccaagtccgtggaccttcaggtgccggaatttgcccaccgtgcgctaacggcggaaaacccggtggacctgggtacgcggtgtactgtttttatgaactccaaggtaaagcaggcccagaaagagggagccaccatcgcggatatttccgccggcctgtccctctccgtcatcaaaaacgcgctgtacaaggttatcaaacttcggaacccaaaggagaccggggacaaagtggtggtgcagggcggcacctttatgaacgaggcggtgcttcgaagcatcgagctgattctgggaaagaacgtggttcggtcggatatcgcggggctgatgggtgccttcggtgcggcgatcatcgcgtgcgacaactacacggaaggtgaacactccacggttctaacgccggatcaaatcgattcctttgaggtaaaaacaagcaacggccgatgcgggggctgcggcaacaactgcattctcacgatttcccgtttttccgacggcagccgatatattaccggtaaccgctgtgagcggggtgcgggattggccagtgccaagaacgatattccgaacctgtacaagacgaagctggatttgctcttcgaccgtccggcagcggaaccggatcgggcgccgaagggcgtgatcggaattccgcgtgtgctgaacatgtatgaagattatccgttctggcatgcgttctttaccgagctgggatttcgggtaattctgagcccgccgagcaacaaggaaatgtatgagaagggaatggacaccatcgcctcggatacggcgtgttacccggcgaagctggtgcacggacatatcaaatggctggtagaaaacgacatcaaacggattttctatccgtgcatcaattacgaggtaaaagaagattccactgctccgaaccattacaactgcccgattgtggccacctatccggaggttatcgacaagaacatggcagagtacttctgtgaaaacggggtggaattctatcatccgtttgttccgtacgataacgatcggcgcttcgtaacggagatgaccaaatttttctccgggaaacgggatatcgaccggaagggcatggaaaacgtggcgaagcactataaactggatgacaccaggatctataagctctttgccatgaacttctccagaagagagatttctcaggcgatgcatgccggccgggaagcataccgggaattcaagaaaaatgttcaactagaaggccgaaaggcattgaaatatatggaggagcacaagctccacggcatcgtactgacaggaagaccgtatcacctggatccggaggtcaatcacggaatcgataatgtcatcaatcagcagggtatggtggtgctgaccgaggattccgtcagcggcatggcggaatttccgagaccgattcggatactggaccagtgggtgtaccactcccgcctgtacaaggcggcggtctttgccgggcagcgggacaatctggatgtggtgcagctgaactctttcggatgcggtctggatgcggtaaccaccgatgaggtggatgaactgctgggacagaacaacaagctgtacacggttttgaaaatcgatgaaggatccaacctgggttccgcgaagattcgaatccgctctctgaaagcggcgttagaagagagaaagaaaaccggcgtgcacacccgtaaggtggctttgccgtatcagcggaaactctttacgaaagagatgaaggacgaagggtatacgctcttggttccgcagatgtcgccgattcacttccaatacttcgaggcaattctgaagcggtccggatacaatgcggtactcttgccgcgggttacccagaacgcggaggaagaagggcttcggtacatcaacaatgatgcgtgctatccgaccatcgtgacattggggcagattatttctgcgctgaaatccggaaagtacgatctggataaggtgggcgtattcatgtcccagaccggaggcggatgccgtgccagcaactacgtagcactccttcggaaagctttgaaggatctgggaatggaacaggttccggtcatttcctttaatatggtgggactggagaagaatccgggattcaagattactccgaagatgggaatcatgctggtatatgccgtttcttacggagatttgatgatgaagtgcctgtatcgcactcgcccgtacgaaaaagtgccgggaagtgcggaagcgctgatggcatcctggttcgatcggattattgcaaacacggagaatatgaaactgagcgaattcaaacgcaatatcacacagatcgtaaaggaattcgatgagctgccaattcacgaagatttgaagaaacctcgggtgggcatcgtcggagagattctggttaaatatcatccgaatgccaacaataacctggtggagctgattgaatccgaaggcggcgaagcggttgttccgagctttatcgatttcttcgaatacggtttcgtgaacaagatgtttaatcacaaacatctctccggaagccgcaaggaaatgattgtgaataaaatactgctgaaggccattgagttctatcgggataacgttcgaaaggcttgtcgaaacagcaagcgattcagtgcagatgcctacatagaagaaacggcaaagaacgcggaagaaattctgtccgtgggcaatcagtgcggtgaaggatggcttctcaccggggaaatggtggatttgatcgactccggggtaaagaacatcctctgtctgcagccgtttgcctgcttgccaaatcacgttgcgggaaagggcatgattaaagcacttcgaagctacgatgaaaaggcgaatatcgtggccattgactacgatccgggtgccagcaacgtcaaccagttgaatcgaatcaagatgatgatggcgacggcgttcaagaacatggcggaagaggaagaagacaattaattttgtttttattctgtcagagaagtctcttgtgttgtattcgaagcgagagtggtgtataatagcaactgaaataaaggaagataggaggtccaccattgggtagacatggtacaatcgccggcagaaagtcggcacaggacgctcgcagagcggcaatgttcacaaaatatactagacagattatcgtagcagcaaaggaaggtggagatccggattttaactcctctctccgagttgcgattgataaggcaaaggcaatcggcatgccgaatgataatatcaaccgggccattaagaagggtaccggcgagctggaaggggagtcctatgaggaactgactttcgagggttacggtccatccggtgtcgcaattatcgtagaggcactgaccgataacaagaatcgtaccgctgcatttgttcgttccgtattcgataagaacggcggaaacctgggaacaccgggctgcgtatcctatatgttcgcacggaaaggcgtgatttacatcgagaagcaggatggcatggatgaagatgcggtaatgatggatgctttggatgccggtgcggaagatatgattgtgaatgaagacaattttgagattcgtaccgaaccgacagacttccacgcagttctggaaggcattcagaaggcaggatacgaggttgcggattccgacctggaatatattccgtcgatggaagcaacggtagacccttcggtaatgaagccgctgaacaagctgattaactctttggaggacaatgacgacgttcagaaggttcactataactgcgaattagacgaagagtaatcaattacaatctcctggagcatgcgttggttcgtgtaaattgaacctacacttctcattcgggattccgggttcagaagcggaggacgagcctcggtggaggatgtctgaagtcatgacaggaagtacccaccttatcgtaaacgatagggcgtcaatttcagtgctgacggtgtgctgggagactttgaaattaaacctatctccttgtgagataggtttttcttatgcacggagagaaatttttaattttttgtggtgagtgttctgttttttcgatataatgaaataagtagatgctgtcgacagaattaaaggagcgatttatgtttggacgagtagacataaccgacatcaagggttttaaactgggaaatgcagagaacacagatgcggccaccggctgcacggtgatcgttgcggaaaaaggcgcaaccgccggagtggatgtgcggggcggcggaccggctactcgggaaacggacttgcttcgctcggagaatacaattgataagattcacgccgtggtaatcagcggcggcagcgcatacggattggaagcgggttccggcgttatgcgagaactggagaacatgaaaatcggacaccgggttagcaactgcattgttccgatcgtttgccaggcatcgctttttgatttgaatgtgggacagcccgatgttcgcccggatcgcactatgggcgtgaaggcggtgcacaacgctttctgcggcggagagtttcatcacggaaattacggtgccggcaccggtgcgtccgtcggtaaattctatggcatgaatcgagcaatgaagaccggcctgggaacgtttgcttgctctgacggcgagattgaggtgggtgccattacggcggtcaatgcgttcgccgatgtatacgatggaaggaatcatgtgattgccggcctgctcagtgccgacggaaagcgcattgacggaacgattcgtccgctgaagaattgcgttgcggcggaatccagctataatatgaagagcaagatggagcctttcttcaataagcgcagagaagaggaagagttagaggaaccggaaacgatggaagaggttcgggtgaaacctgcaccgtcggaaaccgttgaaccggcagaaccgaagaatgtaccggaggttttggatgcaccggagactgcggaagtaattcaggaaccggtgaaggaagaaactccggctgtaaatgaacaatcgaaagacatgggatatgatattacttttaataccacaatttcctgcctgattacaaatgccaagctgaccaaggcccagtgcaacaagctggcatctattctccacgatgggtatgcccgggcgattaagccggtgcacagcaccatggacggagatacgatttttgtgatgacgaccggagagaaggacgtgaatttcgatgcatttgcagctctggcaacggatatcgttcagtacagcgtaatcgacggagccatttctgcggagagtgcgtacggacttccggcggcgcgggaatttctccggaaataactgagattcaagaggagacatttttcatgaaacgatttgtcataattgacggaaacagcctgcttttccgtgcttttttcgccatgcgggaaatggtgacacgggacggaatctacacgcagggtgtttttgcttttatcaatatgctgaataaaatcctggaggactaccatccggattacattgcggtggcttttgatatgaaggcgccgacgttccggcatacggcgtatccggaatacaaggcgggccggctgaagacgccgatggagcttttgtcccagattccgctgatgcaggaagttcttcaagcgatgaacattacggttctggaaaaagaaggctttgaggcagatgatttgatcggcaccatgaccgcaaaggcggcggatgcaggtctggaatccctgattatcaccggtgataaggatgcgctccagctggtgggcgagaacacctacgtcgttttgaatcgaaaggggatgacggattttgacctgtacgatctcgaaaagatgcaggaacggtacggactgaccccacaggagtttattgatttaaagggtctgatgggggataaatccgataatatcccggggattcccggcgtgggagaaaagaagggaatcaccttgctgaaggagtacggctccgtggaaggcgtggtagcgcatgcggatgaaatcaagggaaagctgggcgaaaacgttcgggcgaacctggaggaagccgaactttccaaatggctggcgaccatcaagcgggatgtggagcttccggtttcctggccggagctggcgtacggagaaccggattacgaccggctgattgcgctgtacaagaaattggagttcaaaaaatttcttcagaatctggaaagacaaacgccggatgaggtgacggtcgaaccggagaaagaccttctggaaggtgtgaaggaagtttcctatgaggatctgctggattctttgaagaataaccggacgctgatcattgagatggatacggacgataatcataaacagcttccggaggtgaaatgtattcgcctgtacaatccggagcagatgcactatgcggaatgtacagtgacgccgctggattttgaaatccgcatgagcagccttttggacaaggaaccggaactggtggggcttggtttgaaaccgattgcctacactttgcttcagtacggaatggaccgttttacgctgcatcatgatgtggaagtggccgagtaccttttggatccgaatcggagcaagtacaacctcaccaatatgtttttacactatgcgaacgagacgctggacggggaagatgcccggaagcggctagtggctttagactgcatttatcggaagcagcttccggcactggaagagaaggagatgctgtccctgttccgagattgtgaaatgccgctgatccgcaccattgcgggtatggagtctcagggaatgaaaatcaatccggagatgctgaagtctgccggggaggagctggatatccagattgcaaagctggaggcggaagtgttccaagaggcgggaaccactttcaatatcaattcgccaaagcagctgggtgaggttctgttcgagacgatgggcattccgtatccgaagaagaccaaaggaaagaacaagtattccacggcggcggatgtgctggagaaattggaggaagattatccggtggtgtccaaggtgctgatgttccgaaaagcatccaagctgaagagtacctatgtggacgggctgctgggcttaatcggaagcgatggacggattcatcctcattttaatcagacggtggcggctaccggaaggctcagctgcacggaaccgaaccttcaaaatattccgattcgcgatgagaacggtcgaaatattcgaaaggcctttatggtgtcggaaccggagaacgtgttcgtgggttcggattattcccagattgaacttcgcctgatggcggcgctttccggggatccggtgctgctggaggcgttccgtaccggagaggatattcaccggcttaccgcatcccgggtattcgatatcccgatggaggacgtgaccccgctggatcgttccagggcgaaagcggtgaacttcggcgtcatctacggcatgagcggattcggattgagcgagaatctgggaattacccggaaggatgcccagcgctacatcgatgactatttcgaaaagcatcaggcggtaaaggactatctggaccgccaggtggaaatcggaaaggaaaacttcgaggtaaaaacaattatgggcagaatccggcagattccggagttcaagtctcgccggtacatggatcagcagctggcggcgcggctggcgatgaacagtccgattcagggaagtgcagcggatatcatcaaggtggccatgaacaaggtggatgccgagctgagagagcgggagatgaaatccaagctggtcctgcagattcacgatgaactgattgtggaagcggtgccggaggagttggagcaggtggaagaactccttcggagaaatatggaaaatgcggtggaactgtccgttccgctggactgcgacatgcattccgggaagacctggtttgatttgaaataagaatttttatatagaaatgaggcgagccatgcgaacaattgcaattaccggcggaatcgggtcgggaaaaacagcagtgacggattatctggaagaaaaagggtttccggtaatcgacacggattgcatggctcatgccatgacagcaccgggcggcaaagccatcccgtacattcggaagcattttggagaggacttcatccttccggatggttccatggatcgggaagccatacgcaatgtggtatatcgcaatccggagatgatgaaggtcttggaaaagggaacgacggaagtgatagcacgagatacaaaagcggagattgaacggatgagaacactgggcgctccggtgactttcgtggcgattcccctgctcttcgaaaccggatccgatgggtcggaatacgacgacgtgtgggcggtaacggcttcggaagaggtgcgcgtgaagcgggtgatggcgcgagacggattgacggaagagatggttcggcggattctgaagaagcaggtttccgacgaagtgcgccgagagaaggcatcggagcttatcgataactccgggacgctggcggagctccggagcagggtggattttcttttgcgaaaaaatcatttaatctcataaaaagacttgcattcaatactaaaagatgatattataaatgagtcatgtggctgtggcggaatggcagacgcgcatgcttgaggggcatgtgggagaccgtgctggttcgagtccagtcagccacaccaaagttcctgactccgtcaggaactttttttctcaagattcacttttttgaaaataagatatttgaatattggccatagtatgatataatactcctcgttgggccggcgtggcggaattggcagacgcgcgggattcaaaatcccgtgatagtgatatcgtatgggttcgacccccatcgccggcaccatctattttttttatggaggataattacatgaaaacaaatgtgacaatgatgaacctgattcttctggtgttctttatcggtattatctatttcatgatgattcgcccgcagcgcaagcgcgataaagaggcgaaggaaatgagagacggtctgacccgcggtgatgaaattatcaccatcggcggattcatcggaaaggtcgttgccatcaattccgataccgttgtgattaatctgaatgccggaaagggcagcaccaacgtagaacttctgaagactgcaatcggcagtgtgaagacaccgaacaccgcagctcgtcaggagaagaaggaagcagcggaagagacaaaggaacgggatgtaaagacttccaccacgaagaaggtgactccgaagaagctgactccgaagaaggacgaatccgagaataaggatgcggaataagatttctgattacgagaacaaggatgccaaatggtatccttgttttgctatacacgaaattggaatggtgaaaaacttgaatttccaatggctatgatgtaaaatggtatgtaaaatgcaatgtattactatgcacattattacaaatttttagaaaggcacttaaggtcaaatgaaaaaaggtacacgtaaatttctatcaattgtcgtggtattggttatcgcactgggggcatttgtttcgcttaagggtatcggcccggttcagagacttgcggataagatgaagtacggactggatatcaacggcggtgtctatgttttgatggaagctgagaccaaggaaaagggtacgcagctgtctaagctgatggatcagacgaagtccgtcctggaaaaccgtgtcaatgccatgggtatttccgaagcctccgtttccattgagggaaaaaatcgagttcgtgtagagatgccgggtgtagaagatgcacaggcggctatcgatcagattggtaagacggctcagctgaaattattcctggcagacggtacggaagtcatgagcggtaacgagattaccgattcttcttttactaccgattccaagaacggcggatataagattaccatcgacttctcatccaaggggtccgatgcattcgcaagtgcaactgaaaaggcggcatccggaacggtaaagtccaccatgaaagacgaaaacggtcaggtggtttccaataccgcaatcgtcatcaagctggatgacgaagtggtatcggcaccgagcgtaagcgaaaagattgcatccagaagctgtgaaattacccgcccgggcggattcagtgaagatgaggcttcttctacctccgcactgattcgaggcggtgcgctgccggcaaccctgaaggaaatcagttcctctgtagagacggcgaccatcggtgcaaatgcacttcataagagtattgtggccggcgcaatcggtctgggaatcgttatgctgattatgctgatggcatacggcgcacttggattcattgcggacctggcactgctgctgtacgtagaggtgaccctgtggattatggcaggaatgggatcggtcctcaccttgccgggaattgcgggtatcattctgtccatcggtatggcggtagactccaacgtgatcattttcacccgtatccgggaggaaattgaaaaaggaaaatccattcgtgttgcggtggataccggatttaagtctgcgctggcgacggtagtggactctcagaccactacactgattgcagctatcgtgctgtatctgatcggtaccacatcggttaagggatttgctctgacactgatgatcggtacaatttgcagtatctttaccgcagtattcatcacacacctgtttgtaactgcattgacagacattccggcactgtgcaagatgagacactttggaatgcacgaagacggcactccgagaatgaagtggaccaagcacattcactttattgaaaaccgcaagaagtatttcgccctgagcttgattgttattctgctgggtgtgggatgtgcggtattcaagggctttaattacggaatcgatttcaccggcggtacgatgattcagctggagatgggtcagaaggtggattccgatgaagtggcgaagaccatcgaaaaatacgatctgaatccgaccatcgtatacgcctcggataaccacagccaggtggtgatccgtaccaagaaagcactgaatgcggatcagagagggcaggttgtttccacgctgtccaagaagtataacctgaacaagaagtcggtactggcttccgaggaattcggaccgaccgtcggtaaagagctgagacaaaatgcgattaaatccattattatcgcagcactgtgcatgctggtatacatccgattccggttcaagacttggaagtacggagtcgctgcggtaggaggtctgctgcacgacgtactggtgactctttccatgtacgcgattttcggatttaccatcaacaacccattcatcgccggtattctgacggttgtgggttactccattaacgatacgatcgtaatcttcgaccgtattcgggagaacaagcggttctacaagagaaaggaacttattccgcagattaacgacagcatcaacgagacgctgtcccgttcgattatgacttccattacaactttgattgttatggtgccgctgtacttcatggtatcttcggagattcgggagttcctgattccgctgattatcggtgtcatttgcggaacctattcctccatcttcatctgcagcccgctgctttacgagatgaagagaaaggaaagcatgtcccggtatgaactgcagaaagaaaaaaaagcaaaggctgcaaaggcaaacaattccggaattgtaaaataaatttcaactaaaggggtgttcacgggtgacgactgattttagtatgacaacagaacaatatattgaagatctcaagacgatgaatgagagatatgatgatccgatgattatcaaagcctttgaaatcgccaacagacttcataacggccagatgagaaagagtggagaaccgtatatcattcatccgattgcggtctccaagattctggccagttttggcatggataatgaaacggtcgtcgccggactccttcacgacgtggtggaggatacggagtacactcgagaagagctggtagaggatttcaacgaagagattgctctgctggtggatggcgtaaccaaactgggaaacatcaagtatgactccaaagaagaacttcaggcggagaatttcagaaagatgttccttgccatgtctaaggatattcgcgtcctgattattaagctggcggaccgtctccacaatatgcgaacgatggagttcatgccgcctcataagcggaaggagaaatccgcagaaacgctggagatctatgcgccccttgccggacgtctgggaatctacagcattaaattcgaactggaggatttagcatttaagtatcttcatccggaagattacgaatcgctgtcggttcaggtaagcaaacggaaggaagagcgagagaaaatcgtcgatcagctgatcgatgaaatcagcgatgagctggacaaggcaaacttccattacgatgtaatgggacgttcgaagcatctgtacagcatctacaagaagatgacacttcagcacaagcagctggatgaaatctttgatttgattgccattcgtgtcatcgtaaatacagtaaaagactgctatgccgtgctgggactggttcacaccaaatggacgccgattccgggacggtttaaagactatattgcaatgccgaagccgaacatgtatcaatccctgcataccacagtattggatgaaaacggggatcccttcgagattcagattcgaacctacgagatgcatcgaatcgctgaatacggtattgcggcacattggaaatataaagaaggaaagggtggtgccggcggagactcgtcggaacagaagctggcctggctgagacaggcattggagtggcagaaggaaaccgatgactccatggagttcttggaaactctgaaaatggatttgttcgataaccaggtgttcgtattcaccccaaagggagacgttatcgaattgccggccgagtcgacgccgctggattttgcatttaagattcatacggatgtaggaatccgatgcgtaggggccaaggtgaacggcaagatggttaccatcgaccatgagctgaagaccggtgatatcgtggatatcatcacctctgcgaattcggccggaccgagcatggattggctgaatatcgctaagagttctcaggccaagaacaaaatccgaaactggctgcggaaagccaacaagaatgattccctggatcggggaaaaaccaatatcgcgaattacattaagaagaagggctatgacccacatctggtggcgaagaatgcctaccttctgaaagcggtaaaggacatgaaattgaataatgtcaatgagctgtatctgcagatttccaacggcggaagtgcgctggcaaaactgggacagcggctgattgattatttcatcgaggacaataagaaagaagaagtccgcaaagaagaagaaatcaagaagaagaaacaggttcatcgggaaaacagttctgatggaaccgggattatcgtaaaaggctcggataacctgttaattcgtatcgccagatgctgcactccggttccgggagatgatattatcggattcatcacaaagggccgtggcattacggtgcatcggaaagactgcagcaatatcgtgagtctgccggagcaggaaaaaggacgattgattcaggtggaatgggaaaccccaaaggaagggcagacctattacacggatatcaatatctgctgccaggaccgccggggaatgttcagcgacatttccaaggtgtgtgaagacatggatgttcgcttggtaggggtgaatatgaaaccggcagatatggaatacgttaacgtgacgattaccgtggccattaccggaacgcatcagattcagcgactgctgattgcgctgaggaatgtcccggggattgataaggtatacaggacgaaatcatgattacagtaaaacgatacgacgaaaatatgcttcaagaaaatacctatattctcacggatcccgaaacaaatcagggaatggtaatcgatccgggatgctataccccggctatgaaaaaggagctccggaattttaccgaactgaagtacatcatattgacccacgctcacggagatcatatgggtgcgctgaatgccattcgcaaggattatccggatgcggtattgattgccggggtcaaggaaaagaagcttctgctggatgccgagaataacggctctatggaattttcgccggagccggtgagcacggaggcagaccgatatgtttcggaaggtgattcggtgactttaggaagtatagaatttacttttatggaaacaccgggacatacgcaaggcggaatctgcatctgcggtgacggtaaaattttcaccggagacaccctgtttttccgaagcatcggacggacggatttgtattccggaaatatggaacagatgcggaagtcgctgcagaaactgatgagactgccggatgacattcaggtgctgccgggacacggtccgggcacctctatcggcgcagagaagaaaggaaatccatttgtatagattctatctaaacggaatcaaaaatgaatatcacctggaggagctggcacgggagtttctggcgaatgatgagtttgaaatcatcccggtggacttccacgaaggcttttcaccgcgattaacggataaaagttacctgttaaatggtgaaaaagatgcggatttggacggtgtgaaaagagaattgtaccacgtcctgtcgaatttaaccggaattacccccgagtgggggacccttaccggggtacggccgctgaaattggccttttccgtttacgatcggtgcggcgacatcccacagaccatggaaacgatggcgcagaagtacctgctccatccggaaaaaatcgaactcctgcgtaggattctcaattatcagttgtcgtatatggagcgtccggaaacgggcagtcttagcttgtacatccatattccgttttgcccgacgagatgttcgtactgttcatttgccagcagtgttgcgacatcgaaagagattgcagagtatctggaatttcttttgcgggaagtggaatataccgggacaaaattccgaaagatgggccagtcggtggaaagcgtgtacatcggcggcgggactccgaccactttggaagcggatcagttgagccgtttagtagatgcgattcaatcggctttccagctggatttatctcgtattgaattcaccatcgaagcggggagaccggacaccatcacccgagataagctggaacagattcacgaaaaaggggttgatcgtatcagcatcaatccgcaatccatgaatccgcagactttgcgggaaattggacgggagcacagtccggaggatatccgagaggcattccggaccgctgcagcgatgggttttcgaatcatcaattccgatgtgattgcgggattgccgggagagactccggaggatttcaagagcacgttggaagaattggtgtcactgggagccaacaatattacggtgcacaccctatcggtaaaaagaggatcgaagctgaaagagcaggatccggagtattaccgaagagatacagagaatgtgcggaccatgctgaaattttcggaagaatttcttactgcccatggttttgagccgtattatatatatcggcaaaaacatcagatgggttcttttgagaacgtggggtactgcaagccggaagctcattcggtgtataacgtgcggataatggaagaaaaacagaccatcatcggcctgggggccggtgcaattggtaagagatattacccggagtcggaccgtttggaacgaattccgaatgtggggaacagtgcgatttataaagagcgtttcgatgaaatgcttttacgaaaaaataattactgggaggatagagatggcaattaaagcacctaagggtacgaaggacatgatgccggaggatgcctacaaatggcactatattgaagatgccttttttaagatttgtgacgaatacggctttggcgaacttcgtacaccgatttttgaggatacgaacctgttcaaccgaggcgttggagagaccacggacatagttcagaaggaaatgtacaccttcgaagatctcggtcaccgcagcattacgc

SEQ ID NO: 2420 - DNA, 32759 bp, Unknown
  16S sequences of unknown bacteria
gacagcggaacgcaagcggacgccgccagcaaaaggctggatatagccgccaaaattttttgcctgactttcaagtctcagacctccctgcttatgcttttcaaaattttgcgtatgcttgcggattttctttccatacaggcctgtcgggacggcggctgacgccgccgtcccggttttgtgggctctggtaaaaagtcccatcacgtataaaggctgctgcgaaatgtcctcatgcgccttttaagaccgatttcccgcaaagggaccaacctttttcttaaacaggatgaagacaactcctccggcaatgaccagtacccctgccacaatcagcacaatccacagcgggctgaagcccccctgttcatcgatattcgtgggtgtgtcactgctgttggaggtggtatccggcttgctggcgctttcgctggattgggtgggaacgctggactccggctcggccgcgtccgaagcatcggaagagaccggtgcctccgaagaaacgtcctccggctcggaggaggcctccgcctgagaggcggccgtggttttagccggggtgtcgggggcttttgtagtcgcattcgtgttcggtttagtcgtgggcttggcgggggcgttgcccgccagctccactatcggcaggtcgggcgcttcccaatatcgctgataggaggggttggcccaggacacataataatcgcgggccccgttttcgtccatatcgtcattgataccaaagttgaagcccagccagtcgccggccttgtgattgcccttttccgaccagggaatgctgatttcgcagagatagtcgctggcattgcgcacgcagctggcggttgcggttttgatattcgtcttgttggaggtcaaggcgccggtggacggtttgctgttgcgctcataggggttcaccagcagctgccagttgccgctgttgtcataatacctgcccaggtcgtccgccgtctccgaaacaaagagggtcacctgctccgtcataaagcgcaccacagaggagggggcgtccgccggatcgctgggcgttttgtcggtggcggcatataccaggaaatacaggttgttttcatcccacatgaccctggcataggaatccttcagcggcttatccgcggcgttatagcgggttgccgtctcatcgccggcccagatgacgggaatcttatcggtggtgttccagacggcgtcaattttaccgtcgataaccggcgtgccatactgggccttagggttgtcgtccgccaggctccccatagggcaggcgagagaaagggccatggccgcggccaatacgatactccattttttcatatgctgctctcctttatacagaggacttatccgccgggccctctcgcctctcctgttaaggcaggccgggcttacgcgtcgttcaggattgcccttgggccgcttttttgtacaccgtcagcagagccgccgccaaggccgcggccgcgagcgcgccgaaccacacgatacgggaggactcaccggtggtcacattgtccggctcggtgggctgggtggggtcggtgggattctcctgcgtgggggtggattcttccggctgggcgggcgtatcgctgtcctcgggctgggtgggattggaggactcctccggctgggtgggggtgggggtcaacttctcctcgctgagtgtgaaggtgacggcgccgctgctcttgctctcagaggagttccagagccagtagttccggctgccgtcgtcggtgacaggcagcgggccgtcctcaccgtaaaagccgttgtagtaaacccgcacctgcagctcggtggcgtccgcggccagaccgatcatctcgcggttgaccttttgcatggcaatgtagtggccatcctccaggtgaatgttcttagaaggcaggttccacaggtggccggagatttccgcactgccaagcttcggatatacatgatagataccgttcttggaccagtcgcggccagcggggcaataggtgcttacctcctggtagttggcttcggtcacgtcatagagatagtagatatacgtgtcgtcatacatcactttgtaggacacgacggcgtccaccttattgtctttggccacctggctgtccgtccggccttccgcgacattggtgctggttttgaagtaatccagcgggatggcggacacctgattccagatgggatcgtcatagccggcgggggtgccgattttcatggttttgtccagggtcggttcctccggctcgctgggagtggaggattccggggtggaagattcgggttcggaggattccggctcggaggattcgggttcagaggactccggctcggaagattccacaggggcctccgcagggttaacggtaacctcatatttctgattgttccacatggcgaacagcatatagttcctgccgcccggtgcagggaacatggcctgattattcacggtctcaatcgagtcgttataccccacgttaaaggtaatcttattattgtcctttgtcacgcccaatttctcatagggaattgtgagcatctcatagtaaccccaggtttcgtccttaatcaccttggtaattccttggctgctcaaatccgaccagcgataggcggacacttcgcccaaagaacccagagcgccaaaaaagaagccctcataggtccacgcggaagcgcctggagcataactggcgtcctggcgtacaaagggatcctccgccttcagacggatatacatattcttaccgtccgccatcagctggtaggaggctttggagacaacatcctttttatcctccgccgtcaggtcgccataccatttgtgaaagttccaagcttcatttaccacggcgcccagctctttcgcggggaccttctcccattccggatccgcaacgcctgtgggggtgcccacgctggtggtatcggcattttccgcgggaatgacggccgccgacgcgccggtggctacaaaggcgaccaacatcacgaggatcagagccatacaggaaaccagggatacgattttgccgtgcaacttagtcatacttgtctctcctttttttaatatatattgaaggggcggcccgactgaggctgtgcgaaccgcgccatcaatccaaatcggtacgcagccacctgcgtcaggtgtccagccagtctatcggcggggtattgacatccacattattgatggagccttcttcatgctcgcgtagctggatgttgtactttttaatgtcatccagcagctgctgattggcctttttccaggccgcggtgttcttctggctgcggtaattcaccgactgggccaggtaggtatactgcaggcgggagcgtttgacatgctcgagctgatcgccggaggcggccttttccgccgcgtcccaccagccctgcgccctggcgacaaagtccttggtgttggcgttgccaaagggggtcagaatctcggggctgatatagatggtggcggaggtgcccagcttcttcaccagcttttcaaactcggtgatataggtcttgatgttcttccagccactgccgtaatacgcctgcaggaagccgtccatcagcgcgttcacatcggccttcgggttccacagcagcttggacagcagataggcgcgcagctcgccgaactcgccgcccttattcggattgccctgttcaaaaatacccgtcacattgttctcgatcaggaactggatgttgggctgcagaacactgaagttcggataggtgtatagatagaaatcgaagtccgtggtgtagtcccatacatagatgttcttggtcagcttgccccaacccttgagatcgttggcaaacgtacggttcaccgtgcgttcatcgtcgttcagcggcgtatcgaacgcgcagtagaaggagcaaagacggacgatgacgttatccgcgggtttggtcttacaggggggttgagaatacatgtaggccaaggtgtccacctggacatggggatactttttcttcacttcggcggctatctgattgatcgcccggatgatcgggcccgccggactgccctcttccttaataatggcggcgcatttttcacagcggcaataggcggtcgtatcgttctgggagaccgagacaatgtcggaatcgggatccttcgacagcagatccagcgtgctttgagtcaggactttgacgacctccggattgctcaggcaaagggtggctgtatcccggccgccgctgacggtaaggccgaagtattccggatgcgcgttgtaatacttgttggcgggcagcagggaggaaaaggtatgcacgaactggccgcccgcataatggattccccggccgtagctgctgcttacgcggcggctatgatccgaattgttcctcattttggcggcgaacacggtgtcgagcgtggcgtgccagcccacgtcccggtactccagcgccgggttctgcacgtcgttgatggagtcgggcaggcggatggtcttggaggcggggacggattcaaagtcctcggaatagaacccgcagccaaagtacgtctccagcaggtgatacacgccgtaaagggtggatcgatcgtcgaccccctccaccgcgattttgtttccctttttgagcaccgcgaagccgtcgtatttcaacttgcttttgtctaccttcacgctgcggcttgtactgccgacgataaattcgttagccgtttccgccgtgctgtcattcacgatggaaagctgaacgccggtaattttcttcagatagctctgcagttccttggccgcctgctgttcgacacgggtggcctttgctccctgcacaatcacgtagctggccggatccgtggaggaagaggccgtctgccgggtggtggccgtggtcgcgccgggcttttgtccggccgagttattctgcgggcgccgggtggtttcctggccagcccccgactcggttcctgtagaactgtccgcgccggagacggtgaaatccccgctttccggagctccggcagcggaggacggactctcgccgctctggccgcctgcctgtgagctgccgggattggcgggctttccgcaagcggccaacggcaggagcagcagcagggacagcagcagcgccatcccgcttcgcattgttttcgccatatgtttctctcctattctttatgatcggtttcgatgcggacaaccggcgcttcagcgggtgggatccacccactccagcggggaaatgtctgtatccacctcctcgagcgtcccttttatatgctcgcgcatccggatgccgcaacggatgagatcggcgcgcagccgcccgttttcctgcttccaggaggcggtgtccttctgctcgtcataggccgcgcattgggacagataggtgaattgcaggcgggagcgtctgacccgctccttctgctcgcccgccgcttccgcttccgcctcgtcccaccaggcccgcgcacgttccagaaacgcccgggtacgacggtccctaaaaggaaccagcttttcggtcttggcgtaaatggtggcgccggtgcccagttcccggatcagctcctcaaagccggtgatataggctttgagatgccgccagcccttcccgtaatagtgctccaggaagccgtcggtcagggcctgcacatcctcctcgggattccagagcagcttggccagcagataggcgcgcagagcgccgaattccccgtccggctcgcggttgccctgttcgaaaatgccggtgacatgatgacggagcaaatactggatattgggctgcaggacatgaaagttggggaacgtctgcagatagatgtcaaaatcggtggtatagtcccagacgtacaggcggttggtcagccggctccatccctccagatcggcggcaaagcctgcgttcggctcccgctgcggatcgtccagggtggtgtcgaattcgcattcgaaggagcagaggcggacgatcacgttgtccgccggctttgtccggcagggttttcgggaatacatgtacgccagcgtatccaccagcacatgaggatgccgctgcgccaccgcggcggcgacggcgttgaccgcgcggatcaaggggccggcctggctgccttcctcgtccgccacggcctgacaggcggggcaatggcagtactgcgggttgtcgttctgcgacaccgacagaatatccgccgccggatcggcctccagggcatccagcgcgccgcgggtgagcaggcggactacctccggatggctcaaacacagcgccccccgatcccgttccccgtcctcccgcagcgcgaaatattccgggtggctttcaaaccagggttccggcggcagaagcgccgaaaaggtatgtacaaagcgatcccccgcgtagtgcatggttttgccgtatgccgcgttattcacccggttgtgatccgagtttatccgcagcttagcggcaaacgcggcgtcgtgcgcctcaaaccagtccacatcccggaaggacagcgccggactgcaccggtcgtctatcgcatccggcagacggaacgccccgggggatggcagaacctcgcagtcccgggcatagaaccggcagcccccgtaggtctccagaaaatagtacacaccataaagggtggagcggccacaggttccctctatcgccgtcagtcccccgcaccggcggacggcaaagccgtcgtcagtcagcccggcgacatcggccctgaatgaacggccggttcgtccaatcaggaattcacagggggagggcggcgcagcggcatcggtcaccggcagccggatgccggtgatcgtctccagataccgctgcagctcgccggcggccgtcctttcgacgggtgaagcctccaccccatgcacaatcgtataagcggccagccagcggttgacgccgggcggcccgttcttttcgcagacggacacaaaatccctcccgttgcagaggccgttgaccgttatttgttgtagttatcgtccagataggcctggaggggctgcttgacttcggcaaccacctgcgccgccgtcttctcgccggtggccagttcgttggcgaagttgggcaggctgtctcccgccagatcgaaaagctcgcgataacgtatgagacggaatttgctgttggtctggatgtccagcagcacctcgagggagccctcgtcccgcagagacgcgccgtatttgttggtgaagatttccgccacgtcggaggacgcgtcaaaatccgcgggcagcttggtctccacatacaggcgaatgagcgtatccttgtcgattttggtggaggtaggcaggcagatgcactcccagccgtcgtaggaagcgacgtaatcgctggccttggggcccttggggaaatagatgacgccatagtcgtcatccgtcatggtggtgttgaagcgctcgtagggaacccagatgccggggcacagtatcatggcggcccggcccttttcaaacatgcgcattgggccgtcccaatacacgtgctccgcgttcatgatccgatccgtgtgcatccatttttccacctggttgagcgcctccagggagttggggctgtccagggccagccggtacgtattgttttcaaaggatacgacatcgcccatattggaggcgatggccgatgccatgacgctgaacagatcgccgtggaagccgtactgggtgattttgccggaagagtcgtaccgggtgcattttttggcatattcggtgaacttctcccaggtccagttgccggccttggccagctcatagggatcgtccaggttgttctctttgaaaatgcgcttgttgaaggtgacaaacatccgctgctccagcggttcggcgcacatgccgtaggttttgccgtcgaggctcatccaatccgacgcctttttgctcagctggttgccgaggtactgcttgtaggcgtcgtagccttccagcggttccaatatgccctttctggcataatccggcaggcggctggatcctacgttaatcacatcgcccgtcggctgccctgccaaacaattctgcaccagggtgttataataatccgtctgggatttgtaaacgaattcgattttacagtcgtactttttctccacctcgccaacccggctgataaacgcgtcattttcagctgaaaggccgggggtcatcacaatttcatagggaaaggccatcttgacggtaattccacccagtccctttaccgagggggcgtcgggatctgcggaggagcttcccgtcccgccgttgcaggccgtgcacacccccatcagcataacggcggcgcccagcagggccaaaacgcgactcacttttttcataaaaaagacctccttgtatatctgtgacgatcgacttgtgcgtatatacctatgttccgtccgcctcctttccaaccagatcgttcagcccaccagaccgctgcgctcaacgccttcgagcagaaatttctggccgaacagatacaccaccatcagcggaagaatggcaagaatctcgccagtcaccttgagcatgtcggccttgaccccgctgttggtggggatgatgctgttcaggaaaatacccaatcggaaatcgctggcggcccggctcagctcgctggtcatggttttgaaattacccaccagcatattggtgtaataactgtcgttatactgccagacgaacataaacagaaacacggtcaccatcatggtcatggcggcgggcagcatgattttcacgaagattttcaactgaccggcgccgtctatggccgccgcctcatacagctcattggggaaccctttgaaatactgccgcataataaagataaaaaacgcgtttttgatcccgctgcagaaggcggacagcaaaaacagagaagccgggctgttggtcaggtcaaagcccttgaagccgaacagattggtcaggccgaaaaagctgaagaatctcatgttcaggaactgcgacatcatgatcgtctgcgggggcaccaccatacacacaaggacgcaggcaaacagcagccggttcagcttgaacggaaatttggcaaaaccatagcccgccatcgtggtggacaaggtggtcagcagcgccgtccccgagcacagcagcagggtgcagagcagcgtggagccatactccatgacgtctatcatttcaacatagttgtttagggtaaaatgcttcgggatcagatccaccgtgggatcgtacatatcgatttccgctttgaaggacatgctcagcttttctatcagcggatgcagaatcacaaaggcaattcccagaatcaggagcgtcctcagaatggcccaaagcagctgctggctctgtttccttaggcggtatgatgaaacacgcatgacatttctccccgattctcagtcaattatcttgataaaacaccactttggacagcagcccgtaaaccaggccgataatcagaaaaaccaccaggatatacagccaggacatggccgaacccatcccgaactgcaggccggcatatttcccctgtaccgcctggataacggggttggaattggcggtaaaggaatcgataacggtatacagggtgctgaccagaaggatggggctgacaatcgggaccgtgatcttccagaaaatctcccaagagtttgccccttccatgtgggcggcttccaattgggagggtgtcaccgactgaagcccggccaggaacaggaggatctgcacaccggacgccgatataatggtggtgatccgtttgaccccgctgataacatagtcggtaaaccctcccggcagattgacggacttcagaaacgtctgcatctgcatggataggttcacggtttcgcgggccgtttccccgatcccggttccgccgctggcggaggccatgatggcgtccacgttcatccccagcacggacgacgacgcgaggataaccgggaggaaaaagatggcccgcgccagcagccggccgcggaatttctgattcagcagattggccgcgaaaaacgagaaaaacacaatcagcggcacattgagcagcatatccttcagggaattgagcaggagcaggcgatagctgggatccttcacgagcaggtatgtataatgctcgattcctaccggctgggtatgatagccgtccatgttgtaagtgatgtcctgaaaactaaaaaacatcgactggatcagcgggtagacggtgaacgccagaaaaccgatgataaacggcagcacgaagaaataccccatcctcgcccgcttttctataagtccgtttgctttgtgtttacgcactcgttatcctctcccttgctccgcggcggccattccgtttaaacaatcgcgtatccatgggcgggcaccgtgactccctcgacggtatacgccgtatcggcgtaattgaccagaatccgtttgccgctttcgtaagtggtgctgtacaccttatcagccagccggcaatgaccggtgatgactcggccgcccacctcctcgtatatcgcgctgagcttgccgtaagcttcgctgaacgcatcgatccagtggcggtagcaggaggtgtagtatgtatccaggttctccttatgcttgaggacgctgttgtccgcatacatcaaatcgacgtacagcagcgaacccgtttccagcgctttcaagaaattggtgttggcatcgtcataattgaaggcagccccggcatagtccagcgacccggataccaccatctgcaaaaagggaacggcgtaatcggtaatggtgtattcggcggagtaggtatccagctccacgacatcggtcacttgggaaaacgcataatcgttaaccccttgggacagcacgcggatggagcgatccgtcagacggcgcagggcgtcttgcacccgcgcggtgctttccgacagggagcaatattgactgtcgtcgtagtcggccgccagcttgctccccatagcctccaggctgacaccggtcaggccaaaggattctaattcatccgcaaccatttcgctgaatgcattgtacagggagggtttaaggacatactgtttttccacgggcgtatacagatcgccccgatagcggggcacataccggccgtatttgccggtgatggtccgagcggcgtgcttccccctggaaaaattgtcaaacagcgtgtctgttttcgtcaccgtctgaaagttgtaattcaggtacagggcgatgtcacgggtgcggcaggtctccagaaacgtctgaaaggcgcgggtaccgcccagttggctttccggcgaaatcgcagagggaagcccctgccggacgccgcctttattccagccggtgtatttgaccgccagcttttccacgcctttttcttccagagcctgaaggatttcgcctgcctgcccgaaggtggtcagcgcaatgacctcctcataggggatgcccagcaggctgccggtgcttgtcaccgcccccgtcagctccaggtaagccttgtaggccgacggttccgcccgagcggcaagccggtttttcccaatcagatactggcgatagatctgcgccatttgcgaatatcccatgggctctgaaaagagtttgtagcggacaatcatgtcctcatccgcgtaccgggtgtccagaaagctgatggccgcgccgacggtttttcccaactggtaatactcttcggccaccggggcgaaagagacataggcgttattgttttccgaccgcatacccgacaccatcgcgtgcagggtggcggtttcctctccgttttctatgatggcgaagacggcgctgttctgcccggaaatgccgaacaccggcagatgaaccgcacgaggttcatagctctttgtgcgatcataattgccgatatcgtctccatacaccttggcctcgtatggattggcgccggttttgccattgttcatccggataacggaaccggagccgtccggcagcaccaattcgccgacggcttcttttccctccgaggcaaaatacggaagcaccccgatgcttgtaatggtatagcccgccggcatggccagccggtcgacgggtatagtaaccaccagatcgccgtccaccagctcatagcggatcccgacctgaaaaagcaccttttcttccttttccacataaccggcgtcggtctcgtcccgtttcaaatcctcttcggaataccccacgttttccagtaaggcgcgcagcttcgcatagaccaccttattgccggttcgtaaaatatatagatcttcgttttgaaggcgcgggtatttctccaggaagctctgcatggtttcccctttttgcagcatgctgagcttgaccagggaatactgcttggagaaggccgactgatccgttttgttctgaaaacgggcgagcagcgtctcatagccctgcttggtcagcgccttagggattccccgctccggatcctcggcgcccagatgataggtcacctggaaaccgcgcgcaatcgcctcgcattgataagcccccagacggacgctgtctttataggagtagaaggaggaggtctgattcatcgggttctgataggtgatgaacagctgcgaggcgagaacctccttgttttcatcggtggcgatgctgtcgttttcccgttcctgcggattggaataccatatcgttccggttgcgttatcccgtacggcaatttcggcggtcgcttcattgagcagcagcgtccgcccaccggcttcataacggcgtgtgaaccctgacggcggcgcctcggttcccgaaatttctgtatactggccgaaaccagccgcagagccgctttctttagctcccgcacaggaggaaagcagcagaacaagcgccagcagcggcgccgcgcacatgcggatcggttgtttcacaatagtccgtcctttcgttgtcatacgaatttccggtgaaagggccgataagattggctgttcgtataagccctccgggtgtttcccccctcgtcaacgaagccgcagggatatttcctcggccagattgctgacaaaggtccacatttggtccatcagagtgaacagcagcaatcccaggaaaatcacgatggcgatgccgatgatggtgaacagaatggtcatcaccgttttgaacatcgtgtactggtggatttccagcgtcccggcgatcagcaggaacgccgtccagatgagcacaacggtatgaaccagcgtgaccaatccggattcctccaaggtcagggcgtagctgataagagtcagtggaatataggtcaaaaccatgggggtcagggcgtagcaggtggccatcacgatgtcccggaaagcgccttccccgttcatcagagtggtcaggcaatagctgaccacacaccacagggcgaacggcagcagcagcgacaggctggcagaaaagaagtttttcggttcataatacgccgtattgaacgggaagctgagatactgcgcctccgccaccgtggaaataacggccagcgccagaatggtgagggcggcggaaaggctccccttcttctcccgtttcatatcccagaatcccttaaatggattgacgattatgtatagagaaaatttcaaggttcttgcataattctgtaaagcagaccgcatgatcctccaacgcctttccgtaatttttaccgtcgccgggcgtgcatgacgctgtcaacaatttcccggtactttctgcgcagccgcagacatatggcgagcaccagcagcgcgccggccagcgccagcaacacggcggcaatttcaccgaaatggtcgacgataacctgcgagcggtatttactgaaggccttggaataattctggcgatcctgccccagcttgaaataagcggccgcctgcgcataatttttatcgtggtattccaccagccccagcccgatatacgcggtttcacagttgccattgagggtcagcacactttcccactgctgccgggattccgcgtaccggccgttttgatactgcagcgttgcatcgacgattttttcgccatactccgtggtctgaaactcagtcagacactgccggctgaaatccagaatcagataccgcccatccagctgggtcagagagaccggcgtgacaaagccgctgttggtatcactcaggccgccgaattggaacagaagatttccccgattatcatatttgaacacatgtccgcggttggaatccagcaccgtgtaaaaagaggcgccgtctaccgcaatatcccgcagtttggaggggccggcgggctttgaggaatcgatgactgcggaaacgtaggtggtgtcgccgaccggcataaaagccccctgccgctgcaacacatcggtaccgctggcgttaagcttacgaatcggagaatatctctcatccgtggaccggttttgaatcacgctggaaatgacggaatcggacaaggtgctggtggtggtatagataaagccgtcggcatcgatggtgatgccgttatactcggtcggcaccgtttgctccatacgggcgatcatttcctgggtggagaaccgcttgagcagcacctgccagggatcgatattgaccttattggcccccataaagcccttgaaccgaccggactcatcaaactccatcaagccctgattgatattcctggcgatgacatacatgcgcccggcggtatctaccaccagagcggtcggctggtatacgaaattatctcccagcagagcggattccgggcgcggcatttcccggcggaattttccgtccggcccaaagaccagcactctctggttccccgtgtcggctacataaatctccccctcttgggtgacgaatacgccgttcggctctttgagagaatcttcccgtccttcgcgcgaaaaagtctgtaaaacaaactgaaccgtatattggctgtcggtcacgacaacacggtgattgccggtgtcggcgatcagcagccggccgtccggcgcacaacgcacacacatcggatccttgaagccgccgattcctaagtccactccggtgatggttcggccgaattttacggcttcggcggacagaacggcgtcgttgccataggtgatgctgtaggaatccgacgggtacgagaaggaacaaccgaaaaccagcaaaaccagcgccactgcgcagataagcgctcgtttgaccctcttcttcatggctctctccttttattccttaatgcccgagctggccatggtttccacgatgttgctctgggtgagaataaacgtacagacagggaccaccagcataatcagggaaaccgtcgaggcaacgccggtgcgggcaatgccgcctcccacgatctggctgagggcatagggtagcgttttcatatgctccgtgtaaatatacacgccgccgttggcattccacaggttctgcacacagaaaatcaccagggtcagccaggccggcttgacttgcggcatcacgacccgccagaatatggtcatctgatgggcgccgtctatttttgcggcctcaatgagcgcgtccggcaccgtggacatgaactgcttcatgagaaacaaacccatggagccgcccacaaccggcaggataatcgaccaataggtatccgtcaggcgcagattggtcatgatcatgtagttggggacgccggtgacggctggggtgaacatcagggagttcaccacgatgaaaaagagcaggtttttgccgggcaaatcgattttgcacagggcaaatgccgccatagaggcaaacaacacatggaacagcgtgcccgtcgcggtgataaacagggtgttgaacacgtaccgggagaagggcacccaggaatccgccaaaacgatgtacagttcgctgaaattgttcatggtcggattgcgcacgaagaagcggggcggaaacatgaaaatctcatccagcggcttgaaggcattgacgatgacatacaccagcggcagagccatgaacacgcctacggcgcagagaaaaagaaaattgacgacgtcgccgccgcgggaacgattggccattcgacggccctttcggctttgaactctccccctactcatttgcccaccctcctcagcagcagctgaatcagctggttcgtcaccagcattgccaagaaaagcacggtcgcaatagcggaagcgtatcccatttcatatcgcaccgttccgtaatcctgaaggtgattgagaatcgtatggacggcatagtccgtactgggaagcccgcacagggcggtggtttgatcgccgatggtaaacgcggaggtaatggacatgaccgcgccgaacatcatctggggccgcatggaaggcagcgtgatgaaccacagctcctgccagcggttgctgataccgtcgatcatccctgcctccaccagcgaggcgtccagcccctggaagccagcgacaaaagacagaaacccggcgcccaggctcatccagatggtgacaaggatgacaatgggagccatataccgcgtatcggccagccactgaatcgggtcgttgataaaccccagggagatcagcacgctgttgatatacccataggagtcaccgctgaaaaggatggtccagatgagatacaccgcgccggaaatcgagggcgcgtaaaaaatcgtcaccatgacggcccgcaccttaccgggaagctcattgatgaaccaggcgaacatcagactggccagatagcccaccgggccggtaatgacagcgaaaacaaaggtgtttttgacggctatcataaacacgtcgtcgtgaataaacaaatccagataattcttaaacccaatgaatttcggtgtgttcagaatgttgtaataggtaaagctgtaccagatggaaatcaccacaggcaggataacaaacgtgaaaaatagcaaaaaaaacggaagcagaaaaaagtaccctgtccagtttttccgcagccttcttccagtagagcgcaggctgtcctgtacataacttcttacgatctgtctgcccgtcaagcctctgtcaaggtcagcattcatgccgattcctccatatttctcggttcccggtgtacaggcccgtgcagcctgtcaggaaaattcgtcaatcttatcggctatttcccgattaatggtctcggtgtattccaccagagattcccgcggctccgcaccggatatcaccacactgcggaaggcgttggtcagatgccgggaaatgaagtagctgccaggcacctgaggtatgccgatcagctcctcgcgctgctccaccagcttttgataatccgtcgccgaccagggcagctccctgaccgcctccaggttggccgtgggataccgggcagaggcccccaggacgttttcaatttccgtaccgtaggcgctctgaacttcggcggaggtccaccagcgaaggaacttccaggacgcttccacatcatcgtttttcgccaaaatcatggagcaaacgccggagccggaattggcgcggctgacggttccggaggagccggcggtgccgggaatcttttcaatcccccacagcgaggcaatttcgggagcaaatacctgcagcgtgttgtacagggaatagtcggcgagcagcagcggggtttctcccagacggaagcggttggccgcgtcgtaggtttggggcagggtataatccacgtaaaaactcgtccactgtttaaaggccgctatggattcctcgccgtccagccgggtggcgttcaaagcgtcgttgtacaggctgccgcctcgctggagcagaaacatatagaaggtgctcatgccggcgtccggcgccgcaactgttgaaactggcatagcaaaattcatattgtttttctgaaggatcggtaatatcttataaatttcatcccaggtttcgggaacaccgatgcccagttccgacaggatgtccttgcgataaaacaacatggtgtaactctgggtttccggtaaagcatacacgccgtcccgatatttcaaaggggtaatcgcgctgggatggaagcgtttctccacctcctggtaatcgctgaaggcgctgagatccaccagagcgccgcgcatggcatagttaacggcgtcgccgctcgcggcctggagatagacatcggggtttctacctgtcgccgtggacggcagcagcacagaggcctgcaccagcttcaggttcacgttgactttttgatgaggagtaaaatccgattcgattagttttttcagcacctgaacctgatcccgtccggtcgccagccacacctcgatatctgtttgggcttcgttgctgttgctgacgatggaataatccgccgtaaaggaacgaagaaaagctttggtctcgtgccacagcttctgcacaaaggtaccgtccgcccgggcgggaataaagtccggcgaagcaatctgcaggaaatcaatatccagcgcctgctcgctcgccgtcaacagccaggtgcccagagaacccaggctgtccttgaagacgctgaaccgcttggcaatggtatccggccgttcgctcatatccgtcagctgggtgacaatccgatccagcacggcggtattggatccgcggcttcccgtcagcttcaccatacgggcggaggcctgccgcagccgatccgcctgttcccccatagcggcaatggtttccgggagcagcttatccaggttataatcccgataggcgtccggggaggtgcctaccgccatcaggatgtcccgatagcagcggttgagctctgtgaggctggcgtccacctctcctatcacctcgccaatttcacccagagaaacagacagggtgacggtatgccggccggctgtcaaataaaacaggaaaggatcttcctccccgccgaccgtgtaattctgccagtccgaggaatacgggaaagccagggcggcggcttcctgaaagggcagttgcccgtcgataagaagctggcgggtggcgttcacgtcccggctgtacttctgccggcttttaatgaggattttatacaggccgtcctgtttcacctcaatctcccatgtgatactcgcccctggggatttccagttatcggcgcctatgtagttcagagaattgcccgcgcctccgcccggcgtggtggtgggagagcttcgatccgccttcggcaggatggatttgctgtttttatagagcggcagttctccctgcaccgtctggcagtaatccgacgccggccggtatcccagccgctcatattcccgctgaacctccgcgtaagccggaatctcgtccgcagccgaaagccggatggaacgaatcgccaagccttcacgattcaaggcaatgcgcagggtgtttttccccgccggaaaccggaatagatagggctcctgctcataccctcgcggatccgtcagccggatatcctgccaaaccggatattcccgcacggaagggataatgtcgtttccctggctgtcctgctgaaaagcgcctccctccacgtcgtccttgtatatgcgccgcacctcaaagcccgcggcagaggagaagggaatttcgccgttaatatataaagcaaactctgcattcgcgccgcggcccgtcacctggcagcaggatatctccacatgacacagagtatcctccggaaagttaaaagaccattcggcaaaaccgccttccgccagcttcagagaggggccggaatacccgttcagttcctcgagagtttccgccttctccgaaacggccggctcccgcatgtccagagacagcggagatgccggggacttcccggtatgccctgcggaagcgtatgccgcataagaatcgctgccaaaaacgctgctttccaccgggacgaacgcaccggcaggcatgacgcccgtacacagaagcgccgcggcggccgccgcgaaacgtacccgatttctgtgagtcttcatatcgcattctcctcaccaagtaaatggcattgttcaagaagccgttcatccccctcaaggatatccatcatctgtatgtcgcccatactctgccggtaatcccgcggcgattttccgacgaccttcttaaatgcattggaaaaataatgagggtcgccaaaggacaggcgcatggcaatctcctggaccggcattcgggtgtacaccagcatgttgcacgcaacctgcatctttctcttgagaatataatcataaggcgattgatgatacgcctgttgaaaaatgcgtgcgagataggcacggctgatataaaatcgttccgcaatgagctcgaggcgaagcggctcgccaagatgaaaatcaatataatcccgtatctgttcatacagcggttttttcaggatctgcgagcattcggtttcgctcacaaaagcgatcagctcatgaaaggacaaggttagctgcagggtcggattctcctccgacgggtggagcagctgccggtgaatctcccggaaaaggtgttcgacattcttgtgaacaatcactaccggggagaccaggccgtatcctgccagcagatggcccaccagctcgccctcggcattgagccaaatctttttatacggtgtgtgataatcggaaccatatgtacaggcagtcgattgctggataagataaaaatccccctcctgcaccgtcagccgttcccgctcgtattcgatccagccgcgtccttccagcacatattcaaacacataagacgaggccggattgtgccggatacgataatagggactcggataggtcacgcctgcaagctccaccgacaacggggcatcccggtgggacacactggtaaatataatcttttcccggcctgtgtagtttcgttttgtcctgggacgtgccatagtcctcaacctttctacatcttacaaccgctgctgattattcaattatagaaagtccgtctgttcccgtccagctataaaaatttggaacactttatcggctatctgacggcggccccaaccagaaccggttccactttttcccctttcttcaggcctttttctttcagcaagccgataaacaggcctccctgtacgcttcgattctggaattcccgcgcctgagccgtcgtggtgtaataccagtcgcccatggcgaaacgggtgggcgattcgtgatagaatttccacagaggctcgatcatgcgtacaaaatcctcgcggcggtcaagcatggcggcgcaccacaccagccaatcggatttggtataggcctcccggcagtccaacggcatcccgtaaagctccgcgcgctccatgtaggaccggagctctgcgtcaaacgtatggggcgggaaaatttcggtgttaaacagctgatcccaaaccgcgttgtatttcaggctaaaagtattcggctggtcaaaggccaggcgaaaagttccgtcctcgttggaggcttcccgtatccagcggacagccagagccttggctgtgcttacaagactttcccatcgctccggcatgccgtttgccttgcaaagaagggcaaacccggcgatgctcataataaacttcaacgacaggttgcaattgtgggccagatgccccgcaaagtcgtccgtgcacagctgattttccggatcgtagccatgctccagcagataaccgcaccactgctccagcagatcccaatttttccgggcgaacgaaatatctccgctcgccaacgcggccgctgcggtcatcagcagcatgttgctgcattcctccaccggcatctgacgttccatttccatgccatatgtctggccgttcagcagcggatagtatccggcgtcatgcggggcaaagggatagggccaagcatcggagcgggcatagcgaaaaatcggacgcatcatcgcttctacaaggcggggattatacaacaggaagagcggcatggagggataactgacatcaacagtggcggcacaggcaccgcttccacattccttggaaatgaacagcagctcgccttcggaatcctcacacagtttgtgggccgccacgctttgccggtatgccagcgaaagcagctcggcatataaaccgctgccggcctctgtggcgtcctcgcagagctgccgatcaaaattgtcgcacctttcctttagagattcatattcgtccagcgctatctccaaaagacgctcaagggtaggcgcttcttttttccagtagagctccagcggtgtatgaaaatattccaacgcctggatatcgtcataggccagggctatcaccgtctgctgctcatctgtttccagagggatgtcgatgcttatgttatgaaagcatgtcccgttcttatttcggccgtttatcggagcgacgaccgccgccggctggcgaactgccgcgtagacgtagccccactggatacaaaccaaatcgccgcaggaactcagcggcttttgctcccggccgccaaccttcgcgccttttacggtcccgcacgtaaacggggtataaaccgtatcctgttcgcccttttcgcccaggcaaatagcgtcgtctatcacaagagtaacccgcaaatcctgcacggcggccttattgtccggaaaggcttgaatcgctaaatacgtcaccggccgggataaaaccgtaagatcatccaaaagcagaggggtggtgaaagtgaccgccaattccagcccggggcagcgaaaccgataggcggtagacattggcgtaacatccaccgaaatttgctgcatggcatcgctgtcgcctacgcccataaaacggtaaatcttttcatttaaggttacctcaccggtcagcggatggggcacagacgtccagtgcctcgtgggatcgtcattcaagctatccgacatggaccaaatgctgaaatacggatcgtaagtaaccagcggaacagccggcgcgcgcagtttcatgacaggccctccaaattttacttgcggctatcgtgtctttctatataataattatagagaagcgtcaacgaaagagaatagaatatttctcacaaaaacgtgaggaatcttagcctttttcccgcaaatggtatttcctctaaagcgctagaaattcttggaatactcacgaatcctgtaacatatatttacaagccctctgttaccagaccgtcccaatccttgcatataaaaaccgtacagatctcttttcatacagaccaaaaaacagcgaaagcctgactgaaataccgctgctatttaagctaaagcagtggatggataaacaaaagcggccgtgcattatagcacaggccgctttttcgcatctgaaaatctggaaaacagaaaaggcgcttggcagaagagaacgacggaaccaagcgcttttcctcgatcccaatctttatctagtccaaatccaaaggaatttccttgtatatctccggaatgacccggttatcgcaatcaaacgtgtatgggttgatatcatccattaacccaaaatgcaggggtacgaccctccgtgcgccgacccgccgcgcgaaccgggcggcatcctcgcgattcatgttgttgcccacaccgttgatcggcagaaagagagcatcgatgcgggcgggcaaatcaggaaatatagccgtgttgtacagcgtgtcccccgtcacatacaggacgcgtccctcggcctccatcacaatcccgatggcgccggggtcactgtgttcggcgtatacggcggtaaagcggacatttccctgcgtccagaccgtgtgctttcgaaacaacacataattgtgcgccccgccgaagtgccgcaccctatcccatacgccttcgggcgctagcacacaagcgctgtacgccgaacgcagtatcggctcaacggtcgccggatcataatgatcaagatgtccgtgggtgaatgccagtatatccggacgcaacgataaacatacaggatccaccggaatccgccgccgcatgcgcggatttgcctcgcccacactgtcggatagatagggatccaccatgacggtcttgcccttcaactccaaccataagccggcttgcccgagccatatcgctttcatccgtccgcctgccttttccttgctgtatctgctgccagtaccgagtgaaaacggcttggcgaatcgatcgagtacttctctatcgataatttgtcccgccgtttacgtccaaggtcatgccggtgacatagcgcgcttcctcgctcgccagatacacggccgcatagccgacgtcaaacggcgttcccagccctaacgggacgctgtccgatagcttttgcacgccgtcctgtccatgcgttttataaagcagctccgttttcatcatgcccggagcaatggcgttgacagtgatgtgatccggtgctcctgtgcgcgccaaggttttgaccaagccgatttgtccgcttttgctggccgcataatgggcgtgtccaaacagcgcgccccgctcccccacaacagaagagacaaaaataatccggccatattgccgctcccgcataaggggaaacgccgcgcgggaacataaaaagccactggtcagattcgtcttgagaatacggctccagtcgtcggtggtaatcgaataaatatcgcgatcctgagacgtgccggcgttattgattaaaatgtccagtttcccaaagcgctcttttatatgttgaaacagccgggtgacctccgcctcctcggaaacatccgcctgcataaagaccgccggcttttctgcggtctccacctggcttaaggcgtcctcggcctcctttggttcgcaaatatcgttgataacgacatgagcccccgctttggctaagcaaatggcgatgccttttcccaggccatgggcggcccctgtaacaagagccacctttcccgtcaaatcaaacatagacgattcgcttccttcatttaaaaatatcgggatgactgcaccgggcgaatatcggtcaattcgccggaataatgccgcagaacatgcgcttgataaggatgctgttcacacgccgattcgtcaatttctattcccaaccccggcttatccgaaatgtgcatacgcccctcgcgatagatcagactttcattggaaatgtctttgcggtagctgacgtcgctgtacatgatttcgagaatagaaaaattgggacagcaggccgccagctgaagggtcgccgcattggcgaccggcccgctcgggttatgcggcgcaaatgcaacataatgggcttcggccgccgccgcgatttttttcaattccaacagcccgcccgcatggctcacatccggctgcacgtaatccgcggcccgcagcgcgaacaggtccataaaggagcgcagggaatacagccgttccccggcggcaatgggcaccggggatttatcccgcaccgccttcaaagcgtccagattgtccggtggcacgggctcctcaaaaaacagcgggtcaaacggctccagctgccgggcgattttgattcccgttgccacattgaagcgaccgtgcccttcaatgagcaggtcaacctcgccgccgacggcatcccgaaccgccccgatacagctcagcgcctcgttaagagccgtattcgtaatgtccatgtagctctttccgaatggatcccattttaaagcggtcacgccgttggccgccgcttctttggccttatcagcaaattccgccggcgttttggccccagagaaccaaccattggcgtagatcctgacggattcccgcacttttccgcccaacagctgataaaccggcgcgttcaaatacttccctagaatatcccacaaggccatttccacgccggacagggcggacattaacacggccccgccgcgccaataggcatcccggtagatatcgtgaacatgcttttcaatggtaagcggattttgccctgtcaaaaccgcctttaaatgctccacggcccccacaagcgctttttccttatattcaagagtcgcctcacctaccccgcaaagcccttcatccgtatataccttaataaaaatccagttggttcggtaacagtcagtcacaaacgtgcgaatatcggtaattttcaagaaaaatcccccttatttgcgccgcccggcgataccggaacgcagaaactaaacggttttttcaaaaaccgcgcaggcgacacgatgtgcttccatggttatttcccggttcttaaacgagaaacgaacggcctgatccctgcggttggcaaacgcatacagcctatccccctgagagcggtaggcgcccatgaccactccctcgggcagtgcgacatcttcctccgacacaaacgtgccttcataaaagaaacgccgataggtctcttttaaatccagcaagcccttgagatattccgcgtatcgaggcaaagcggttatgtgagtttttcggccgcggtagatagacgcgtcaaaaatcaaacccataacaaacgcgtagttcagatgatcctccatgccctccctgtcgtcatgcagaaagcgatcggaaacaataagttccgggaacagggaacgaaacatctgaggatacgcctgcggggcatagaagctgccgacgctgcagccgtggataaagtcaaactgcgcggaaaaaacgtccgtgaggtgctcggttcccatcgcctgttccgacgccaaagcgtttcgcaaggcttttatgttttccagccggtatacggcttcttcgtcgggccggaagccgtgcttatgcgtttcgtgaaagcacagccgcgtcaggcagccgccaatttgatcataaaacgtcgcgtccggatgaaacgacagcaacgtgttcgtcgtatccagcagctgctgcttccaatcttcggccgcatggcagccggatacaaaggttttatagccgaaattccgcagtacggttccgttgttggaaaaacgataatgctcccgatattcgttgccgtctatatccatctggcaggagcgcgcgcccttttcctgataatacgtggattttacgtcaatcagtttgccgttggaatataaaatcacacggccgcccagggcctgtatttcctgaatggcgtcctgcaggccccgttctccgcccagggcttcatccgcttcgtattgcggatacccgttgtcaaaacggcctttccaccagccgaaaaccagcagcgtatggaggccaagcgccgccccgtccttataaatttgtggaagatccgcatagcgaaaaaatatttcgccgtattggtgtttcataataatgcgctgccagccggccatattcctgacccacttcggtttttcaaccggcgtataccaggtttgcacccattccttgtaatccgccgcaccgctgcgccaatctcccttgaacagcttgacaaaaaccgccggcgtcgtaatcgtttcccccgttctcgcaaacggatactgggacaccgtcaaaagcagccgctcctcctcgtttcttggcgtcgtccccacattgaggctgcaaatacggaagcggtcgtccttgcgcgcgagatatagaaaatagccgccgctctgtacgccaaaccagcacatgctcaacggcgcggggtaaacgttgctctgccagatgttgcaatagtcagccgccatatattccgtatggcagctttttcggacgaaatcccttgggttgacaatgcgctcccccatgccgtttggcaagtatagaacttcttcttccggcgaggaacacagcctgtcaaaatcaaaaaacggaagctgaatttcattgaatcgcacgggtgaatgattgtcaatggtggcgaaaaacagcagcccgccatccgattcctgtatatgtatggtgagagctatgtcgtaaacgttcccgttttcggctgtaagtgtgctgtaggtaacaaccgtttccttcgcgtttttctgaatggccgaaggattttgccgggacgatacgacggtcatctcgcgatactctccatcgtccagatgggcgcgccagaagtcggaacgctcgtggatgttcatgggcagcccctctgccgtcagctgccaggcatggccggccggatccggtgtgtattgcagtttcatggtacgcaatccccctatcgtttctttttcatctcctttcacagtatagcaattatccgcggtcggttaaataaagcagcccggcttatatttgacttatagtgaacaagatggtatgatgattttgcacataaggccggagttttccacaacgggaccggttgcagcgggctgctgcgcaaggaggaatttgaactgccgtgtattgtctttcatgggagacgccgctctcctgccgcatgttcggcagaatgcggcagacgaagggctgggaacacaacgggcgtgtattagccgaggatttgctggtcatcgccctggacggtcaggcggaattcacctttcacgatcaaaggcaccccgtgcatcgcggggatgtgttgtacataccggccaacacctggtatcaagcgtattcggccgattatcttgactattattttttccatttttgcggtggccgagtgtcggcggtcagtgaagaggagtgtcggcgctttaaggaatacgaggaccagctgcagacggcctccacacgcgctttttatctgccgcagacagactatcatctgcttatcgacagccaagtatccctcggcgagcaatttgatcatgttttatactatatttccaaatgccaggggtgcctggtgcaaatggactattacaaaaagctgcagatcgatttgtggatgtcacaaatgcttgtttttctgtcggaatatacttgcgccaaactgtttatccgcccgagttatcccgctatcttgacgaagatactattgtacatccaaattcattataccgaaccgctgacgcttacctctctggccgtacgatttggcgtttcaaaatcctatgtagcgcgtctgttccgcacgtgcctgtccacgaccgtttccgcttatatccattcggtcaaaatgcagcatgccgccgaaatgctgaagctgtcggctctgaatgtcagcgagatcgccgagtatttgggatattccaatgtatattatttttcacgcttattcaaaaaatactatttcgtgagtccttccaaatttgcataacccgtatcatgcgcgaagtgctggtctaaggcagcggcccgctatgggaacacagtaaaattaataacaacggaagtgattataaaaatgaaccacattagtagtgataaaatggatgaattaaaaaaagtagctaaacttctagcggtaatgggtgtaagaaataacacagacttagaagaattacatgctggaattacgccttcttcgaaaacgggggattactctgatgtaaaagtaataacgccctacggagaaattgaatggaacaggctgtctcgcatcagcgacaaagaaatgcgttcacttatgctgagcattgaacaggctatagaaaaaactctctatgcatatgaaaagcttcagcaagaggataaagccgtgctgctggaattgataatgaagcaaaggacatatgaccgggacgattgggatacgataagcgaacaagatacatgagcattttttgctttttcccgaaataatattatctatacatcttttatatagcctctcttcatgatagagaggaaaaactactctttttttcagcgttgatgtgaatttccaggctttttagatcgaccttcctcgcctgcttgaccggccattcccgaagaatggccggttttctttataaaaaagcttcatttattcctgtgttttatgatatactgattctatatggcttcgtacggaatttacatagaaacggaggaacggcgtgactgtttatctgacgattgcggcctgcattatcctgttatgtgtcctgctcaaccgtctgtcttttcggttcggtgtccccatgctgctgatgttcatcgttctggggatggtatgcggcatcgacggcctgctggggattccttttgacaactacaagctggctgaacagatttgctcgacggctttgatttttatcatgttcaccggcggcttcggcaccaactggccccaggccaagccggtggccgtcaaggcggcggcgctgtccacggtgggggttttcctgacggcactgctgacgggcggcttctgctatttcgttctcaaaatccagctgtgggagagctttctcatcggcgccattctcagctctaccgatgcggcgtcggtattctccatcctgcgctccaaaaagctgggcctgaaggaaaacacggcgtcccttctggagatggaaagcggcagcaacgacccctgctcctacatgctgaccgccatcgtcctgtcggtcatgaacggcaaggccgacgggggccagatcgcgctgctgatcgtctcccagctggttttcggggtgctgttcggcgccggcatcgccgtggcggcccggctgtttctcagccggttccgtttcggctcctccggctttgatatgacctttttcatcgggctggccctgctgtcctacgggctgccctcgctggtgggcggaaacggctacctcagcgcgtacatcgtcggcatcgtcctgggcaactccaaggtgaaaaacaaggccccggtggtcaactttttcgacggactgaccagcctgatgcagattctgatctttttcctgctgggtctgctggccacgccgtcccaaatccccgctgttctccccgccgcggccgccatcgcggtgttcatgacctttgcggcgcggcccctggcggtgttcggcctcctgtccccggcgcgctgttccatccggcagcaggtgctggtgtccttcgcgggcctgcggggggcggcgtccatcgtgttcgccatcatggccacggtgcacgaggcctccacccgcagcgacgtataccacatcgtgttctgcatcgtgctgctgtccatggcgttccagggctccctgctggccccggcggcgcggaagctgaacatgtgcgacaaggacatcgacgtgctcaaaaccttcagcgattactcggaagaggtggatatgcgctttatctgcaccaagctgcccgacgggcatgaatgggtggggaaagccctgcgcgatttgctcctgccgccggacaccctgatcgtcatgctgctgcggggagaggagcgcatcgtccccagcggccggaccgtcctgcaggccggggacgtggccgtgctcagcgcccgcgccttcgtggagccggcgggtcttctgctgactgagcaggccatcgccgcggacagcccctgggcggaaaaacggatcgcggaattctccccctccggcggcgagctggtgattctcatcctccgcaacagcaaaacggtcatccccaagggggacacccgcatcaaagcgggggacgttctggtcatcgcttcccaggaggaagcccttatacaggcataaaaaggcgcgccgggtatcccgcaagggaaaccgcggcgcgccttttgcgcttattccttccggctgtccgccggctccacctcctcatagggggcggggaaccgcttgaagcggggatggcggcgctggaagagcacgacgttgaggatactgcccacaaacaggatgttgcagcaggtatagagccagaccatcaggatgatgatggaggccagagaaccgtacaccagggaatacttggtggaataggtgataaagatggagaacaagacgctgaccaccaccaggcagaaggcggtgagcagggcgccccagaacaccgagaggcggggccgctgccggggcgcgctgacccgatagaggccgtaaaccatcagcagcacgaacaggaacagcacaagaaaacggatccacgtccagcggctgatgagatagccgatgccgaaatgggtgtccagcagctcgatgaaccaattgccggtcagcaggatgatgatacagaaatacaccgagatgaggaacacgaaggaggccgcgaagctggccagccagtggatgaaccggcggggctggcggcgctcatagaggctgtccatctggttgccgatggtgcggtaggcagcggaggaggaggacgccatggtcagcagaccgcccaccagcatgggaatcgaccgggactgggcgatataggccagataatcctggataatgctgatggtttccccgggtacaaagccgccgaacagcttgcccacggcggaaatatccacattgaggataccaataagccagttcaggcagagaagaaaggggaaaatcgacagggtgaggaaaaaggacagggcagcggcggaacgcgtcacctgctttttcaagaacaggtccacgctcctatgtaccacccgggcagcagccagcacccgacgcgatcgtattttcactgtggccccccttccgcggcgtaccacgccggcttgcgtggtttggtgtcattataccaaggcggcacggagcgccgccctccttagtccggaacggccttgtccgttccggggtggttccatgttctctcaggcgtccaaagccttgcgatgcaaggctttggacgccgtgaggttattataccacaaaagcaagcaaacgacgtttgcgggggcacgacagtgccccgccctgccgcagcagggccttttgatggtacaatgttctccataccggaaagcgacgctttccggtaaccgcgcagccgcgcggttcggcgcgtaccaccgcgcc

SEQ ID NO: 2421 - DNA, 8135 bp, Unknown
  16S sequences of unknown bacteria
cttgggacccgccaaacatgagaaagtagcgatttacgtagtaaatcagcggatttcgaatgtttgcagaattgcgggagctgcttcgcagcggagcaattcgtaggcatcagttggggtcaaaaggtcaaaaagccgttacaacattacaacaagaaaaggacacagatacaatggaaaacaaatgggaactgcttgagtcctccaatgaggaccgggaaaaaatctggacaaagaaccgcacctttgcaggagacgtatggttccgcttccgtcataagccgacggcgatcgcaggactgatcctgattttggtgcttctggtttttgcgtttatcggaccgttttttacagactacagctattcaaagcaggatctggatctggtcaacattccgccgcgtatgacggtttatgtgacaaaggatcattcaggttatctgtatatcacccagtccttaaaggtcgtatgggtaaatcaggacgggacactcggacgtcagctgacgaagctgcgtgatgaaagcgcatcttcgatggtcatttttgactgcaatggtgaggagatcggccttttctatggcatcaagccatatctgatcgcagatccggcgacccgcgtcatctatgagactgcgcaggtctggaatcgctcctatatcctgggtacggacagcctcggccgtgatatcctgacacgccttatgtacggcacacgggtatcactgctggttgcatttatcgcggttgtcgtaaacatggtgatcggtattgtctttggtggaatttcgggctacctgggaggtatggtcgatacagtgatgatgcgtattgtcgatatcatcagtacgattccactgacgctgtacgtcatcctgatcatggtgctgctcggtgcgggcatccagagtattatcatcgcaatcggtacgacctactgggtcgatatggcgcgcgttgtacgcggccaggtactgagcctgaaaaatcaggaatttgtcatggcggcaaagacgatcggctcttcgacgaagacgatccttcttgagcatctgattccgaattcgatgggatcgatcctcgtcacagtcacgatgctgattccgtcagcgatctttatggaggcatttttaagctaccttggcattggtctgcagccaccgctcgcgagcctcggcacgatgtgcaacgatgcgacgcagaatttgcggacctgcccgtatcagcttttcattccggcacttgtgatctgcctgattatgtttggctttaattttatcggagacggactgcgcgatgcactggatccgaaactgaagaagtaggaggcggagtatggaaccggtaatacagatcaaaaatctcagaacctcatttatgacgagcaacggagaggtacaggccgtgcgtggagtcagcttttccgttaatccgggcgagattctcggtgtggtcggagagtcgggaagcggcaagagtgtgacttcgatgtcaattctccgacttctggcagatacggcagtgataaaggagaactccgagatcctttttgagggagagaaccttataaatgtaaataaaaagaagctgcggagcatccgcggtgaaaaaatatcaatgatttttcaggatccgatgtcctcaatcaatccgctgatcccggttggcaagcaggttggtgagatgatcagagagcatcacagggatcgcagcaaggaagaaatccggcaggaggtgctggagctgttccgcaaggtgcggattccggagccggagaagcggtatggctgttacccgcatgagttttccggcggtatgcgtcaacgtgtcatgatcgcgatggcattggcgaataagccgaagctgctgatcgccgatgagccgacaacggctctggatgtgacgattcaggatcagatcctgcggcagctgcgggagctggaaaaagaatacgggacgagcatcattttcatcacacatgatcttggcgttgtggcagagctctgcgaccgtgtcgtcgtcatgtatggtggtcttgtgatggaggaggcgtcgatcgacgatttgtttgagcatccggggcatccgtatacgatgggcttgctggcgtcgatgccggatatcgagcaggataaaagcgttcggctgcagccgatcccgggatcaccgccggatatgacaaatcctccgaagggatgtccgtttgcaccgcgctgcccgtatgcgcgtgccatctgtgcagcagagcttccggactttgtctccgtaggggagcggcatcagacgcgctgctttttgcagtatgaggatgcaccggcagatgcgcacaatccgttcaaacaggataaaataaaagagtgagggacaggcaatgagtggagaaaatatactggaggtccagaacctcaccaagcattttaaaatatccgggaagcagatcgtccatgcggtagatggcgtgagcttcaccttgcagaaggggaagacactcggactggtcggcgagagcggatgcggaaaatcgacctgtgcgcgcacgattatccggatgtacgatgtgacagacgggaagatcctgctggacggggaagatattaccagtctgaagcaaaaggagctgaagcctctgcgcaaaaagatgcagatgatctttcaggatccgtacgcttcgctgaatgcccgtatgacggtacgcgacatcatcgcggagccgttggtggcgcatggaatcgtaaagaaaaaaagtgaggcggatgcgatcgtttatccgatgctggagcgtgtcggtctgacgaaggagcatgccagccgttatgcacatgaattttccggcggccagcggcagagagttggtatcgcacgtgcactcgtactgcagccggatgtcgtgatctgtgatgagccaatttctgccctggatgtgtcgattcaggcgcaggtcattaatcttctgaaggattatcaggaggaacaggggacgtcttatttgtttatcgcgcatgacctttctatggtgcgctatgtatcggatgatgtcggcgtcatgtatctgggacagctcgttgagctctcagaggcagatgagatctataagcatccgttgcatccgtatacgaagggactgctcggcagcattccggtcgcgaatccgaagctcgcaaggaaaaaggtaaacagcagcatcgagggcgatatcccgagtccgatcaatccgccgacgggctgccgctttcatacaagatgcccgtatgcgaagccggagtgtgcgcaggtaatgccgcagatgaaggatatgggcggcggccatatggtggcctgccatttatatgatgatacaagggtcaaaaggtcatgcgtttcatgcttgcatgaaaaagcgtgacttattgacccgtgtatcatatgattaaacggttttaagagccacaggctctgaaacatagatgtatttcatcaccacaggcgccgggatacggcgtgctgtcaaccacacaaggaggagagaaaatgaaaaaaagactgagctttcttctggcagtcggaatgatctgcgcaagcgcatttccgggtgtcgcaggtgcaaccacaatcgatgacctgatgcaggccggtacagaaggtgcggaagaggaaaccgcaggggaagctgcgctcgcagacgcgcaggaaatcacttttgtactgaacaaccagccggatggtatcgacccgaacgtgacgaacaattcctttgcgactccgtttctggtcaactgcttcgaaggtcttgtgacttatgacgcagcaggtgaggtcgttccgggtgaggcagaatcttgggatgtcaacgatgatctgaccgtttataccttccacttaagagacggactgaagtggagtgacggaagtacacataccgcacaggattatgtatattccgcactgcgtgtcctgacaccggagactacggcacagtatgtaaatatgatctccgattacgttgtaaacgcacaggagtactatgacggaagcgtatctgcggatgaggtcggcatcaaggcactcgacgatacgacgctggaatttgatctcaaagctccgtgcccgtattttgtagatctcgtaagtatgtgggtatacgatccggtacaggaagcaacgatcgaagccaacggcgacaaatggacgaacgcagcagatacctacatctgcaacggcccgttcaagatcaccgagatgaatatgggcgagaatgtggtactcgagaagaatgagaactactggaatgcggaaaatgtaacgctcgataagattaattaccgttacattctggatacctctacagcactgactgcttatgagagcggcgaggtagacggtgtgagatccatcccgtccagcgactatgcacggctgaaggcagaaaatgcaggtgtacagatcgaggcaagctacggaaccgtatactatgatttcaactgtgcaaaggagccgtttaacaatccgctcgtgcgtaaggcactctgcctggcgatcgaccgtgaggctctgatcaacaacgtggctcaggtagaggcacagccggcgtacagcttccttgctccgggctatgtggttgacggtaaggatatcacagagggacgttctgattacggactttcttctaccgcagatgtagagggggcaaaggcagcgcttgaggaggcaggctatccgaacggcgagggcttcccgaccgtacagctttccttctactcagatgacaacgtaaagaagattgcagaggcaatcgcagagatgtggcagacaaatcttggtattcaggtagaagtgacttcctcggactgggctgtattctacgatgcggtacaggccggcgagtatgatgtggcagcaatgggctggagtgcagactatgtcaatccgatgagcttcctgccgctgctctatacggatgatgtatccaacaacgtcttctacagcaataaggactatgatgcggtcgttgatcagattaaggtagagaaggacagcacaaagttcgcagagctcgttatgcaggcagacgagattgcctccaacgagtatccggtacttccgctgtattacaagtcgaacaactatctgctgaaggattatgtaaagggcgtttatatgacctcttcttctaacatttacttcaaggacgcacaggttcttgctcactaaaaccgtgaagcttgcagatccccgggccacatagctgtggacggggatttgtctctacacaggaaacagagaagcggatagcaaacaggagaaattatgcgttgtacaatagttacggaaggttttggagatatggtctttgagctgtatccaaagcttgctccgattacagtaaaaaattttgttgacacagcacgcagtgggttttatgatggacttgcgtggtgcagaattgtaaagggctatgtgattcagggaggttccccggacaatgatatcatgactgacagcgactggcatatcaggggggagtttgaagaaaacggaatcccgaatccgatccggcacatccgcggtgcaatttcaatggcacgggatgatgcatatgatacggcagggacgcagttctttgttgtacatcaggatgcggcaaagctggacggcagatatgcggcatttggacagatggtttccggttttgaggtgctggatgcgattgcagatgtgccgacatccggaccggatacatggaacaggccgcttacgatgccggtgatcaaagagatccgcatcgaagaagaatagatagagctgaattcttacacaggacgcagggactacggcagttaccgtggcccctgcttctttgcgccatggggtgcgccatgtacgtccggggtgggggctttggaagtgacggatcaggcacgacggcagcgttgcgggggatggcaaagctggcagatctgtgctgcccgcggaaaataagagaagggaatatgggggaattatgaattattcagatattctgatttatattatggaaatgctcggatcagtcgcatttgcgtcgtccggcgcaatgctcgggatcgagcggaaaatggacttattcggggtaaatgtgctcggtgtgacgacagcagtgggaggcggtatgatccgcgatctgatacttgggatcacgccgccggtaatgtttcaggatgcatcgtatgcactggcagcggtagcgacttcgacgatcctgttttttattgtctatatccgacagcagctcttttccggcagccttgcagtctggtatgaccggatcatgctgatctgcgatacgatcggccttgggatctttacggtggtcggcagcagtgcggcgatcgacgcaggatacggtgataaccgttttctgatcgtcttcgtaggcgtcctcacaggagtaggcggaggaatgatccgggatatgatggccggaacaatgccgtatatttttgtgaagcacatttatgcggtggcgtccctggcaggcggattgctttttgctttgatctatccatatctgccgcgccttggcagcatgatgaccggtgcggtttttgtaatgctcctgcgctattttgcggcgagataccggtggaatctgccgcgtatccgctgatcactgttccatttgccgtcccatgaagccagcggcgcatttgacgagtgcctgctcagtctccccgatggggtgccggatatcgcggcagcgcaggatcacggatccgatgacatctccctcacagaggatcggactgatgacctgcggcatcgtttcatccgaatcgtcccgggtgattttaacgggatttttggactggacatcagagatgacatattctcgttcactcatgatctcctcgagctgtccggtgaccggggtgccgatgctctctttttttatgccgcctgcgacagcgatgacctgatcccggtccgtgatgcagacgctctgaccggaagcggaggccagtgcttccgcgtattcttttgcaaagcttccaagctccccgatcggggagtatttttttaatataatttccccttcccggtctgtgaaaatttccagcgggtcgctttcacggatccgcagtgtccgtcggatttcttttggtatgacgacccgtccgaggtcgtcgattcttcttacaattccagtggctttcataaaaattcctccatttatagtacgatccgtttctggaaatagtatctgtaaataaaagggttttatacatacgagcagccttcttgttgccgtccgtcaggcgggacaacggagaaaaacgaaaaaagttctggtatctgcctgaaaataatgataaaataacattctgtgaaagagtataaagaagcagagaatgaatgacagggaggaaatccagatgaaataccgtgaggagatcagcaatatgatggcgaaacgccgtcatgaggtactggaagtggcatttacgctgtttgcagagcgaacgattgaaaaggtatcggtgaatgatattgcttctgctacggggatcggagtggcgacgatattccggtattttgggacgaagctgtcgctttgcgtggagctgggcgcgctcaagtggaatcagtttgcaaaggagattcgacgaaattatgaggaacagaattgtgtaaagaagacagcttacggggaattctgcttttttatcgacagttatctcttattatataaaaaacatcaggatctgctgcgctttaacgcgagctttgatcagtttgtactgcacgaacatgccagtccggaagcactgaccgagtattacaacagcgtgacgcagttctccgatctgtttcatgaggcatgggagaaagcgcagacagatcatactctccgcacggatattccggagcagcagctgtttgtagggacgatgtatatgatgctcacgatgatgcagaagctcgcaagcggcctgatctacccgcaggagaccgatacgctcattcctgagattttgaaaatggaacagcagatggtgctggagtacgtgaagggcgaggcgatgaaggagacatttcgtggataagctctattaccagtaaagcggacataagcatcccccctcacccgccgcttagtgctccgcgcacttgaagcgggg

SEQ ID NO: 2422 - DNA, 32759 bp, Unknown
  16S sequences of unknown bacteria
tacagcggctgtcacactctgcccgtctttcggggcggagcagagagcctgtgaccgcgtgttccggcaaaacccgagcattgcctggcagcgccgtcatcagacagcagaatggagcaggatatgaaaatcacgaaagcggagctggcagcggtggccgtaaaaagggaacagtatcctccggaagatatgccggagatcgcttttgccggccgttccaatgtagggaaatcttctcttttcaacacgatggtgaaccggcgcaacttcgcccgggtcagcggcagtccgggcaagacgagaaccataaatttctttgaaatcaatggagctttccgtatcgtcgatctgccgggctacggttacgcaaaggtctccaagtcactgagcaaggactggggccctatgatggaacgttatctcgagtcaagaaagaatctcgtcaaggtgattcagctggtggatatccgccaccagcccagtaagcaggacgttcagatgtatgaatatctgaagtatcacgggctggcgggcatcgtggtggctaccaaatcggataagatttcccggaatgaagctgcgaaaacttctgcggttatccgcagaacgctgggaatgaaaccggaagaaccgctcatcgccgtctcgtctctgaaaaagaccgggtatgacaggctgatagatgagatcgaaaatctcgtggaagcgtggagagaagaacatccggatatttatgcgcagacgcggaacggatgatttcgacgaagaggaaaaagttccggcgcagagagaagtctgtatcctgcgtttcgcgagttgagaagtccgggacgccgcccggtaaaatacggtaaataatacataaaagaggaaaaatatgcaatttgtctcatttgcggtgcttggaaagcgcataaaatccataaaagctcttttaaaagatcctaatgtcccaaaacgcaagaaattcctcgttatttttggtataatatatctgctgatgccgatcgatctgatcccggcgcctgtactgattttcggattcatagatgatatcgtactttggctgtttattctcagtcatctgaaagatgaactggatcaatactggaaggaatcagaggaatcctttttcgcagaagatgatctgagagaccgaacgatcatcgaaacgacggccgatgaaaccgagatcgacgacacaaagacggaggaatgagaagacggcggcggtgtttcgcacaggaggaagagaatgaaaccgacagatatttccggatacgaaataggcggcattatgctgtcaaatgaagaattaaaagcgagaataaaggaactcggagcgcagattacacaggactacgccggagaaaaaccgctgattatcggaacattaaagggtgcgtttatctttatggcggatctcatccgggaaatcgatctggatcttgaaatcgactttatctccgcttccagctacggcatggggacagagtcttccggaacgataaaaatccagaaagagccggacgcggagcttgccggcagagatattctcatcgtggaagatatcatagattccggaaataccctgaaatatctgaaggatacatattttgcaggtaaaaatgtaaaatccgtaaggatctgcactcttctcgataagccggcccgccgtaccgcggatatcgtgccggattataccggattttcggtagaagataaatttatcgtcggctatggtctcgattatcaggaacgtttccgtcagcttccgcatatcacctggctggcggagaaaggcgaacagcaatagatatgatatctcggcgggacaggtgtttttcgcttctctgaaaagacgttttctttggtgcggagcggatgagagcgccggtttcgctaaataataaaataccattttcatcaggcaaaattaaggaggaaaaaatgggatacacagtacctgcaggaatttctaacaaacatttacacgtttctgaggcggacttcaaagttctcttcggagcagatgcggaaatgacacacttcaaggatctttctcagccgggtcagttcgccaccgaagaaaaagtagatatcgtaggccctcgcggaacgctgaaaggtatcagaattctcggaccttacagaaagcagactcaggtagagctggctcgtacggactgttttgctgtcggtatcgatatcgttctcagagagtccggaaaactggaaggcactcctggatgtaagcttgtaggtcctgccggagaagttgaaatcgaagaaggcgtgatcgtagcgaagagacatatccatctgtccacagctcaggcggaagaagcgggcgtgaggaacggcgatatcgtaagcgtaaagttcgacggcccgagagctctgactttcgacgaggtcgtcgtaagagcgggtgatactcacgaacgtgacatgcacctcgatacagacgaggcaaacgctgcgggtctgagcaacggtcagctgggcgaaattattaaatagccgcggaagaccgtatattttattcgttacataattccggcggcgcattttcatgtgccgccggtttagtcgcaggaaagaaaagaggatcgtgtggaagaattaagcaaggttatagaatatacaagtgtaaaaaagacgactactgtcggtgatgtgaggagtctgtgcaagcaggcgcttatcaacaattaccgcgctgtctgcgtgaattccggttttgtaagattctgcctcgaagaattcagaagcaaccgtgatattgtcatcgtttccacggcaggctttcccggaggaggcggttccctgaagtcgaaggtatatgaagcgattttcgcggcggaggaaggcgcaaaagaagtggattatatgatcaacatcggatttgtgaaggatcgcaaagataaggaaatccgggatgagatcagaagcctcgtcagaaatacaaaaggtctggcggaaagcaaggtgattatcgaagctcctctgctgacttccgaagaaatcgtgagaatctctacgattgcggcggaagaaggcgcttcgtatatcaagacggcatccggatttgagggacctactacgccggatatggtcaagctgatccgaaagacggtaggcgacgcctgcaagatcaaagctgccggcggtatccgtgatctggcagcggtgaaagaaatgatcagggccggcgcggatacgatcggcaccagcacactgatcaaattcgacgagtagccggagaagttcagcaaatttgaatctgctgaaaatttaaatattccgaaatcagtgccagccacagggtgaggcagaaaatactgaaaaaataacgctgagttcgttaaagctgacttggcgttatttttttatgcccggctgtcacgaaagactatgaagaaaaagcgggacggctgcgtattttctgtcggagagagaagacgacaaggcgactgacgatagaggaaaagtccaaggaaacaggagaatatcctttcgggcaagatggtacttttattctattgcggataaatagagaagattcacatatcagcgttttgcagcagttttttgtaattatgctaatatatagttgtgatattataaatgaattaataaaataatgaagcggataattctggtacagataatagcatatctgtacgagcagtggaactttttccatatcagaaaatgggaaaaaatggagaatgaatatatcgatagatgggatcaagtcgcttatgaaagtgctgaaagtccggattagttgattagataaagccgaagtaaggtattcagaagaataaaaaacggtatgatgattatcataccgtttttttctggttttgtctgttttcgggcataactctgcttttattcgcttttgatctgctgcagacattctgcgcagacattctttccgcgaattgtgataacatcttttgcgttgccgcagaaaatgcaagcaggctcatactttttcagcatgatgtagtcgccgtcgacgaagatttcgatcggatcttcatgacgaatgttgagtgttctgcgaagttcgatgggaagaacaattcttccgagttcatcgacctttctcacgattcccgtagccttcatagagtatctccttttctgaatgtaccgcaagttatgaaaatagtttttttatagcgacaagtgcgttaatcaaactgacagcggctttaaaggaatttttgttttctgaaataaaatgagccatgtccaccgaggattccgagagggaggaaacggcgtcctccacttctttcgaagcgctggataccatccccgtgaccacctgagtatcctcgagaattccgctgagggccttaaaggccggaatgatgtttttcacggccctgatcatataaatcagcagtattacaacgcaaacgccgactaacagcagcagtgcatctcctatagttatagctgtattcataataactcctggtaatacccgccgatacggacaggtaaactggcatgcccgggcatgcggttttttcagttgttttcctgataatatattattgcgcattttcctgaaatttacaactattttccagcaattttttttcgacatcttcataaatatttatgaggaccttttgtcaaaacctctggatccttgaaagatcaaggctgatgtgagatggaaggattgaaaaaaagaggtggatttatgaataaaatttggtttggaatgttatttataggatttgtatgctgtgctgccggagcggaagggtccggcggctttgaaagtctgactcaggaaatgctcgccagcggagaagacgcggtgtattttgtgatcgggctggtgggaatcatgggaatgtggagcggatttatgaacatcgccagagggtccggtctgatacatgctctcgcgagaaaaagcaggggactgatgacacgccttttccccagggaaaagaatgaggatacgctgatgatgatgctgatggggtttaccgccaatattttcggcgcgggcaacagcgccactgtcttcagtctgcaggcgatgaagatgctggatgaggagaacgggggcagtcctgtggcgagcaatgagatgtgtatgttcgccgcagtgaatatgtcgatgctgcagctcatccctattacggtgatacagatccgggcaaatgcagggtctgcggcacctgaagatattattctgccgtcggtgatttccgggtttgccgctacgctggtcagtatatttgtatgtaagtattttgaaaaacgggatggaaagcgccttcgagatctgtggctcagcagaccgcagtatgagaaaagtctccggagagctgaggctacgtctgtcggaaaagatcttcggaaaaacggtgaaaaacagcggtataaaaccgacgccgcgtcagataaagtgcatgggtattcagaggatctgtgtgaagcagatgggagaggcggtcagagatgaatgaatttttatcggggctgtcaggattatttctccctgcgctgctgggagtgattctccttcacggatttttgaaaaaagcgcctgtctacgatttgtttgtagaaggatgcagggacgggatcaaatcggcggtggagattacgccgtatatcatcgcggtttttctggtgattcagattatgacggattccggagctctcgggcttttggagaagctgtgcggaccgattctggagcctctggggataccgagggaactgatctcttttatgatcatgcgtcccgtctccggcagcggcactctggcgatcatcgaaaatatcgctcagacgtttggaccggacagttttttatgccgctgtgcttcggttatgatggggagcagcgagactttgctctatgctgtagccgtctatttcggggcgacgcgggtatcctcgctgcgccacaccatacccgcgggagtggcgggatatgcggcaggaatctggctgtctatcgtcttatgcaaaataatgtagggaaatattaatgattttcgaataattttatagaaatctacataatgacaaaataattctaagaaacggatcgggaaatccaacgatattttttagtccgattgcccggcgcgatattctggtgtataattcaaatcatagcaaagttctgatacgtttgtctgatcagagcgcatggaggcatgcgatacagcatgcagagcacctgcgctttccgtctgtcgtaggggctgtgactcttccgaaagaccggagacggatttcatctgcggaagcgccggtaaggtgttcgcgaatatattagatggagatgatcagattaattcaggcaaaatttaagattgtctttcggggagcaatctgcgggaaaatataaaaattctggcatttgaagcgaatgctcctgccattcttgacgtgatgatttgaatcgaatataataataaagatgctctggtgagttgaaatatttcgtatattccgaggcgaagatgtctgtggaatatattatctgatatattgtcggagggaaaaagtggctaagtttttagtaagaaataacggaccgctgaaaggggaagtgacgatcagcggatcaaagaattccgttctccctattatggcggcgacattgctgaccgatgaagaatgtgtgatctgcgatgcgccggatctcagagatgtcgatgttatgtgcaggattctcgaaggactcgacgcgaaggttcaggccgattttcagcagaatactctgcgtcttcacgcggcggacatgacgaagagcgaagctccgtttgatctggcgaagcggatgagagcttccattctgacgatggggccgattctcgcgagaaacggaagagcgagagtcgcgcttcccgggggctgtgccatcggtgcgagaccgatcgatctgcatttgaaaggttttgaactcatgggagcgaaggtggaatacgctccgaattatgtggaagcgtcagcggaccgtctcaagggcgcgagaatctaccttgattatcccagcgtgggcgctacggaaaatattatggccgctgcggctcttgctgacggcacgacgattatcgaaaatgtagcaaaagagcctgaaatcgtagatttggccaacttcctcaacaaaatgggagctaaggtcaagggcgcgggtacggatctgattaagattgaaggagtggaacggcttcacggcacgaaacatatcgtcattcccgaccggattgagacgggaacctttatggtagcagctgcgataacgagaggtgatcttctcatcaaaaacgtggttccggatcacgtcagaccgatcatctctaaactgatcgaatgcggctgtacggtggaggacacgattgagggcctgagggtcaaagcggatgagaaagacttggtcgctaccgatataaagacgctgccgtatccgggatttcctacggacatgcagtcccagtttatggcgcttcttactacggtggaagggcgaagtaccgtgattgagacggtattcgagaacagatacatgcacatcagcgaactgaaccgcatgggtgcggatatcagcatcgagggccggagcgcagtagtacagggcggagccagcctgtcgggctgccaggtgatgtctaccgatctcagagcgggagctgcgttggtgctggcgggcctggctgcgaaaggcgtcacagagatctccgaaatttaccatatcgagcgcggatattctcaatttgtggagaaattgagagccatcggcgcagggattgagcgggtagaatagaccgttaaaaaatttatcagaaatagacagaacgtcctgcggattgctgtgaaaatccgcgggacgttttttcgtcccgtcggaaagcgggaattttgtgaaatgacgagaacttatagaaaatccaatatttttaaaaatgagaatgacgatatgtgatataatgaaaaacaatatttatttaatgatattcattaaataaatgttgaaaatcatttaaaaataggatatttttgtatcgcgtccaagttttttctttcggcgtcgcgggtttgtacagaatgtggaagaggaggtatttataatgctgcgggaggacggacaaaaaaatgatttcaagctggatactcaaaaggcgcaaaagcaggaactgttgcatcggatggggattgttttcggttttgctctgttcctgacgggattttcctcagcgggagggttattgtttttgtgcagggggattgcgggacgcgtctggctggaaatcggcggcgcggaatttgcctggcgggcgctgatctatctggttttgatctgctgttttgtttcgctgtgcagaatcgcctatgatgagcggccgttttccagaactcttgtccggtgcctgcgtgtaataggcggattgtttgttctcggctcttttattattccgcggctttcgggatatcaatccagcggttttgagttcttttccttcggcggtttcgtcttcacagacggctttatcctgctgccggggctgctgaccctcatactcagccgtctgattgaagcgggattcgagatgcagagggaaaaagacgaaatcttgtaggagcgtgactgtcatggcgattattttgagactggaccgcgtgatggcggaccggaagatttctttgaatgagctgtcggagaaagtggggatttccaatgtaaatctctccaatctgaagacgggaaaagtaaaggcagtacgtttttcgacgctggatgcgatctgcagcgtgttgaactgtcagccgggagatattttagagtatcggcgggaatagaaatggattttgaattagcatgacgcggtcttctcaaggaggttgcgttttttgtgcggattgtgcgaataaacctgtccttcttttcatattgtatattaatcaggtgcggcgggtgcaggcggttgccggcactgaacgtgcagccggtttatgcagggagggcaggatatgagaagaagacggacaggtttttccggcaggctgatctgcaggcagagaggcagacggcggtatgcggggagaggatacaagttcttcaatatactttcggtttgtgtatttgcagcggcggtttcgatttatggtctgacgaatctgccggaagcggaagagggcggcgatgtatcggtatttcagggaatcgggtcgctggcggatcaggtcaaagaactgtacagcggaagtgatgcgcagcagcccgccgggaacgtaacattgagccagcttagcggtatatcggatctggaaataaaagtcctggatgatgattcgggaaagattgcagaggtccctttggaagaatatgtggcatgcgttgtggcttcggagatgccgtcggacttcgaaacggaagcgctgaaagcgcaggcggtggcggccaggacttacgcttctgcgcggaagcaggaatttgaggccggaaagtgttctcattatgacgagggggcctatgtgtgcaatacgacgcactgtcaagtgtatcggacggaagaaggcctgcgtgaggtcaagggcgacgaatggatggaaaagaattttcctaaaattctcagcgcggtgtatgagacggcaggtgaagttttatattatgacggctcgctcgtagagcagccgctttttttctcttccggcggtgaacgtacggagaattcggaggacgtatttgtcagcgctgttccttatctgcgcagtgtggaaagcggcgcctatgaggaagaatcgccgcataaagatgtggaagtgacggtgacgatggaggacgtgaagtctaaggtatccgctgcttacggcgcggaagccggacagtcggtgacggctgagacgattcaggtggtaagccggacggatggcggtgcggtggcagaaatgaagatgggaaatctggaactgacagggcggcaggtgcgcagtttattcggtctggcttcggcagacttcgaggtaaatatcggaaacggcgaggtgacttttgtcacttcaggcagcggtcaccgggtcggtctgagccagtacggggctaacggcatggcaaagcaggggaagacatatcgggagattctcgaacattactattccggtgtggaggtaaaaaagcaaaagtgataaatcatgaaagcgtttttcggtcaaatacgcggtgagagaatcacaccgagaagaatgccggggaagcggatgatctgctgatatcaaataagaaaaagcggccagccggccggaaatatcctccgggaaatccgaagttttccgaccggcgagccgctgtttttgtatttctgttttgtttgattttattcttccatcagcatttcggccactttgtagatgtcacctgcgcccatggtaatgaccatatcgccttcctgggcgttgttggatacaaaggcggaaatttcttccagactgtcaaaatagtaggcttcttttgccggctgattttttttgatctcggtgatcagtctttttgagctgattttgtagatatttttttctctggcggcgaagatttccgccatgatcagcacatcggtgtcgtcgaaagctgtgacaaattcgtcgaagagcgccagggtccgggtgtaggtgtggggctgaaagagacaccacagacggttgtggggaatattgcgggcagctttcagtgtggctctgatttccgtaggatgatgagcgtagtcgtcgatgactttcacattgtttttcgtagtaccgatgatatcgaaacgtctctgtgtgccgtgatactggcggagcgtttcgatgatgatttccggagctacgcccagcgtatgacaggctgcaaaggaggccaaagcattggagatattgtgttctcccggaacttccagctgtacgcggcccagcaattcgcctttgctccgcacatcgaagagcggatggccttccgaattgaattcgatatttgcggcgcagtaatcggaattttcgctgaatccgaaagtgacgacgcggcatccggcgtcggagatgactttatttacaaacggatttgcctcataagcgatgatgcagccgttctcgggtaccagtttggcgaacttatcaaaggaatctacgatgtgatcgatatccttaaaatagtccaagtgatcggaatcgatgttgagaatgatttccatcttcggacggaggctcagaaaactgtccatatattcgcaggcctctgtgacgaaaagatcgctctttccgattttcacattgccgccgaattcgtggagattgcctcccaccagaatcgtcggatccgtcttggcattttccaggatcagcgataccatcgatgtggtggtggttttgccgtgagtacctgatacggcgatgctggaaggataatcctccatgagagcgcccagcgcttcggctctcgtcaccgtcggtataccgtttttctgcgcttgagtgatttccggattttccagagagaccgcagcagagtagacaatcagatctgcgcctttgatattttctgcgctgtgaccttcgtatacggtaattccgcgggactgcagatgttctgtcatctcggacatcttcatgtcggatccggaaacggtgtatccgcgggaagcgaagatctccgccaccgcgctgagaccgattccgccgatcccgatgcagtggatatgtttgtactgactgatatttagcattttctgtaacctcttccgattctgcgcagcgcacctgttttcgcagagctggccggtatgtgatcactcggccgccgggatgatgcggaaagcgcaggacagcgaaaaaagcggatgtgcagatccgctaattgccgcattctatactgatttcgttaaagacgccgaggatatcatccacggatatcgcgtttttttcctcactgtctttatccaatataacactaccctgatgcatcatcaagagccgatttccgtactctacggcatatcgcaggttgtgcgtgaccataatcgtggtcacctttttctcccggacgatctgatcggtcagctccatgatgatctccgctgttttcgggtccaatgccgcggtgtgttcgtctaagatgaggaattcgatgggctgcagggtagccatgatcagcgccagcgcctgacgctgtccgccggacagcgatcccacgggaacgtggaatttatcttcgagaccaagattcaggccgcgcagcatatctttatagtattccactcttcctttatttgttcctctggaaagtccgtaaaattttcccttattgtcggctatggaaagattttccaatatattcatgctgggacatgtgcctttcgacggatcctgatagacccgtccgattcgtctgtgacggacataatccttctgctttgaaatgtcggtgccgttgatgagaatctgcccgccgtccgcacggatgctgccgcagatcagattcagcagggatgtctttccggatccgttgcttcccactaccgagataaattcaccttcggggacggaaagactgaagttttcaaagagaacctgctcgtttacggtaccggcgttgtatactttatggatgtttttaagctccagcatttgtcttcacctttgcctttctgtccatgccggcgatgagaatgatcaggaataatacggctgtgatcagcttcaggtctgtggacggcatacccaagcggattgcgacggctacgcaggccttatagatgatcgatccgataacgacgctggaagtgacccgcagcagcgtgacttttttgaagaggctggtgccgatgatgacgctggccagaccgatgacgacggtaccggtgcccatggaagcgtcgaagaatctctgctgctgcgcgtagatgcagccgctcatggtgacgagggcattggcgatggccagaccgatgattttgatttttcccttatccacgccctgagacgtgacgatggtctcattgtctcccaccgcccgaagcatatagccggattttgtactgagataccagtccagcagatatttggagatcatagtgatgatgaagatgatgataaccgttttgtacggagcgagcggcccctgaaagataccgtccaccaagtcgttgctgaaaatagtcgtcttgtcgtagatcggaaggtttgcccggcctgcgatacgaaggttgatcgtatagagagcagtcatcatgatgatgccggagaggagatcgcggactttgaatttcacgtgtatcacacctgtgaagattccgacgataattcctgcggcaaaagccgcgaagatggcgagaaccggattgacgtctctggcgatgagcgtggctccgatggcagctccgagagggaagctgccatccaccgtcagatccgggaaatcgagtattttgtatgtgatatatacgcccagagccatgacagcgtagatcatgccctgttcaaatacacttgaaatgagagtcatcgtgttgcctccggatgagatgttgtatcgtttgtgtttattctgccgttatcgtgtcaaatttttccgctgctttttcgacgtaggtttcgtcaagtttcagaccgattttatccgcagcggcggtattgatgtacagatcggatttggtcgcctggatataaggcgtatcctctgctgtcgcttctcccttgagaatttttgcggccataatgccggtctgtcttcccacttcgaagtaatcgatacctacagaggcgaggcagccgctcttaacctgttcgatctcgctgccgaagaccggaattttctttgcgttcgctttatccaggacattttggagtgcctgtactactgtgttgtccgtcagattgcagatgcagtccactttttctaccaggtcggccgcggccagatccacatcggcgatggtgttgattcctgtgtccacgatttcaaatccgtaggaaccggcttcctttttatatgtttcgatggaactgatggagttcgcttcgctggtcgtatagatgatgccgattttctttgcatcgggaagtatgtcgcgaatcatctgcagctgttcggttaccggaagcttatccgaggaaccggtgatatttccgacattttttccgtcttctgtgacgagtccggcttccgcaggatcggaaatggcggtgtagaccaccggaatgccggtgtctcttgcggcattatacgccgcggcggcgctcggtgtagcgatggcgcagattaagtccacgttttgggagatatagctgctggcgatggtagtaggcacagaggtatcggactgcgcattgtcatacagtacttccagattttttccttcggcgataccttcttctttcagaccggccagaaagcctttccggcagttatccagagaagggtgttccgcaaactgagaaattccgatcttataggaaccttctccggagacggcgccgtcggcggaacctgcggaatgatctccgccgcatcctgaaagaacggtgagtgaaagaactgcggtcagtaccgaagcaaatacttttttcattttcataataatttcctcctgaatatgttttttgtctgccggtccggctgtccgaaccggaatggaattctggcgagtccggtctgtcggcgcaaacggacgatgtcagcacagcaccgggggatcgcagtcctccgggagttcgttttttctgtcaaaaaacaaaaaaactaccatccataaagggacgatagattcgcggtgccaccctgattcggaaaagaaactcttttccatctctgcagatacgatcctgccgctgcgatcaaaaccgcgggacgggatgatatcacctctctgtaacgtgagagaaacggcgtcggatactcggaaggtctcctttcccctcgctcctgacagaatccattcgcaccaaatcgtgtgtaccggcctttcaccgtccgccggctcgctgaacatcggtttttggagctacttactttctgctctttacggattttatctttattaagtcttataataccgtcgcagctgaaaaaagtcaagagtgcagttaaaaaagtacaggagcgggcagaggcgggcattttgtatgtcattttgcggcagatgcggtatacggggacgataaagtgggtttttagatatcggaacagataatatggaaggagatcggataaaaaaacacaaaaacggggggtttttctttccttgacagaatgatggtgatataatttcaatgaatggttaaaagcagcaggcgggaagtccggttcgttttgcaccggagatttttcgcaaaggagtagattatgaattgtaaaacagccgtgattctggcggcaggcgccggaacacgcatgaagtcggaactgccgaaggttcttcacgaggtgtgcggcagaccgatggtatcacatgtcatatctcaggcaaaaaaagcgggtgctgaaacgatcatagctgtgataggtcatggtgcggaacaggtaaaggaaggcctgaaggaagaggagattctgtttgctcttcaggagaagcagctgggtacaggtcatgcggtcatgcaggcggcagaccggattcccgacgagggagatgtatttgtgctctgcggagatactcctctgattacatcagagacgctggcggagttcgcagcgtatcacagcggcagtaataatgcggttaccgttcttaccgcaatcttcgacaatcctttcggttacggcagaatcatccgcggagaagacggcaatctgcaaaaaatcgtagaacagaaggacgccgacgagacggaaaaggctgtaaaagaagtcaatgccggcatgtactgtttcaacggggcctttctccgggagaatctgccgaaactgagcaatcagaatgcgcagaatgaatattatatcaccgatctcatcggcatggccgtggaaagcggcgcgggtgcaggcgcttttgcggtgaacaacccggatgaaatcatgggggtcaacaacagaatacagctttcggaagcgtcgagagtcatgaggcgccgcatcgccgaaagacatatgactgcaggcgtaacgatagtcgatccggaaagtgtatatatagaagaggacgtcgtcatcggaaatgataccgagatatggccgggcgcagaactgaaaggccgtacgatcatcggaaacggctgtgtaatcggcagagatacgatcatcgaggacagtaccataggcgaccgtaccgatatcctgaaatcggttattaaagagagtgaagtcggagccgatactcagatcggaccgtttgcttatctcaggccgaaaagccgtgtgggaaacggatgcaaagtaggcgattttgtggagataaaaaacgctgtattcggcgacggatccaaagcgtcgcatctcgcatatgtcggcgatgcggacgtgggccgggatgtcaatgtgggctgcggcgtggttttcgctaattatgacggagttcacaaattccgcactgaagtgggagaccgggcttttatcggcagcaattccaatctcgtggcgccggtgcaggtggaagacgacgcgtatatcgcggcgggcactacggttaccgtcgctgtgccggaaggcgcgctctgcgtaggacgggccagagaggtcatcgaggaaggctgggttgaaaaaaagggcctcagcagaaaaaagcggacagtgaagaaataaaagatcgtactaactcaattcaataaattcggaggataatgagaatgaagaacggtgtattcagcgagtataaaatctttgcaggcaattcaaatccggaactggcagaggaaatcgccgcgattatgggcaagccgctgggcaagtctacggtaagcaaattcagcgacggcgagatttccgtgagcctctgggaaagtgtccgcggcgaggatgtctatatcatccagtctacctgcaatcctacaaatgacaatctcatggaactcctcatcatggtggacgcgatgaagagagcgtccgcttccagaatcaatgcggtgattccttattacggctacgccagacaggaccgaaaagcgaagtcgagagaccctattacagcgaagctgacggcagatcttctcagtgtcgcaggcgtagaccgggttatcacgatggatctgcatgcggctcagattcaggggtactttgatattccggtagatcatctgatgggtatgccgattctcgcgaaatattttaaggaacttataaaaaatggaacgattgataaagaaatagtcgtggtttctccggatttgggaagtgtgtcgagagtgagatctctttccggcatcttggagtgtcccgtagctatcgtagataagagaagaccgaagccgaatgtctccgaaatcatgaatatcatcggcgatatcgaaggaaagaccgcgattctcgtcgacgatatgatcgatacggcaggtacgattacaaatgcggccaatgccatcaagcagctgggcgccagggaagtctatgcctgcgctacgcatccggtgctgtccggccctgcaattcagagaatccaggattccgagatcaagcagatggttctgctgaatacgattccgattccgccggaaaagagaatcgagaagatgaagcttctctccgtagcgccgctgtttgccgagacgatgatgcgtgtattcaataacgaatccgtcagcaatctcttcgattagatttatcgcgtaagagtatttatcccccgctgttccaatgaattttgattctttcggacaggcgggggaaatttgtttttagggaaggccggttccgcgtgatcggtgcgcggggcttttcgccgccctgagactgtggacagagactttcctgacgccgtccgcagctcaggcggaggcgaaaagcaaaacgtccggagagacaaataaaaaaatgaatcgcaaatgaacgatttttactgtaaaatcgggtatcgtatttcgaaaggaggaaggccgttgtatattatcgcaggtctcggaaatccgggaaagcagtatgaaaatacaaagcataacgtgggatttctcaccatcgatgttctggcggaaaagctgggcatccgagtcagtaaaatcaaacataaagcgctgacgggagagggctttatcagcggggaaaaagtgattctcgtcaagccgcagacatatatgaatctcagcggtgagagtatccgcgagattctctcgttctataaagcagaccccgagagactggtcgtcatctacgatgatatcgatcttcctatgggatctctgagaatccgcaaaaagggcagcgccggcacgcacaatggcatgaagtcgattatttaccagatcgtatccgaggattttccacgggtgcgcatcgggatcggcggagaacgtaaaggcgatctggccgattatgtgatcagcggatttcgaaaagaagaccgcaaaaccgtggaagacagcattctcagggcggcagacgcagtgatctgcacagtggagaaaggtatagacatcgctatgggagaatataataccaaagcgaagaaaaaatccgcccaggaaaaaaagccggaacgcgaatccgctgagataagggatccggacagaagatctgcagaagaggacgcggcgaatcgcttatccgcagcgcagagacaggaggcggaatgtccggcgcagaaaaagacagcggagaatcatgcggaggagagtttatgaatgcttcagggatgtctggtctcatcgaaagccttagaaatacccgtgaaaacggcggaatcgtcaatgtttccgggatgacaggaggagcgtcagctcttgcggcggcccgcctggcggaagagaacggagggcagattctcctcattgtttccaccagtgaaaaggcgaaacagatcgaggagttcctggcgttttttgcagagaacagaagggtgtatgttctgccggacgaagaacgcagcagatttcagtacgaagcgaagagccgcgtactcagttatgagcggctgaaatgtctttccgccgctctttccggcgaagaatgtatttttgtagcgccggtgatggctgcagtaaaagggatgccggatgtctcaaggtttcgtgaggtctgtatcgacatttctctaagagatgccgtgaactatgatgaaatccgtgaaatgctgatatttaccggatatgagcgcaccgaggtcaccgaagtgaggggacagttcagcataagaggaagcatcatcgacatctttccgccggatgccgaatatccttttcgaatcgatcttttcggcgacgaagtagacgatctgaaactttttgatcctctgacccagcgttccgtacgctctttggacagcgtccatattcttccggctaccgtcccgaatcccgcgagtgaaaaagtggccgcatttttctgggattatatgtcggaggaaaaaacgatcatcgccgatgattgggatcggatctgtgaacagcgggatctggccgaccgggagtgggccgccggagcggcgctgatggaggagaaaaacggcggagtgcctctgtccgaagaagaagatccggcggaataccgtcgcaggatgaataaccgtccggagtattttgcggatatgtatcttctggccgctgtgctggagaaaatcggcgcggcggttaccatgcctttcccaaaagcggcaaagtttatcgaaaaaccggcggaaatccgcggggtgaaggtattggaagcgccggagttcagcggtcggatggattattatgcggaagaattgaaacgtcttatcagagaatcgtataaaatcgtggtttcctgcgtcagcgatgagcgaaagcggagtctccgcgagttcgccgagcgaatggagatcagtgcggggcccggtgttctgacgtacgtcagcggcgttttgccccggggctttctgcttccggaatccggagaggcttttatctcggataacgatattttcaaatcatctaagaagaagcgtccgaaaaagaaaaaacagtctaagacgatcaatctgtttgccgaccttcaggatggagattatgtggttcatgaaaaccacggtatcggccgtttcgtgggaatcgaaccgctgaaggtagagggcaaccggaaggattatctgaagataaagtatgcggggaacgatcttctctatgtgcctgtggaacagatggatctggttcaaaagtatatcggttcgggcggagctgcaccgcggctgaacaaattgtccggcggagactggaagaagacgaaggcccgggcaaaggccgctatcgaaaatatggcggaggaactggtgaaactgacggcggaacgccagattcagcagggtcatgcctttgcccccgataccgtgtggcagcacgaattcgaagagatgtttccttatgtggagactgaaaatcagctgcgctgtgtggaagaaatcaaagctgacatggaacttccgtggccgatggatcgtcttctgtgcggagatgtcggatttggaaagacagaaatcgcagcccgtgcgatttttaaatgcgtgatggacggtaaacaggcggcgatgctggttcctacgacaattctggcaaatcagcattatcatacgtttaaagcgcgttttgaacggttcccctgcactgtggaaatgatgagccggtttaagagcgaagcggcgctgaaggatgtggcggaacgggttgcagacggcagggcggacgtgcttatcgggacgcatcggattctgtctaaggacatcagatttaaagatctggggcttttggtaatcgacgaagaacagcgcttcggtgtgcagcacaaagaggcgatcaaatatctgaaaaaaaatgtggacgttctgacactgtcagccaccccgattccccgtacgcttcatatgtctctttcgggaattcgcagtatgagcactttggatgaacccatcgaggaccgttatccggtgcagacgtatgtgctggagcaggacgacgagatgattcgagagatcctgcgcagagagctggagcgggacggccaggcctttgtggtctacaatcgtgtcaggggcatcaatcaggtggccgatcagctgagaaggctgataccggaggcgagaatcgctgttggccacggtcagatgtctgagacgaagctggaagacatcatgctggcctttacgaaccatgaatacgatattctggtggctacgactatcatcgagtcgggaatcgacgtggcaaacgccaacacactgatcattctcgaagccgatcacttcggtctggcgcagctgtatcagctccggggccgggtggggagatctaacagagtcgcctacgcttattttatgtatcagaaaaacaaagttctgtcagaagtagcagagaagcgcctgaaagccatccgggaatttacggaattcggctccagttttaaaatcgccatgaaagatctggagatacggggcgccggaaatcttctgggaacagaacagtccggccatatgatgatgatcggttacgaactttactgcaagctgatcgataacgcagtgcgcagactgagaggcgaagccgtgaaggaggaaaatctggaggtgacgctggatatcaaagtcaacgcctatatttccagcgcctatatcgacgatgagaaattgaaactcgatatgtataaacgaatcgcagagattaaatcggaagaggacatttctgacgtcaccgacgagttgatcgaccgtttcggagagattcctgcggagacggaggctctcatgaaagtggctctcatcaaagcgaaatgtcagatcgcagggatacgcagagtggctccggacggaaataagattgtctttgaattcgttccggaacagaacggcctcaatccgggcgttttgctgcgtctgtccgaggcatatggaatgaaactgatcatcaatatgagcaaacggccgttcatcaaaatgcctgtcgaaaaacagagagaaatgctgacagagattacagactttctgacggttttcgcataaaaataaaacgggatgtgatataatggttcccaccgcagacagcgcaagccggtatcgttttctttcttgctccggcctcgccggaaaacgaaggacgcagtgcggtgtctgaattttaattttgtggtcaaatcagaaaaacggaggaaaggatatgaggaaaccttccttaagaaaaacggcagccatactttttattgtggtgcttctggcgggacttgccgcctgcggaggcgacgaggatcccgacggacggatcgtaaaaataaacgatgaagcgatcaccaacgggcagtttgagaatttctgcactctctggctgtatactcagggattcgatccttccgagcctctgacctccgatcagaaatcgctggcgctgggggatatgatcaatgcggaagctctgaggcagtattacgaaaaagaggatccgtcggttttctcgaattcttatcagagcagtctggatactttcctgaatcagatgaagaccggcaatgcagaattcctctccagtcacgatatcagcgatgaggatatcgaattttactatatgtctcagtatctgacggaaacctgtttcgacaagatccgttcggagcaggaagaagacgttctcgcagaggaagcgaaaaaatattatgacgaacatgaagcggaattcagaggtgagacttttgacgagtctctggaagaaatttactatctgctttacagcgaaatgtacgatcagaagctgaaggaaatcaaggacgatatgacgatagagaaatgatgtggcagactttgggagaaaaataagatatgcatccatggaaacatttcatcacgattacgagacaccgccatacggtcatgcgcatgtgctttcagatcggcctgtacaaacagggattgctccacgacctctcaaagtattcctggacggaattttcgagaggaagccggtattttcagggaaaccggagtcctaataactatgagcgggagctctacggttactcggtttcctggctgcaccataaaggacgcaaccgtcatcattttgagtactggctggattacaacgaacatcagtacggcggagtgaagggaatgcggatgccgcgccgctacgtggcagagatgtactgcgaccgggtagcggcctgcaagatctaccagaaggaagcctatacgcagcagagcgccgtccggtatttctgcaagggcggcgggaagattctgatgcaccccgagacgcggaaggagatcgggtttcttctgacgatgctgggggaaaagggagaaaaagaaacagcaaaatatatcagaaatatatatctcaagggcggaagtattcctgaggattaccgggaatatgaaagcctcgaagagatcgacgcagcaatgggagtagaatcatgagcttcacacatttacacgttcatacagagtacagtctgctggacggcgcggcgcgcatcgagcctctcgtaaagcgcgcggccgagctgggcatggattctcttgcaattactgaccacggcgccatgtttggtgtcgtggatttttaccgtgcggcaaaaaaagcggggattaagccgatcatcggctgtgaggtctatacggcggcccgtacccgcttcgataagaatgtggaacaggacaagagaaacggtcatctcatccttctcgccgagacggatgagggctatcgaaatttgataaaaatagtctcccggggttatacggaaggcttttattataaaccgaggatcgacaatgaggtgctgcgcgcatacagcggagggattatcgccaccagcgcctgtatcgccggcagagtgcagcaggctctcgtccgcggggattatgaaggcgccagggaagaggcgctggaatatctcagcatctttggagagggaaattttttccttgaaattcaggatcaggggctggaggaggaagcgcggatcaatccgatgctgaagcagctgagccgtgagaccggcatcggtctggtggcaaccaacgacgttcactatatcaatcgggaggattcggaatttcacgatgtccttctgtgcattcagacaggcgcttatgtcagcgataccgaccggatgcgctttccgaacgatcagttttatctgaaatcggaagaggaaatgcgtcggatttttgcggatattccggaagcggtcgacaacacctataaaatcgctcagcggtgcaatgtggaatttgagttcggacacctccatctgccggagtttcttccgcctgaagggatggatgcgaagtcctatctgcggatgctgtgcgatagaggcattgccgaacgatatgcggaagtgacgccggaactgaggcagcgcctcgagtatgagatccaaactatcgaagatatgggctatgtggaatattttctcatcgtttgggattttatcaactatgcaaaacagcacaatatcgccgtaggaccgggcagaggttcggcggcgggcagtatcgtagcatacagccttcatattacggatatcgatccgataaaatacgggctgatttttgagcgttttctcaatccggagcgggtaagcatgccggatatcgacgtggacttctgctatgaacgcagaggagaggtcatcgattacgtcatcgaaaaatacggaaaagaacgggtttctcagattatcactttcggaacgatgaaagcgaaggcggcggtgcgggatgtcggccgcgtgcttcagatgggttacgcccagacggacgccatcgcaaagatgattcctttcgaccttcatatgaccatcgacaaagcgctttctctgaatccggagctgaaacaggcctacgaaaatgatcgtcaggtgaaatatctcatcgatatatcaaaagagctcgagggaatgccccgccatgcgtctacccatgcggcgggcgtggtgatctccagagatcctctggacgattatgtgcctctgtatttgtcggataaaggcgtcagcgcacagttcaacatgacgactatcgaggagctgggtctcttaaagatggattttctcggactgcggaacctgaccgtgatccgggacactctggacgctgtcgaggaaattcacggagtttccgtggacttcagccatatggactatgatgacagttcggtttatgaactgatcgcctccggtaatacgctcggcgtgtttcagttggaatctctggggatgacgcagtttatgaaaaatcttgcgcccgactgctttgaagatatcatcgccggtatttcgctctaccgtccgggtccgatggattcgattccggattatatcgccaacaagaaaaatccggaggggattacttatactcataaatccctggaaccgattctctcggtgacctacggatgtctcgtctatcaggagcaggtgatgcagatcgtacgcgatctggcaggatactcctacgggcgaagcgatctggtgcggcgcgccatgagcaagaaaaaagccgatgtgatggcgcaggaagaggagtatttcgtccggggcaagttgctggaagacggaacggtggacgttccgggatgcgtccgcaatggggtgccggaggcagaggcaaaggcgatatttcaggatatggtcaaatttgcctcatacgctttcaacaagtctcacgcggcggcatatgccgtgctggcatatgagacagcctggctgaagcggcattatccggcggaatttatggctgcgctgatgaccagcgtaaagggcgatccccgtcaggttgcgaaatatatccggaactgcaaggagatgggcattcaggtgctccctccggatgtgctgcagagtgaaaagaaattttcagttcacgacggagccgtccgtttcggaatgatgggaataaagaatgtaggagacgccgtcatcgatgagatcataagagcgaggaaggaatacaatccttccggggatttcgaagattttatcaattctctggacatcagcaaaattaataaaaaagccatcgaaagtctgatccgcgccggggcctttgatacgatcaatgaaaacagagcgcagcttctcgcggtctatgagtcttttctggaatcggcgcacaatctatcgaaaaataatgtagcaggtcagatttcgctcttcggcgatctgggcgatctgggatcaggtatcagcgatgcggtggatcgggccgatatgaaggtgaagatgccggatgtcagaaattttgataaaccggcgatcttggctatggaaaaggatgttcttggtgtgtatgtttccggacatcctcttgaggactatgcggagcggatccgtgaggtatccacgatcaccacggagcttctcgattccgaggatgatgtggatccgaaaaatgacggacggcgggtagtgctggcgggaatgatcgtatccaggcggacgatgattacccggaaaaatacgatgatggcctttctgcagattgaggatctgtacggtgtggcagaagtcatcgtttttccgaatgtctacgaaaaggtacgggagaaactccgggacgacggcatcgtcgtcgtccgggggaatcttcagctcagagaggacgatcagccgaaaattctggcatccgagattgaagaaatcgatgcttaccggtcgccggcggaagcgggaggagaaatttcttccccggcaggaacgtatcggaacggcgcaaacgcgcagcagagtctgggaaaccgcgcaggagcggtaaatgcagcggacctccgccgggatgaagcgcggatacatcttcgtattcctgagggaaaagcgctcgaagaaatcattcgtcagctcggcgatatcgtaaagagatatccaggacaaaggcggattgaggtgtgtatggaagaaaacggagaggtcttcgcaccggagagcggtgtacggccgtgcgatgatctctatcaggccctttacgacctgatctgcggctgacggagagaacgggggcgctgaaagccctccccggcggcagaacgcgggaatactcctgacacaatcgtcggaacgggctgtcatgtgttatctcatggatgaaaaatgtatcagttgtaagcgagagtctgttttgatatactgaatctgaatattgtgttagaacaggtaagtatttacagataattagggggttagattatgtgtggaattgtaggttatataggagatgaaaacgcttctgatatcgtcatcgacggattgaagcgtctggaatacagaggttatgattcagcgggcatcgccttgtgcacaaaaaacggcatgatggtgagaaagaaaaaaggccggattaaaaatctggaagatatgatcgcaggtgaaaacctgtacggccatctcgctatcggtcatacgcggtgggcgactcacggagcgccttccgatgcaaatgcgcatccgcactgtgaccgcagcggaaagatcgctgtcgttcataacggcatcgtagagaatttcatgcagctcaaagaatggctgatcagcgaacacggagtggaatttcactctgagacagacacagaagtcatcgcgcagctcatcggaatattttatcacggcgattttgaggatgccgtctttcaggcggtggaaaagatgcagggcgcttacggattgggcgttatctgtgctgatgaaccggggaaactgatcgcagtgcgaaaggacagtcctctgatcgtcggactcggagaaggctgtaattttatcgcttcggatatcccggcgattttaaagcatgtgcgaaaaatctatcttatcgaaaataacgaaactgtcgttcttacggcgagcagcgtcaagatttacaatgcggagcgcagggaggtccaccgcgaggtattcaatgtgacatgggatgcggatgccgcggaaaaagaaggatacgatcattttatgctcaaggaaattcacgagcagccgaagggaattcgaaatacgattaccagaaggatggatgaagagggaaatatcgttctcgacggtattcgtatgacaaaagaagagatcgagaatttcaataaagtgtatatcgtagcctgcggaacggcatatcatgccggtctgatcggaaagacggtgattgaaaagttagcggggatcagtgtggaagtcgatgtcgcttcggaattccgctacagagatccgtttgtcgacgagaatactctgttcatcgctatcagtcagtccggcgagacgctggatactctggcggcgctgcgtgaagccaagtgcaaaggcgcacggattctctccgtggtaaatgtggtaggaagttccgtggccagggagtccgatgatgttttctacacctgggcgggtccggaaatcgcggtagcttctacgaaggcatatacgacgcagctggtctgcatgtatctcatcggtctgtatatgggcagagcgaaaggatcgttggaggacagcgtttaccgcacctatattgaagaattgctgaccgtcccggaaaaaatagaagaggtgctgaaacaggagcggcagattgcggatctggcaaagaaatattataagagagacaatatcttctttatcggaagagggatggacgccgctgtttcctatgaaggctctctgaagctgaaggaaatttcttacataaattccttcgctatcgccgccggcgagcttaagcacgggacaatcgctctcattgaagacggtactctggtggtgagtatcgctgcgcaggatcgtctctttgaaaagatgctctctaatattcaggaggtaaaagcgaggggcgcggatatcctggctctggcaaaagaaagtaatacggcggtggagcggcaagcagatgatgtgatttacataccggaatgtatggacgaaattactccgctgatttccatcgttccgctccagattctcgcttattatattgcgaagcagagaggatgcgatatcgacaaaccgaagaatctggcgaagagcgtgacggtggaataagaaaaaacaaagtaagaatttttgtggaagagagataaaaaatacgggcagccttttcggctgcccgtattttttaatcgtctactacgccgggaggattcgtttgtcctccgcccgggttactcgggtcagtagcgccgcccggattgttcggatccgtattaccgcctggatcgttcggatcggtggtacctggattgctcggattatttgggtcagtggcgccgcccggattgcttggatcaccagtaccgcccggatcgtttggatctgatgtgtccggattgtccggatcttccgaaggggtgccggtggtcggcgtaacttttccggtgtccggatcgacagtcacataaatcttttctccggtgtccggatcgataatataagcttttcctgtttcatcgtacaatacttccggttcctcgtcgagaccggatactgccgggccggttctgctggttccctttacatagtattctccgccgctcatatacacatcggacggctgggaagggaatcgcgtcgtttcacctttcggggcgatctggcgcatgactttgctccagagagacgctgctgcggaactgccctgtgacaattcgatattcacatcatttccgatccatacagacgctgcgtattgaggtgtaaatccgacgaaccacgcgtcgtaattgtcatttgtcgtacctgttttaccgccgaccggtgctacgccgatagcggcgcggccggcgatgccgttggtaaccgtcgtgcgaagaatgtcggtcatgatgaaggctacgctttcatcgaagacgcgtgtctcttccggctgagattccagaagtacattgccctggctgtctgtaacctttgtatatgtggtaggttccacatgcactccctgattagggaatgtcgcgtatgcagaagccatttcgatcggcgagataccttttgacataccgcccagagccagagccgcggggtttttgtcgttggtatctccgtcctctaccacggtggttacaccgtttttcttgaggaagtcgatggaataatcataaccgatatcattgaccagattgacggaaggaacgttcttggactgttctacacaagtccgcagcgtaatccagccgtcgtatttattgttggagttcttcggccacaatttgccgttgacataattcggtttatcttcgatggtgctgcccgctgtccagccggtatcgagatctacgccggactgaagcgcaggtccgtaaacgccgatcggcttgatggaggaacccggctggcggggattatcggcacggttgtagaggagacggcccttcagacttcgtcctcccaccatcaccttgatctgaccggtagtgatgtctgtgactaccatagcgccctgaggctgaatcgtctcctgtctcagagtatagtgctccggattgatggtaatcgtaccgtcgcccataataaagatattcttgtcgctgtcgatgaactccttgctgatgataacgttgccgtcagcatcttttgtcttgtactgagaatcgattccgctgatgacaccgccgttgatattgtagaggatgccgccctctgtgtaatgcagcttgctgaattcgatctgttcttcgctgtttcctccggctcctttgaccgtatagaatttcagtctctgtccggcgtagaggatcagatttccttcttcgtcaaaaccgaattcaccgtatttcagtgtgaaactgtcgtcactgttgaaataagaggattttttgtacatgacgacgtttccgtttttgtcgatcatatttccgctgctgtcggttcgcatactccgtatgctcggatagttggagctcttgctgaactcggcttctgcgatctgctgcatttccacatccaaagtactgtagatataaataccgctgttgatcagatcttccaccgtattttcgttgagattgtattcttcgataaggtctctgcgcacttcgtcgagacagtaatctgcaaaatacgaagagactgtctgcttgtcttccgtcggccggagagatgctttgatgtcttccgcaagagcttcttcgtattcctgctgactgatcttgccctgttccagcataaacttcaggacaatctgctgcctgtctttaaaagcgtcgttataaacggtggtgaacgtatctcccactaagaggatatcttcgctgtccgcagtgacatcttcattatagtagtttttcatcagagcatattttgacggactcttcggaatggaagcgagcgccgcgcactgcgcgatagtaagatcctgcagctcacagccgaaataagcgtccgccgccgcctggacgccgtaggcgctgtatcctagcgagatcgtattgaggtaggcttcgatgatctgctcttttgtgagatttttttccagaataatcgtataataagcttcccggatcttacgggtcatcgaacgttctgtggtcagatacaggttgcgggccagctgctgagtaatcgtactcgtaccgctgacatctttgtcagtaaagatgctttccgcaatagcacccagaatgcgaacgtaattgaatccgttgtgttcgaagaacgttttgtcttccaccgcgacaaaggcgttgatcagattttcagggatctgatcataggtcacgttggtacggacgaccgacgcgtctacgtactccagcagttcgccctgatcatcgaaaattttcgatgtctgctgcagatcgccgtagatgttgtccggatcgatttcaggggaggtgaagaccacgaatcccacataagctgcgcctgctatgatgcaggcgatcagcagaatgataatccagtggatgatccggcgccagagaggctttttccgtccgccgtctcctgatttccttttctttttcggtttcgtttctttgtccatagttttgtcattttccgcttctgctgcaggaagaaggggtttatccgcagctgcctgtgtttctcgatctgtatctgcgttatctgtctgtcttgctgtaccgcggttcgaaagaagaggatcttccgggccggtcaagtctttgctctgcaaatcggcagcagggccggaggggctgctttcaccggaattagacgatgaaccgccgccggtaccgctgtcttcgcctgcgggctctgcgccggctgaaggtgtatccgccgcgtccgctcttttgccgccgggttcttcttccagaccgtcggaatccgctttgccgggactgtttttccttcctaccggttcatctgcgccttcagcggctttgccggcaccttccgcatccggtgcagaggttttctctgcttctgaagaaaattccgaggtgttcgtacggagagcggtgtcatgatcggctttctgtgacggagactctttttcctcattcagaaggacgtccagttcatcgaagatgcttaagtccagatcttcctccggcggagcgccgtcctgcggatcggcagagtacttttctgctccgggttttaacttgtcgaatcgggaagtatgtcccatagaaccggagccgccgcccgaattctgcagctcggaaagcgcgaagtcgtcgtccaggccgagatcttccaggct

SEQ ID NO: 2423 - DNA, 9335 bp, Unknown
  16S sequences of unknown bacteria
catactttcacttgcagcttgtggaggttcggttccagaaggcctcagccaaaaaacttatactatcggcaaaaaggcactgggcacgatggataagtatctgtctgacaaaatcagtggtgaaacagcggaaaaacaaattagagagcaatatgacgagttaaaagaagaaagcgaaaggttacaacaacaaagagatagcaaccctgcagatgaaattacttatgagcattgtatcaatgcaagttatgtcggattctggattactgaatttgctctcggtatattcggcgacggggattgccaagaagcacgtgataatttatatggaatacttcacaaggattcttaatagttaaaagtcgctgaatttttgtagcgttagcagtcgggagatgattgcaaaactaagcgctgatctcgctattgaatcagcaacgaagcgcaaaaaaggagagggcaaacagccctctcctaatttatgtgattcttagcgaatttcttacccaaaataccgcttcagcagcccagccagtgctttgccgtgacgggcctcgtctcttgccatctcatggacggtcgaggttgagctctttggctttcttggcgaggtccgtcttgccggcggtggcgccgttttcggcttctacgcgcatttcgaggtttttcttggtggaatcggtgacgacttcgcccaggagctcagcgaattttgcggcgtgctcggcttcttcataggcggccttttcccagtacaggccgatctccgggtagccttcccggtgggcgacgcgggccatggccaggtacatgccgacttcgctgcattcgccttcaaagtttgcccgcaggccagccttgatctcttccggggcatccttcgcgacgccgacgacgtgctctgccgcccaggacatctcgccgctctgctcaataaacttggagccggggacgtggcagatcgggcactctgcggggggattttcgccttcatagacataaccgcaaacaggacatacgaattttttcatgatacattcctccgttaaaaatattgattggtttggttggtatggtgctttattgatttgcctggcccgccgcagatgtgcagcaggcggggcagaggccgcgcagcagcaggtggcaggtatcgacctgcgcgtgcagctgggcggcggctttttgcaaaaattccgccgtggggtcaaagtcgttcagatccatcacccggtggcagcggttgcagacaaaatgcgcgtgcggtgcggcattgcggtcgaagcgctccatgccgtcctcaatacaggcggagccgatgacgccctcctgtttgaacagggacaaattgcggtatactgtgccaagggagagatctggaaagctgggcttgagctggcggtagacacattctgccgtcgggtgcgcatccgttgagcggagataggcaaggatcgcctcgcgttttttgctatagttcttgcgccgctccatagatacctccttaaaagcaagaatgattcttgttcatggttggagtataccacatgttttcggatttgtaaagaggaaaatgagatttattcttaattttttgcgaatttttttcccgcagcgatgcaaatgcggaaaattccgaccggcgcgggcggaaaaaatagaagcatttcaaaattcccaaaaaaacggttgaaatctgaacagttttcggctatactgttaaacagaatagggaaataatcggcaggaggaatgcgacgtgggccaggtgatcgcggtgatatccggcaaaggcggaacggggaagacgacgctgtccgcgggccttgccgcctgcctggcggcggagggctgccgtgttctggcggtggacctcgatgtcggactgcgtaacctggatatttccctggggcttgcccagagcgcgccgctctcttttgatgagctgctctccggggcttaccgcttggagcaggtggcgccccatccggagatcccgaacctctacctgctgacagcgccggtgaatgatacgccggaggagattgatgcggcagcgtttttcgccctgctggacgaggtgcggcagctgtttgatttctgcattctcgatgcgccggctggcgtgggtgcgggcttttacctggcagcccaccgggcggaccgggtgatcgtagtcgccaatgcggacccggcctccttgcgggacggcgcgtgtgtcgcggggcggctgccggaagaggtcccggcgaagctggtggtcaaccgggtcagtccccgggcctaccggcggatgaaaatgacggtagatgatattatggacggcgttggcctgccgcttttggggctggtgccggaagattttcatgtaacactggctgcggccaggggcagaccgcttgttttggagacaaaacgcggtgccgccgcagcgtgtttacatattgcgcgccgcctgctggggcggaagatgcccctgatgcggttctgaacgcggcgcagcggatgttgtggttgagtaggagggacattgcatgaacatcgcgttaacagcccaggacaagaaaaaggaacttttggtgcagttttgcattgcctataaaagcatcctggcaaagcataatctttttgccactgcgacgacggggcggctgatcgccgatgcgacggggcttcccatcactatgttcctctcccataaaaacggcggccatcagcagatcgacgcccgtatcgcctatggggagatcgaccttgttttcatgtttaccgacccggacaaccgcgacccgtgggaggaccagcaggtgatcgagacgctgcgcaactgcgacaagcacaacgtcccctgcgggacgaacctcgcttcggcggagatgctgatcctgggtctgcagcggggtgatttggactggcgcgagatggtgcgccccaagcggtccgtgcggtaagattatttttataacgcgaggatgcggaagcagtacaggcggcaatttggcccacagagagggggcggcagctgaaagtccctgaccacagcgcctggaaggacatccgcggagcgggcgtataaggccgccttggccgaaatcgcaggcgtgctctggcctgaaagcggagcggaaagggccttcgggctgaaattgggtggcaccacgaagcataagttcaagatgctctcgtcccatgtttggcatggcacgggagcgctttctttttttcgatacattaaatataaaaaagaataccaaacggcgtttgccgaagacgatagaaaggaacattgcaatggaaaagatcaaaccgcggaccctatccggctttatggagctgctgccggggccgcagatgcagatggaacggatgatgcaggttctgcgggagacgtacagcctctacggcttcaccccgttggacacgccgctgatcgaatcggcggaggtgctgctggccaagggcggcggcgagacggagaagcagatctaccgcttttccaagggcgacgccgatctggcgctgcgttttgacctgacggtgccgctggccaaatatgtggcgctgcactataacgagctctcattcccgttccgccggtaccagatcggcaaggtctaccggggcgagcgggcccagcggggccggttccgggaattttaccaggcagatatcgacatcatcggcgacggcaagctctccatcctcaacgaggcggagattccgtccatcatctgcagaaccttccgctccctggggctgcgccgattccagatccgggtgaataaccggaagattttgaacggtttctatgctatgcagggcctttccgccgtggcgggggatatcatgcgcacggtggataagctggataagatcggcgcggagaatgtccgcaagattttggaggacgatctgcagctgcatccggagcaggccgcacgcatcctggacttcatggccatctccggcacgaatgaagaggtcctgacggcgctggccgcctaccagggcagagatgaggtctttgaccagggcttggcagagctgacgcaggtggtgcagtatctggcgggcttcggcgtcccggcggagaatttcgccgtagacctgaccatcgcccggggcctggactattacaccgggacagtttacgagaccgtcctgctggatcatccggagatcggctccgtctgctctggcgggcggtatgacaacctggcggagtattatacggaccggcagctgccgggcgtcggcatttccatcgggctgacgcggctgttttacgtcctgggtgagcaggggctgctgaacccggcgctgccggtggcgccctgcgatgtcattatcttaccgatgggcgaggagatggccccggccatccagctggcgacccaattccggcagcagggcatccgggtacagctctacgccgagcagaagaaattcaaggcgaagctgcaatacgccaataaaatgggcatccgcttcgccgccctgttgggcgaggacgagatcgccgctgggacagtcgccctcaaagacctggccactggccagcaggaggcgctgacgccggaggctgccgcgtcccgcatccaggagacgatggcggaggccaatcagggcccgatcatcttagaataacgagaaagaaagagggaacgagcatgtttcaatccagaacgcatacgtgcaacgagctgcgcctggccgacgctgggaagcaggtgaagattgtcggttggatggagaacgtccgcgaggtcggcgcgaattttgccttcgtcgtcgtccgtgacttctacggcacgacccaggtcgtcattgagacggcggagatgctgcagatcgttaagagtgtcaacaaagaatccaccattgcggtgacgggcaccgtccgggagcgggcgagcaagaatccgaagctggccaccggcgagatcgaggtcgtgccggagaagatcgaaattctcggccgctgccgccacaatgagctgccctttgagatcaaccgcagccgggacgccgacgagatggtgcgccttaagtaccggtatctggacctgcgcaacccggcggtcaagaataatatcgtgctgcgctgcaatgttgtcgcggcactgcgccaggcaatgacggcccacggcttcctggagatcacgacgccgatcttgacggcctccagtcccgagggcgcacgggactatctcgtcccggcccggaagcacccggggaaattctacgcgctgccccaggccccgcagcagttcaagcagctgctgatgacggcgggcttcgaccgctatttccagatcgccccctgcttccgcgatgaggatgcacgcggcgaccgcagccccggtgaattttaccagctggatatggagatggcgtttgccaatcaggacgatgtcttcgctgtcttggaggatgtgctaccgccaatcttcgccaagtacggcgcgtatcatgtcgcatcggatgcgccgttccgccgcatcgcctatcgggatgccatggagcgctacggctcggacaaaccggacctgcgaatcaatctggaggtacaggatatgacggcccttgtcgcgggcagcgagtttgcgccctttgcggcgggcaatacggtcaaggccatcgtcgtgccggattgcagcttggcgcggaaggccgtcgataagctctgcaacgaggtcgaggtccaggcggggaacaagccctactggttcaaggtcgatgagagcggcaattttgccggcggcatttccaaattcctgacggaaaagcaggcggagatcaccgcggcgctgggcctgacgccgggctgctttgtcggcgtgacggcgggcaagaagctggcggcccagaagacggcgggtgtcctgcgcgccaagctgggcgcggcggtccccggccatatggacaaggagcgctacgaattctgctggatcgtcgacttccctatgtacgagatcggcgaggagagcggcgagctggaattctgccacaaccccttctccatgcccaacggcggcctggagatcctggaaaaggccgagcggggcgaggtcgacccgctgcgcattaccgccttccagtacgacctggtctgcaacggcgtggagctcagctccggcgcggtgcggaaccatgagccggatatcatggtcaaggcgtttgagttggtccgcctcggcgaggcggatgtcaaggccaaattcccggccatgtacaacgcctttacctacggtgcgcccccccatgcgggcattgcgcctggcgtggaccggatggtcatgctgctggcaggggaggactccatccgggaaatcatcccgttcccgatgaacaagaacgcccaagatgtcatgatgaacgctccgaccctggtagaacagaagcaactggacgaagtgcatatcgccatcgtcacgccggaggaataagccaagctccccacgtggctgcgtgagccgcacgggaaaaataaaaagaatgcccacagtctcccggggagactgtgggcatttagtctgcaaaagcttcgcagaatttgtgctgcgtgcagcaggggggagtcctttcaaacgtgaacccagcgaagttgggcgtatttgagagcgtgtcaaaaaattttttgacacgctcgaaccggctgcaagccacgcttgcagccggttcttcgcgttgtgtaaggagtctttatgttggccgggctggatgctacgcccgggaacatatacggcaggcggcgacgatcagtcggcgcactgctggagatattccgctgtcagcgggatcttgcgcatattgccgcggcggaggaaatcaaacccggcgtcaaagagcatctgacggcactgggccatacccataccgcggtgcccagaggtatcctgggcgctgtcgcgcgggttagagccggactctgccatgatgaggttggcgccgcactgcaggccgggaagggacggctcatggaccatcataaacgggtggccgacgttacagaacgccagcgtgatacacgccacaatgtgggccaggcgctcctggctgatcgtgcccaggtgcgccatcggcgaaccggggacggcgacgcgcggcatggccgcgttgatatccagccccaggtcgagggcgaggaagacactgtcgaccaactcatcgaccgtgtgctctgggccgatgggctcgcagcaggtgaagaccttgaggccggcctccttggcgtggcgcatcgttgcgatgcggtcctccgggcgcagctctgtatccgccccttcgcggagacggcagacgtggtagatgccttccacacccatggcggccgcctgctggaggaagtccgggtcgctgtcgccgatgttcagccacacttgcgtgccgtggggaactgtgtccagcgcgcagcgggtcatctccagcaggaagtcctggtcatagttgtgcattgtgaccagggtgatgccgtagacgtcatcatgggcgcaaaactcctgaattttatgcgccagcgtggctttgttcatccggtagggctcaaaatcagtgtgctcatagccgaaggagcagaagcggcagccaccggggcagggggagatctcgatgccgatggagccaaggatggccgcggaattttccgtccacagccgggtcagcatggcggcgctttgccggatgtacttggagaacagactgtgctcgtcaatgctcagcagataccgcaggttgctgcggctcatgcgaacgccgctccaggccttttccaggatcgtcttgagggcgacactggccatgggagtttcaaacatggactgctacctcccgaagaatcagtacttgccgtaggttcgcgcttcctcgacaatcacgcgtgcgtaatggtcgggcaactgtgccgggtattcgcagccggtggagaggatgaagccgccattcttcttataggcgtcgatctcgcggcggcattcggcgcgaatctgttcttccgtatcggtgacgatattggagggcgggatgctgccgatgatggtgatctgatcgccatacttctccttgcactcttccatcgtcttgcagtcgggcgggaggaagagggtggagatggcctgcggatgcatgcgtgcaatctgctccttgaagtaaatgccgtcgccgcagttgtggatcatgaccatggtgtccttagagtggacaagctcagccagctcctggatgtacgggccttcccactcgtcccacatggaggcgcgcataatcgtctgggaggaatagagagtatcgaacatgatcgcatggcagccggattcttcgatcagagccgtgcagtagtccttgagggtgtcagtgacattgcgcagtgcctggtggaccttctccgggcatttacgcaggaacttgaacatgggagccaggcctgtcatcatactcagaacacccagaggcccaaagacgaaggcgacgatgggggtgtccttgcccttggcgtcgtagagcatcttgaccagcttcaggtggccactcatccggcgggtcttgcgcgggtcgagacggacgaccttgtcaaagtcctcgggcttggtgatgaagtgctccgttgtatccgggccagcagcggcatcggtcgggtagcgcatcttcatgccccagtcggcagcctcaacagagaggtcaacgagagagcagataacgtccagacccagctcttccgtggctttgatgatggattcggcgcatttttcttcgttcagggtccattcggcgtagtcgatgcccgtgtagatccgggagatgctgttgcacagcggataagcggggacatggtcaggctcctggtggttcaggaccgcgataactctttccaatgatgtcatgtgtgattcctcctgtggtttttgtggcatgtattgtgtaaaactaccatatgcaatctctgcatataactcctgggaaaattataggtgatacggggaataatagcaataagaaaaactgaaaccagctaaaatttggaatactatctgaaagtattcggcaaacacctgcaaaatgttggctattataccgatggtaatcgatgataaccaaaacaatatagacaatatcacaaaatgtggttcaccattaagaaaacgttaagattgcgctgccgcaagacgcagcgcatcatacaagaaaagagtaaaatcacttgtatggcactactataacaatagataaggtctaatgcaataattatttactcaaaaaagttggatttggagagggtaacgatttttgatgagtttttttaggcgaaatgcacaaacgatttggtgggcttgtacaag

SEQ ID NO: 2424 - DNA, 10711 bp, Unknown
  16S sequences of unknown bacteria
gctccgccgccgatgcggactgccgtccgcatgcccgcctccggcgggcggcctgcggcccccgcccgcccctcctcgggcctctgcaaatccccatatatttccaattttgcctcgttcacgccccgctgcgccaccccgcacagccgccctcaaacgaccctattctaccatattttatcgcaaaaagcccctcatttgtaaactttttgttaaaaaaagtgaaatattaacctttcaactgcaaaaaagggtcgattttgccgtattagtgaaaggagttgtttcaatatgcagcaaataccaaattatctgaacgcccggcaaaagcttttctgccactggttcgccctcacgcgcgatgcccagggagccgccgaccgctgcttccgggcgcccgaaaaacgggaggaagccctccgtcttttgcaaacgcccctggcccaggactacctgcggcaagtggaagccgccctaggcggcgaaggcctcaccgccaccgcggaggaaggctaccgccggctggccttcggcccggtcaccgatgccgtccggctgatgttccccgctgaggacgaaaccccgcccctggaggagatggatctctacaacatctccaaaatcagccaggccaagggcgggctggagatcaccttcttcgaccggctggaggccctagaccggctggccgcccagcagaaggaaaccgccgtccagcaggatgccttcggcttcctggatgccgttgccgccggggccgcggccggggatgaggaggacaggtgatgcgctttgcccccttcagcaaaaagcagctgcgggtgctcacctggtggcgccccggctccccggaccgtcaaaaagacgccatcctctgcgatggggcggtgcgcagcggcaaaacgctgtgtctttccctctccttcgtgatgtgggcgacccactgcttttccggccaggattttgccctctgcggcaaaaccatcctctccctccagcgcaacctgctggagcccctcctccccattttgcgggggatggggtaccggtgccggttcgtggccgggcggcgggtgcttacggtggggctgggccggcgcgaaaaccggttttacctcttcggcgggcgggatgagggcagcgcctccctcatccagggcgtcaccctggccggggtcctgctggatgaggtcgccctgatgccccgctcctttgtggagcaggcactggcccgctgttcggtgccgggctcgcggtactggttctgctgtaatccggagcatccctttcactggttctaccgggagtggatcgagaaggcacgggaaaagaactgcctctatctccacttcaccatgcgggataacccctccctgaccccggcgatccggcggcggtacgagggactgtattccggctccttctaccggcggttcgtgctgggagaatggtgcgcccccagcggggcggtctaccccatgttctccccgcaaacccatgttgtggagcacctgccggcgggtcttacccagtggtacctcagctgtgattacggcaccgtcaacccctgctccatcgggctgtggggctactgccccgccgatggaatctggtaccgggcagcggagtattaccacgattcccgccgggagggagtgcagaaaaccgacgaggagtactacatggccctttgtcaattggccggggatcatcccatacagggtgtgacggtggatccgtcagccgccagctttatggagtgtatccgtcgtcacggcgtctacaccgtcctccccgccaaaaatgaggtcctcgacggcatccgccgggtcagcgagctgctgcgcagcggcaagctgctgttttcggccgcctgccgggataccatccgagagtttgcccagtaccgctgggaggagaacgcccccgaggaccggccccgcaaggaaaacgaccatgccatggatgagatccggtatttcgtttccactgtgctctcccccgccccaaggaaccagcccgctttccacgccgctgccctcccccggcagccggccggcacctgaaccggggggaagaccggccgatcggcgccggcccggcccgcagggcgttccggctgcgccggaaccgacggcaaagccgccgagcccgcccgcgggcgggctgccctgcgggccgtccaggcgcaggagcctctgccccgcgcgcgccgaacggccttcccccgcagcaagtcccgggcttaccggtttcccgggcgcggccgccctctcccggcggccgcggaacaaaaaccggccatcccgaaaggaggaattcgaacattgggtattttcgatcccaaaaacaaaaaaacgacccgggcagcggttcaaacagcgccccagccgcggccggagcactggcagccccagcgctttttaccggcggaggccccgctgtaccgggccctgcggcagagcatccccatcatcgatgccgccctgcaaaaaatcgtccggctgacggtagattttaccctcaccgccgccgaaccggaggcccagccgctgctctcccgctttgcggcggaagtgccggtaggagccagcggcagaggattggcggcctttgccggccagtatctcgatagcctgctgtgctacggcagcgctgtcggcgaggtggtgctggaccacgaccgggaaaagctcctggggctgtacctgccgccgctttcccacctcagtttccagcagggcagcagcccgctggaggcggtcatctgcgccggtgagggccaaaaccgccgtcccctgccctgccccgagctcatcctgttcaccgcgctgcacccggccccaggcgagatcaccggccaatcgctgctttccggcctgccggccatctcccgggtgctgctgcaaatttattccgccatcggcaagaactttgagcggatgggcaacctgcggtacgccgttacctaccgtcccacccccggcgatggcaccgatgccgccgctgtggcaaatgagatcagccgggagtggagcgccgccatgcaggccgccgccgaaggcgagatccgggactttgtggcggtgggcgatgtggatatccgggtcatcggggccgataaccagtttatcgccaccgaggtccccgtccgccagctgctggagcagatcgtggccaagctggggctgccgcccttcctgctgggcctgagctggagcagcaccgagcggatgagcagccagcagagcgatctgcttaccggcgagctggaatcctaccggcggctgcttacccccgtccttgccaaaatagccgggctgtacctgcgcagtcagggctttgccccggaggccgcggtagaatgggcgcccatcagcctgcaggatgaaaccgaagaggccacggcccgcctgacccgcgccaaggccgaggaactggaacgcaagctggcccatgaggccaaacaggagggaacggcatgagtaaaaccaacatcccggccgggggctggcccgtgaccaaagccaaagcagccggaacggcctttggtttgcgggacggagccgaagaaccaagacagaagccggccgcatgggccggtaaggagggaaaagtatgaaccaagccaatatcacagccgaaggctgccctgtaaccgaagcggagctggaggccattgcccggtacagccgccgcaggctgaccgccgaggaggtctacaccttcccgttggtgctgtgcgataacgacctggaccgagaccacgaatgctttaccgacgcggcgctggaaaagctggcggtgctgttccgcggaaagaccggcatttttgaccacgacccccgtggggaaaagcagaccgcccgcatttaccgctgcgcggtggaggaggaacccggccgcctgaaccaccggggcgagccctacaaggccctgaaggcctgggcctacatggtgcgcaccgccgccaatgccgacctcattctggagatcgacggcggcatcaagaaggaggtgagcgtgggctgctccatcggcaaaaaagtctgttccatctgcagggcggaccgccaggaggcgacctgcggccaccagcccggcaaaaagtacggcggccggctgtgctacaccctgctggaggaccccaccgacgcctatgaatggagctttgtggcggtgccggcccaaccggccgccggggtgaccaaaagccacgccgcccgcaaagccctgcatctgaccccggagcgggccatagccgaaatggagcggggcgagctgcacctggatgccgccgcggcctatgggctgagaaagcacatcgccgcgctggagaaaaagagcgaggaggccggccgctaccggcagagcctgtgtgagaccatccgcaggcggaccatgctggcccagccgcagatgccccccgccctgctggaaaagagcatggccccgctgaccgtcaccgagctggaggagctggccgccctgatgaagcagcaggccgaaaagcgctttgcgccgatggtgcagaccgccccggcccccgaaaacgaaaccgataaccgtgcattttgcatctgatgagaaagaggagagaaaacacatgaataataactacaaagaactgaacatccagaaatccctgtaccgcggctgcggcgagagctttgccgagcggctggaaaagatggaccccaccgagaattaccgcggcaccgagctgggccatctggatgccttccagcgccagctcaagcgctttgatatccaggtgggcggcagccactccagcgcgctggagaagttcttccagaacggacagagcgccgtgctgttccccgaatacctgatgagagccatccgccagggcatggaggaaaatgatccgctttcctccatcgtggccgcccgcaccctcatttccgccaccgattaccggggtcttaccaccaacgacgacctggaggccgatgtgaccaatgaggccgccgccctttccaccaccaccatcagcctgaaggacaagaccaccgccctgaaaaagcgcggccgcatgctgcgtgcctcctacgaggcgatcaagttccagcggctggatcttttcaccctggcgctgcgccgcatcggcgctgagatcgcccgctgccagatgaaggacgccgtggatgtgctggtaaacggcgacggttccaccggcagcgcgccccagaagctgaccaccgcggccactaccctggcttacagcgatctgcttaccctgtggagcaattttaccgcctaccagatgaacaccctgctggtgaacgccaagaccgccgccgccatcctggggctttccgccttcagcgatcccaccaccggcctgcacttccagaataccggcaagctgggcaccccgctgggcgccgagatgatcctctgcggcgcggtggccgatgggaccatcatcgcgctggaccgccgctacgccctggagatggtggtgggcgacgccgtgaccgtggacgccgaccgtctgatcgactgccagctggagcgtgccgccgtttcctccaccgcaggcttctcgatgatcttccctgacgcggtgaaggtgatgaccctaaaaaccgcctaacgcggataaaccgacagaatgaaggaggcagcaacatggatatcgaactgatcctgcaaaaattcgcggttttctccgggctgaccggggaagaactgcaagcctgcctgccctactgccgggacgccatggagcagctgaccgccaaacggcggtcggccctccccgcggcggagcccctgggcagtgccgcggcagcgctggcctactaccgctggtgcctggcgcagatgagcggaagcagcctgccccatgtaggggcggcggctctggtgaataaggacacgctggcggcggccaaggcgctgtgtgaggaatatctggcagcggccgccggggagctgggcggcggaaaattctactttgggcaggtgacagcatgcaagtaaccagtctttttgatctgcggcagcagctggcggtgtaccttttgccgctgctgggcgagtgtgaaatactatacagtatgccgacggtgagaaggccgctggccgccggggtgaccacgctggtgctgaacgaccacagtgtgaagcgcagcgaggacaccctgcccggcagcactccgctgctgctggaggtgggcctgcggctgaccgccctgcaccgggacagcatggaagcggtggagaccctgaccgacgccatcacggcactgacgctgcggggggatttcccctgcggggtgaccgggctggagtgggccgaaatcggctttgaccgggggtgcggggcctttgcccgccgggggcttttgaaggtctgctgcgcgctggccgaggcccccgaagaggaggatgaggcatgaaccagattatccactcccttggggggatcaccattgaggcggggggcacggtgctggcccacgccgccgggtatgaggtcaaatccagccgggcagtgacggcggtgcggccctatggcagcaccgagccgctaacctttctgcccggcacggtaacgcatattttgcagctggagcagataaaatgggaaaatcccgcggatttttatacaatgagtaattttaccgtgaaaattacaagaaacgggcagacggtgcaatacaccggctgcgaatggaccgccatagaggaggagacccgccggccgttgatctggctgcgggccacgctggcggccaaggcccgaacggaggtgaccggggatgaagcggctgctgagtaagggcccggcggcgccgcggggcgctgaaagcgcccgaccgccgtatggcggcggcagccggaggctgccgcggcaccgccgggggccgggctccgcgcacatgggacgggcaggagaaggaggtggggcatgatggcccaggaagcaaagcccgtgaccgcagccatccgggagccggaggcagcggccagcctgcgccgggagggaaacatccggaccgaagaaaaggccgtcatccgggagatccccctgcaggataccgccacactggagactgagctgagcgccctgcagcgccgccagctgcggctggccccggagatggaccgctgcggcgagccgctgtactgagaggaggaaaccttccatgacgacaatgagctttaagaccttcacctttccgcacaacccggagaggataacggtaaccaccgagacccgtatagccaccgcccactgcccggaatacgggcctatccaccagaacctagggctggcccggcggatcatccgggcggagggagtattttacggggccaacgccaaaatccaatacaccgccctggaggccctgatgtggcaggccactgccggcaatctgcgcatccccgggatgggggtggtggtggccttccccactgccttgagctataccggggagggagatggcacggtgctgcggtacaccgcggagttcaccgagctgatcgcttccaccgaccgggaggggacacgctatgcggactgagcagaggaaacgaatcgggccgagtggactgccggggccgatagcagcccgacaggacacgctgaaaccgggcggtattccggacggcggcgcagccgggaaggaggaacaccatgtcgattgagctgctggggctgacactggggaatgagaccatctccctgaaggagcccagctccatggtcatcaccagggcgtgggattccccggcgtggcagctggatatcaccctgccgcacgaggggccgctggacgacctgacgaaaattcaggtgaagcacggcaccgacgcgctgtttgccgggctgtgcgatgagatcgtacgctcggtggatgggaacggggcatttgtcagcatcagtgcccggacgccgggggcgctgctgtgcgataatgaagcgctgcccaagacctacaccgacctgacggcgcaggcatactttaacgcggagctgaaaacgctgggttttaccgggctttcgctgcccaataccaccgccagcgcggcgaccttccagctggggaaggggcattcggtgtgggaggccttctgtatcctgtgcttccggctgtatggccgggagccgcacatcaccgccgggaacaccgtggtggtggagacgctgaccggcgatgaccccattattatcagcaacgcggtgaacgagaccggggtgctgcggtactgctcgctggagtacatcacccggcggagcagcccgctttctaccattgtttaccgggatgcgggcggggcctattcccagctatacaacaatccctttggcaacgagcagcaggtgcggcgcaaccggtacatcatcccggccggggaatacaccggcaacccggcgctggacgcctaccggcgggtgatgaaaggccagctggggctgcacagcgccagggtaacggtgccgggactgcacaacatcgcccccgggcaggccatttatctgaaatccacaataagcggcaaccggctgatggcggcttatcaagtgaagatcatctacaccgagagcggctgcctgacccggctggtgctggccgacccggcctacatgtaaggtgagggcaaagggtagagggtttgcggcgggcgcagccccggcggcgaagccgccgaaagcaggcggagcctgctttgttccgccgaaggcggaacgggctgcgcccgatgctgcggcttgctggcgctggcggagggcggcaagcggaaggtttgcggcccaacgcccaaattccgcggttggttacaaaatgtaataattatgctgagttgggtgctgctggagcttttggcagcggggaggcagagggtaaaaatgggaagaatggtgcaaaaaatccagaaatttcggcgtttttacaaccaggaagaaagaaaatgacgcaaaaccggcaaaacgcataaaatgacaaattggttacaatctccatcttgtggaagtgggcgatggccggtacaatgggccacagaagccgggcggacagatgtggagcatgccgccgggtcttcataaaccaaaatgatttttacccaaaggagagtaacccatgaaaaaagcatttgcactggcactggctgtgctgatggtgtgcaccatggcgtttgcggtttccaccgggaaccagactggctaccccggcggcacctccgcggccgataacacctacatgcagtccatcgtgcccggacagtctatcgtattcacccaggaagagctgggcctgactgaccagaactggggcaagaccaacggcagctttgaccccaagaagaataccgttaccctgaccgtccccgtaggcagcgatctcatcgccagccagggctgggtacggaccgatgagaccacctacaagtatgtggtgaccaccaaggccaatgagacctctgtactggataacaatgccgatatcatcatttccggcgtaaaggtcaccgtttacggtgtttccgctccggcgctgaatgtgagctatgtgaaggatgtaaacggcgtgaccaactatacctatgttaccagctttgatgagctggcgagcttctccgccaaggagccgggcgacaacttctgccccatgaacgccaagagcgaggaccacatcctggccatgtgcttcgactacggccgcaaggctgatgaggccgacgccgtatttggcgcgggcggactgaatgtcgccaacatggataagaccggtaagatcctgtatactgtaaaggccgccaccgtagatggccagtacatcaccagcggcagctggaaccagtccgtcaccgaggataacggcggcaaggtcactgtttctgtcccgctgaaggccggcgacaagatctactttggcaccgtgaattacaccaccctgtcccccgccgcccagaaggcgctgaacgacaacctaaccaaggccggcgcttccatcaaggcttcctacggctacggcgctgagcaggtcatcatcaaccgcccggcggagatcaccgtggacggcatggccaagggctacaatgcctacatggtacgcgaggacggctccctgcagagtctgagcgccaagtttaatgagggcactggtctgctgagctttggcggcaccctgaccggcccggtcatcgtgaccgataaggcactgaccgcgaccaccaccagcaatagcggcaacagcggctccaatggctccaacagcaatggcggcagccagaatcctgccaccggtgccaatgacatcgtaggcgtagcggccgctctggtggttatcaccggcgtttccgccgccgccatttccctgaagaaggactaagaccttcctccctgcccctctccacagggcagccacagtgcgagtaaacccccggtccaatggccgggggtttttgcgtattgaaaaagtctgtcatggcagattctaaaaggctccctgaggctcccttgggtaggaggagctgtgaccgacccatcattttgaaataattgcagcctgttccaaaacgatccctccggcgcttcgcgccgcctccctttacacaaagggggctttggtttctgcgagacgccaaaagcgagattagccggcaggctgaaggtttcggcccatcggggcggggaagttcgcggggggaagggggcggccgcaggccgccc

SEQ ID NO: 2425 - DNA, 11240 bp, Unknown
  16S sequences of unknown bacteria
aggccatcacgccgcccttcttcacggcatcgttcagcactaccgcacctgccttaatgaaggctgcaccgtcagcgacgaaaaaattccccacagcgccgcctccgacggagactgcaccaccgacgacgtgtgtgaatgcggatatattgtgaccgccgcaaaggacggtcatgacttcggcgattggctcccctttgaggacggcagccacattcgcagctgcaaaaacgacggctgtgaaaagagtgaaaccgaaaactgcgccggaacccccgccacctgtaccgaaaaatccgtctgcgagacctgcggcgggcgtttcgggcagcttgacccggaaaatcacaccgacgtgacagagtggataaccgacgaaacaacccaccaaagcaaatataaatgctgcggcgccgacgccgtttcctccgaaagccacctttggaaggacggagtctgcgaaaaatgcggctatgcctgtaagcacagcggaggaaccgcctattgcgataaaaaggccgtttgcgacgtctgcggccaaagctacggcgaatttgaccccgcacgccacggttctttaaatcatgtcccggcggtggccgccacctttgaaaaggacggaaacatcgaatattggatgtgcgaaggctgcgaaaaatattttgccgacgaaaaaggcgaagatgaaattaccaaagcgcaaaccgttgccgcaaagctcgaaaagcccgccgaatcggaagtgtcaaagcctgccgagtctgaagtgtcgaaacccgaaacctcggatgaaagcgtcatttcctctaccgaatcggaaacgtcaaatgcgccgtcaaccgaaacccaaaaccccaagtcgggtgacagcggtgccgctgcggccgccgttttcgccgtcctgggcggcggagtgctggtccttttgaagaaaagaaaataaccgcctttaccgagcgtaaaaaagaggcttccccgaaattcggagaagcctctttaagctgtttataatttatttgacgatctcggcaacgtgatgaattccctcgggaagttcgctctcgtcgcaggaaatggtcagaagcatgttgacattttcctcttccacaacggcggacagtctgtcgaggaagtgaacaaggctttcatagtccttgccgcccattttgagggttccgtcgacataaacgtcagtgatgtcgtggtcgccggcgaggacaccggaaatgaaactgtaaagctcgtcatatgtggagatgccgtaatgctctccgtcgatgaggcgggccttgtgggtgatgtcataggtcagcttcatgcccttttcgatgcaaacaacgttgccgttgctttcttccgcgcgggcgttgatggagtcgataagctttttggtttttcctgttcccttgtttcctacgataattttaatcatttgaaaaaactcctttataaaaaattacttggaaatacgcttttcgagggcttccttttgatcctcatagccgggcttgccgagcagagcaaacatatttttcttatagctctcgacgcccggttgattaaagggattgactcccaaaacgtaacccgaaattgcacaggccttttcaaagaaatagaccatataaccgaattcgtattcgtcggcacggggcagctcgagcaccaggttcggaaccccaccgtcgttgtgggcgagaattgtgccctcaaaggccttgcggttgacaaaggacatggtctttccggcgaggaagttgagcccgtcgccgttgtcggcctgttcctttatttccacatccttttcgggactgtcaatccaaaccacggtttcgaaaatgctgcggacgccgtcctgaatatactgtccgagggaatgaaggtcggtggagaaaatggcgcttgcggggaaaagacccttgttgtccttaccctcgctttcgccgtagagctgtttaaaccactcggccatcattgtcattctcggctcatatgccgtcagcatttcgatacccttgcccttgcgaagcagaatgtttcgcaaagcggcgtatttataacaatcgttgctctcgatgtcggggttcataaaggcctctcttgcgtcggccgcgcccttcatcatggcgtcgatgtcggcacccgaaacggcaatgggaagaagtcccacggcggtcagcaccgaatatcttccgcccacgtcgtcgggaaccacaaaggtttcatacccttcgctgtcggcaagagccttgagggttcctctcgccttgtcggtggtgcagaaaatgcgctcctttgcaccctccttgccgtatttgttttcaaggaactccttgaaaatacggaatgcgattgccggctcggttgtggtgcccgattttgaaatgacgttaacgcagacgtcgcggccttcacaaagggaaagggtctcggcaagggcggtggagcttatggaattgcccaaaaagtatatgtcgggagtgtcctttttaagattgttgtaaagcggtgatttgatgaattcaacggcggctctggccccgagataggagcctcctattccgatgacgatgagaatgtcgcaggaggatttgatgcgctcggccgcggcctttatgcgggcgaactcttccttgtcatagttgaccggaagatcgagccagccgataaaatcgctgccggcacccttgcccgaatgaagaagctcgtgggcggccgaaatctgcggctgcatgcacgacagctcatgctctcggacaaagccgcgggcatatttgtctgtaagctttaatgccataattgactcccttccaaagtctttgttaagactttatcagttttgttaattatatactgtttcgggctctttttcaatagggttttcgtcaaattttaaaaatcttcacaattaaatcttgccaaccgaaatctgaagggcaagcagcgcgtcggtaacggtcacattgccgtccttgtcaaggtcggcggctgagatctgctcatttgtaaactctattttgtttaccgaattttgcagaatgagcagcgcgtcggtaacggttacctttccgtcgccgtccacgtcgccgctaggcccctgcttttcctcaaattcgcccgaaacgatgaccatggcgtttggagcaagtatataaaagccgttttcgtccttttcggttataagagcgtcgccgttcacggttttggcggttatcgagtcctctttaaaggcatagccgtcggcggccttgggggttatataaaccttttcgccaacctcgttataatcggaggaaaattcaaagctgccgttttgaatggtggggtcggagaaaatttcgtgctgctttgcgttccagttaagggcggtttttatggcgttttccatgcgtgcggcaccctcgatgtgagccgtcatggaaggatgtcccgacgcggcggcgcggggagaaaggccgatagtgaatataaatacgtttttatcgccctgggcgttgaccgtgttgacggcggttctgctgcgatcgccgctgacaaaaatcaccgaatcggggttgaccgaacgaacctggcggataaatttaatcattcccgccgtgaattcttcgtcggtgggctgaattctgccgtagtcgttgccgcccagcgaaatgaacaccaaatccgacttgtgagaggcaaagtcataggtatatttgtcgcccaccgaccagttgtcggtgaagaaataattgtcggtgtaatagccctcgtttgccttgggggatttgagcaggcagacgccgcttttggcggtcacgctgaagtttgctccgaagaagtttgccacgcgggaggcatagctaagcgttgtgtcctgggtttcgggatcccaaggcagatttgtgccgatggacaggtttccgaaggctgcggcgtcgctgtcgccgattacttcaatgttgcggatgttgtttttgggaggagtaaggaaattgccgtcgcaggaaagggagtttaacagtccgttgctggttcggccgccgccctcgccccttttaagaacggtgacggtgtgaacaccctcggaaagccccttgataacgccctcgtcctttccgcaaagcacgatcttgttgaccgagcccggaataatggtgaaggagggggtggtttcgttgtatttgtcacggcactcggggaagggaagagaggtgtcgaaatcatagcaatagtcgtcggtgtccacatatacattataatgcgaacggcctccgtcggttgccgccccgcccacaaaggagaaatcgcccgtaagggtggtgccgtagaaacggacggtaaagccgcaggcgccgtagcccatgcgaagtccgccctcgtcataaaatgcgcggcctcttataaggaggttcgacgagccgatgtttttctgcgaaagctcggcgtcggccgccgccttgttttcatatttattcattaaatcttcaagtccctttgcgtaaagctcaagctgacggtcggtttcggcctcacccgaaaagagcgaaaacatcttttgttcggcgtcgcttaaaaccgaggagtcaaaggaatttgccttttcaaaaatgccggaaaaggcgtcgggctttgtcagcttgtttgtttcggtaaggcagaggtcgtcgaccttgaccgaaaggtcgctgtcgtcctttgaaacgatgttgagggtatatcccgtgacgggagccgagcccgacacaagaatgacggcgcaaagggcgttccagccctctttaagctgtgcgtctttaaaaatgttggactttttctgcatacttcccatggtgacggtcagcgtgctttgagccgtgtcaatgctgtcgggagtttcggtgtagagcatgagatgggcgtatttaagctttttggcgctttcgccgagctgtatgtcaagtccctctcttgaaatttcgatgctttttccgaaagccataagggcgccgccgccttcgacgttataaatcgaattgtatcccgcaccgccggaaattccttcgtcagagtcaaagctttcgaccgagaccgaggtaattgccgattcggtgtcgtcggcgaatacggccgggaggcagtacagcgcaacggcaagagtcagaaacagcgaaatcagttttttcatttttcaccatacctttaatataattttgcctgtatgacaattataacggtcgaaaaaccctttgtcaatcaagaggcgggatatttttgcgcacagcagacaaaaagatgaatatttttagatttttttatgaatttttgattgacaaatgaaaatacaaggagtaaaattaacaatcgagaatgtgaactgcaaaaacggttcttccaacttaaaaaggagggttattatgaaaaagaaattggttgcaacggcgcttgcggcggcggtcacgctgtcggcttgccccttttcggccgcagctctttccccgtcccttcggggaagtctcaaatcggtgagttttttcagttcctttgaggggggaacgctcgacggagaaaccgcaaacggaaaggctttaaacctcggctttgagcagacccgttcaacggccgccgccgccctcggcgccgaaatatccgtcggacccgatgtgaacaattgcggaaaggcaaaggtcggttacagcggcgcccacgcccttaaaatcagcgggcaaaaatccgacgggccggtcaaaaacaacgccgtgattttttcggggctgaacatacgggtctttaaggatatgcagctttcctatatgattttccccgactatgtcggcgagaacgacgaaaaacgcacggggcagtatctgtcggtcgaccttaaatttaccgacggcacgttcctttccgacctttcggccgtcgacataaacggacacggcatggaccccctttcccagggaaaggccaattccatgtaccgccgccaatggaatcacgtctgctgttcgctttacgaaacggcaaggggaaaaaccgtcgactcgatacttgtgagctttgaaagcgaggaggcggcagacgagctgctgacctatatcgacgacataaagatacagaccgtcacccccgagcaaaaaagctctcccgccgactatgtgctgaccacaaggggaaccgacaacaacggcgcctattcccacggtcagacctatcccgccgtcagcgtgccaaacggctttaatgcctggacgcccttcaccggcaccgacaaatatctttacacctatgcaagcgactccattcaggccttcggaaccagccaccaggccaacattgcgcttatcgactacggcgtttttcagtttatgccaaacgtttgggaaagagcggccaacgaggacattataggcgccaaaaaccgcgcctcctccttcagccatcaaaacgaaaccgccaaggcgcattattattcggtcacctttgacggcgacactcccgcctcgggcgtcaaggtggaaatgaccccgaccgaccatgcggccgtcataaaaatgacctatccctccgacagcccggtggtaaacgtcatttttgactcgttctctacccaaggggatgtgaaaatgggcggaaacatcgagtttgacggcagcagctttaccgccgttaccgactactcggtgcccaacgtcgccattcaaagcgggtttaaccgtatgtttgtctacggcgagtttgtgggcagccttccccaaagaaccgataatttttccgattcggcgggtcggcctcttgccatggcgcagtttgcaagcggcaccggtgaggtgataatgaaaatcgcgacctcctacataagcgccgagcaggcaaagaaaaacctgtctcttgaaatttccgaaaccgacacctttgacaccgtcatggagcgggcaaaggcacaatggaatgaaataatgaacacggtggaggtggacggcgcctccgagcaacagctcgaacgcctttattcctccctctacaaaatgtatcttttccccaaaaactattcggaaaatgcgggaaccgccgaaaatccgcagccgaaatacgcaagcccttataagagcacggcggacaacattgtggtgaacgacgggcaaatgtatgccggaaacggcttttgggacacctatcgaaccgagtggccggcccttttcctgctttcgccaaaaaaggcgggcgagcttcttgacggaatgctcgagcactaccgcgacgcgggcaaaatgccccgctggtcaaaccccggcggcattttgagcatgatcgccaccaatttcgacgcagttttcggcgacgcggcaagcaagggcattgaatttgacacggaaacggcctatgaggcctctctgagagccgccgcttcctgcttcggggacaacggctatgaaagaaattacagcgaaacggcgccctatatcggctatacccaggatacgggcgacggcggaaacagctcgatttcctggactctcgaggcggccataaacgacgcgggcatcgcaaatctcgcaaaagctctcggcgacaacgacggctatgaatatttcaaaaaccgctccaaaaaccacgccaaccttttcaacagcgagctcggcttttatatgcccaagaacggagacggcagctttaccttctcaaatgaggaatttgacccctacacctggcagaaatacggttttgtggagacaaacggttggggcatgagcgtttacgaaacccacgatgtcaagggaatgataaacctctacggcggatatgaaaaatttgccgcaaagcttgacgagattctgtcggctcccgcaattcataagggcagcgaggcccagaaccacgaaatcgccgaggcaaaggacgttgggctcggccagtatcagcacaacaaccagcccacccatgccatgctttatctttataattatgccggaaaggcctataagacccaaagcctgacaaggcaggtgctcgaccgcttctataacggcggagagatcggtcacggctatatcggcgacgaggacaacggcgagcaatcggcatggtatctgctttcctctctcggcttttatgccgcaaacgcaggaagcgacgaatattgcataacctctcctctttacagcgatgtcacacttcaccttcccaccggcgacgttcacataaaggcgaataacaacagcgccgaaaacgtctatatccaaagcatgacggtggacggaaaggactataccaagtgctatataacccacagcgagcttacttcggcaaaggaaatagtgtttaatatgggaagcaccccctccgatttcggctgcaacaccgaaaccgacctgccttcatcggtgaccgagggcgatgaaatcgacatcatggaggatgtcacgacgggtatgcaggtgtccgaaaccgccgacatgagcggtgattgccccctcgttttctgcgaaaacatgaccgacgggcaaaagcttttctgcaatttgagctatgccgagcaaagcccgagcttttcggggaactccgcgtcgataacgatgtatctgccgacggcgcaaaccctgcggcagtatactctgacctctaagtccaaatccgccgcccccgatagcattaccgtttacggctcggccgacggaaagacgtgggaaaagcttgacgagcggcaaaaccaaagcttcagatgggatttggccataaacttctatgccgttgacaacacaaaggcctataattattaccgtctcgacatagaaaacaaaaatgtcgaaaatatcgagctgtgcgagcttcagctcatatgcggagaggttaaggaaaccgacgccgtcggcgacgccgatttaagcggcgatgtgacggtgaccgacgccctgcttgttctgcaaaacgccgtcggcaagatagaatttaccgagcggcagaaaaaggcctgcgacaccgacggcgacggacgcataaccgtttccgacgcccttgcggtgctgcagatcgccgtcggaaaaataaaactttgagaaggaagagagttatgcacaaaacaatcaaaaaaatctgctccgttgcggtggcggccgggcttttgaccgccatgggaatgtgcggcggggtgtctgccgccgctgcgggaaaattcaccatgccttgttttttaagcacgggcgccgtttttcagcaaaacaagcccattcacctttggggaacaggtacttcgggttcggtcataaccgccgaactcctcaaaaattccaaccgtgtggagcttaagaccgcaagcgccgacagcgacggcaactggtctctcgagcttgacccgagagcgggcagctttgacacctacaccataaaaatgtccatgaacggcgacgagcaggcccgccttgacgacattctcatcggcgagctttgggtcggaacgggtcaatccaatatgcagttcaatttcggcggtcagcttgaaaagcatgacgttgtccgaaagcttttggcggacggcaaatataaaaacatccgtgtgctcgacgcctcccgcgcagtcgacattgacgctccgagaacgcccggggttcagtatgacaccctcgattgggacaccaagaaatccgagtggtataacgcgcaggaaatcgactatctttatcacatctcggcctacggggtgctcaccgccgtcgagcttttcgaaaatctcaacgtgcccgtgggctttgtcaacgccacgataggctcgaccggcatagaggcatggatgtccaaggatgcaataaacggcagcgatacggtggtcgacgtgctcaaaaaacacggtaaatattccgacaccaaggagagcttccgttttgacgaaatgacgggaagctggaacacccgtctcggacccctttcgggatttaatgttgcgggatttatgtggtatcagggctgctcaaacctcgaggaaggtcttgttaacgacgcaggcttttacgaggccgccctcgacgcctttataaaggatttggctgtcaaattcggatttgacgatgttaacgatatgccatttataatgactcagcttgcccccgacaacttcaagtttacaaatgacgccatggctgtgtggactcaggaggtggctgcagtcgttgataaatatgccctcagccagcagataaccttctatgacgcaaatcttgcctatcatctcgacggctgctcgggagacccctgcacctgcggcaacggaatagaccacccgagcgacaagcgcgccattgcccaccgcacggctcaggccatgctgcacaatatttataaggtcgagggaaccaccgccgactattatatccccgaggttgaaagctatgaaatcggccaaaacggaaagataaccgtcacctttaaaaatgtcggcgagggacttaaggtcataaccggagagtcctccgacgagagaagtctcgccgagtcggacgaggtcgagggctttaccgtttgcggggaaaatcatgtttttgctcccgcaagagccagaataatttccaaaaatcaggtggaggtctataacagccttatcaaaaatcccgtggcctttacctatgcctttacaaatttcaacgtctgctccgacctgtgcaattcctacggacttcccgccctccagttcagaagccacgtttttgacgacggctattactgcacgcctctcgattgggcgacctgcgaccaaaccgtcttttgggacaccaaccgccgcgacggctattatgttcccaactggaaggtgggtcagctttcgggtgtgaccgaccctgcggcggggaccgttaaggtgaattccgaaatcagagcccaaggtcagggttcggtggaatttaattatcaaatcagccccaccaccaaaaagcatgtaagcgccggccccacctattcttccatgtggtatctgcccaacgctcagcttcagaagtataacaccctcaccgtgcttgtgaaaaaccccgacaaccgcgccaaaaagctgaccctcggcataaagaacggcgacagcgtgtattatgttaagccggccgacggttcggacagctattctctgcccatgaacagcgattttaagtgctatgccttcgacctttccgagataaccgacgccgacggcaacgcggccgataaggacatcctttcgtccataagcgacttcgagtttataataaaggatttaaaggacggtacggtatttttcgattatatcgaattcggatttg

SEQ ID NO: 2426 - DNA, 7616 bp, Unknown
  16S sequences of unknown bacteria
ttttaattcgtcgtgtatgaacgacaggctcatttgtttgttcatggatttattacaccacttatttcacgttttttcaaggcccttggttttgtgcggtgttgccttaaatgtcagaaagtaattgtggtgcgggtctcgcggacgttgacaagatcaatgaaaattgagatttataagtatagtcactcataatccttttcgctgaacgtagcagcgcattatcacttccacagataatacgtaacctgcccgcccattaaggcatcggaatttccggttccgtttcccgccatactttgactcccggtattctggtcgccatttcgcaccgtgatactgaaaccaccggacaaaaacgttatcgggtcgtccatatgatttctgtacgcagacacccggtacggatttaccgaatcggcgtgcatctcatacagcgtcagtccagccgaaccaaactgcgccttgccgagattgaaaccaaagcagaaaccgaaatagtcctcaaaccccgaagaaatcataatcggctcggaaagtccagctcttcgcgcgcgaaggcatccctcgacaaaattgaaagtatccgattttccgaaaagagacaggcttataagcattccgctcttatcggtgtcgagcaggtacagctcctctccgggagcgagaaagccctttgtcttcacggagtgcagatacgctctgtccgggagctgtattccgcagcagcttatgtccgtagcgtctgtatcgcgcacggtcacccagcagatcccgggctttccgacatcgcggtcgtcgcgtctcagaattaccctgacacccgagtaatatggtatcctgaaattcagcgttataccgctgtatcttccgcctttggtaaaaaacggcgtgctgaacccgttccgcggatattcacgcatatccgcgatgtccgtgttcatcccgagaaactcgtacaaccttccggaaaagaacacatttccatcagtctcgacgtctagagtcgttcgctcgaagccctcacataatacggtgttttccgaaattgttgtgtccacagcaccgatgaactgcatactgactatcgccccgcgtccctcgcgttcgtatattaccgctgttttgccatttccgaacagtttcgccgccttatagaccttcgaataaatatttccgatcggagtcggcattacggattcgctcatttctcagaggctccgcttatttcatcattcagctttgcaatctgatcctgagcttttgtctcgaactttgcgtacatcgagctgaaatcggacttgccagttctgaagatgttcatgatttcctcattgtatcctccgacctcctcgagccagccgatgtcatatacgcggtttgaaaagattatgtcaagcatctccgcgctctcgtcgtcacgcgttgcctttccgacgagcgttcttgtgtaataggcatcgcggacgatttcctttgactgataaccgagattttcaagtacggtgccgatcatatccgggtcctgaatatcagccggaacggcaaggaatactgacggataagctccgacattggtataatacgcatcctgagactcatcatatttcgggaacgggattataccgtaatcgttctccatgttgcggtacgagagcgcacggtgaaggagctcgacaaagaagagcgcacggtcgcccatgaacatatcgttcgacagcttctcaatgtcgcctttgccggaataccgctgatacgggaagcagaggttagtgtcgccggctatcgccagatattttgatacggcgtcaacagctctttcactgtagagtgaaagttcgatctcaccgtcatcgttgatctcacagcactttagcccggaggaatttatcacagccatcatgctgtcatcccagattatcgcgccgtatctgtcgttttcgtccatcacaccgtcaccgttctcgtctccggctactatacggcagagctcgtcgaacttgtcgagtgtccattttccttcgcggacgatggaatagatgtcagggatattgtatttttccgaaagcgattttgagaacaatattacacaactgtcctcgttgatagttgttgaaatgtcgccagtagtcatatatagcttgtttccgaacgagaggtcgcggttcgctccctgatcccaccaactgtgagaaaggtcgagtgtatccatgctcatgagatcggtcaggtatcctccggtcgcgagcgagcatagtgaataacctctcgcgatcatcgcgctgtactctccatcacccgccataatagatttctgaagtgtggtcttcacgttgtcgtttgagttttcgacgacgtttatcgttatgttaagtgcctcctcaactgtcttgtttctgcggtagtaggcatcgttcagaatgtcgccgttcatttcacctgtgccgaaatcgttcatttcagcccactgaaagcattgattcatcaaaaacgacacttccgcaccgccgaaatcggcggatgttatgtccggagtctccgcggttgtctccgaagtttcagaaacggtttctgtgctatccgccgcgggagtggtatcggtgcgaccggcttccgagccgcaggcggttatcaggataagcgacgcgaggatgagtgcgaatgaggttcttttcattttgttttctccttgatatatatttttgggggctctggtcatagatcccagttgaagtaaaggtcatacgcgggcgattcagtgttatttttcgttaccgcccagacgcttattttattatcatcgattatcaggctctttctgtcaccgctcaggaaggtctttttccagacgccgttttcggagaagagctccatatcgcatttcaggtcgtttctcgtgtttccgatcgatatcggcaccgaggcgtacactccggtgatcatttcttccggcaaattgacaatgaccgtcaatgaattttcagtgttctgacgcattatgttgtcatcgccaagtgaagctgatagtattctgacagagtcgtcgacgacaggcgcacgctgatgttttattccggtttcatcggtcgcatccgggaattcctcattgcacgctttctggtattgcaggaataccctcgggttcagcgcggcgatttctcccgaaagagttatctcgttgagcttccccggcaggatcatatcggttatgtcaatgtacattccggtgtagacagagcatatatgcgtgttacgttcgatttccggggcggcaattttgccgttcacgaggatcacaggcacttccggttcggcgtcggtgaatatccacagccaaagcctgtccggtctcgtccagcatcggcatggacgcccggttctcgcgatgtaatcgtcctcgatagcgtttgtctcgtcgtcgacgtatttctcagcgtcggtcagaagactcatcatcgtatctgacgcgaagaattcgtatgtatataagccatctttcttggctttcgcggtcagatacctgtcctgcgccggagttgtctcggtcaggttatcgtggacttccgacgagacgcgtaacagaatgacctcataccctggtatcacgccggaatgattgcttccgtgctttattttgccacagtattgttcgtgtgggtaaagcatagagatgtgcttctcatcggtgtcgtcggaaaaaccgatgcgctctgtaaaatcgatcgagtaatcaagtggttgaggaaacgggttgactacgaatatgaagccctcgttgtctttcagctttgagtacccttccacaccgcagccgacctgtgctccgaacggtatcgtatgcggcgaatatccgaaattctcccgagcccatccgatccatttgtgataaaatccggtgtacccgtcgatcttctcaggggatgctggtattatcggcagcgtcactgaacctccggcggcaagcgcgctcataagcgcaaacctgaatccgcagatatcgacgagtttatcgagatccgggaaattcatatagcacgcctgaagcatcctgtgcgcaagtccatgattcatcgacgcgggaagaaacctgaaataccagtcccacacactctgcatacgcataccgtcggcggtgcatctgtccgggagcagatcgtcgaaaaccgggttcattatatagacttcattttcccagtaagcctcgtgctgatccacatatctgaagccccagacaccgtattccttgagaccgtgaaagctcatgaaatagatatccggaaattcttcctttatttcgcgcattacccgcatggcgttccggaagccgaggtatccgccctttcccggaagatgcttgtgggcgtgattgtggcagaaaaacgcgttgccaggaccgggatcccagtcccagagattgagattgtactttcttattgtattcttctggacctttatataccagtctgtgaagctgtcgtccgctatgcagttttcctctgagatatgctcgtcaattgacaccttcttccactccggaatgtcggcgtaattctgcgtgaagctgttcgaaccaccgtaattgcacgctgtacccatgtagaagccgaccttcatgcctcttgagcgcgcgtatgagacaatgcgctcggcggcggacgattcgggcatcaactcccagaacgagtccccagaggcgtccggtatgcgcggctgacacagtggattaaataaaattgtgtctcctccgatcatggcgaacgcgtcgatctgccgcagatatgccgcgacctcagcttcggttgacggacgctgcggaagaccgctgaagaagttgtacgacataaatctgaacttctgtcggtcacaacagaaataatcggaaatgaatgagttcatcgccattatctcagaaaaatcgagagggattccctcggaaggattcctgtatcgcgggtggtatcttccgccgcgacgtatctgtgtttttgaaagctcgggtgaaatgagttcaccggaaagaccgtaaacacctgcaaaatccggctcgaacacaattttttctccagcatcaagaatgacagccggttcggtaacgataaaattatcttcgagataaaagaacggattcgccgccccgaagcagcatccggtctgaccttctctcagaaagaccgccgcggaagcgttcgggaaggttttgtacagaaacttttccccggattccggtagttttgtactcactttgaggagagttgttttttgaggaaaactcattccgagcgtgcgcatcacaaatccgcattttgttatttcgtagtcgagtgtgaattccgccttgtcgaatgaatatctaaagctgtattcagaggtcttcactgtctctctggctgacgacagggagtatgatcctttatccgtggttatgataatatcgtccgaatcatgtacaagccggatgccgccggagtcaattttcccgataaaccctttctcggccagtgttagctttgtgtttttatccatattcgttcctcgcgtgcgctgattgtgtatgattattatatcattattcagatattctttcaatgttccatattgacatcacacagtgtatcatttgcagatattgacatcatttcatgaaaaacgaaaattttgttgaaattatattgcgcgcaaaacggatgtgtgttataataccgatagaaatcaggaaaggcggtatacgctatggaattcttcaacagcgtcgagctcaacggtcatatacgggtcagaaacatacattatccgatactgagcgatacaacgcacgtggaaaggtgtcactggcatgattttcacgagatgcttttctgcgtaggaggaaagttcattgtaagactgaatctgacggaggtggaagtgtctgccggagatattatcatattcgaacccggaataatccatgaatctgtctgcatagaagcaccaggggatttttgtgtcgtgcagtatgaatcgtcattcgtggacgacggagagagtgacggctgctccgctcttatgaattcgatactgaacaagcgtgacataggtgcggatatggcaaagtatgtgatcagaaacgccgacagataccgcggaaagtttgctaaactcttgacagaatatgatgaaaagcgggatggctggacatatataattcgcgggatcatgctttgtatccgcggtcagcttatccgcgacgggctgtatgacgcgaagaaaaatgaccgtgaccgtccggacattgatccgcatataaaaaaagcctgttcgtttattgaacagaactatgcgtcgcagataactctccttgacgcggcagtggcggcgggatattcgcggacctatttttcaaagttgtttgcgcggaatctcggaataacattctcggattatctgctgtttataagaatgtacgaggccgaacgttttatgtggaagggtggtttccggatagatgaagttgcgtcgatggtcggatatgaaagcgttccggcgttctacagagccttcaggagggcgaccgggctgacaccgagccggttttttatggttgattcagggattatggagaatatggattgatagggacaatatatcttccttgtcaggatacgtatatttatagtttaccgttcaagatagcccaccatgaaccataccatagcccaaaaccagagaacacttcactatgtgcagtaatacagattcgattgcttcgacccattagcccgcctgcgatgagtcacagtgaggtaccccttcctgacaagctcatctatcgcgcgcttgacagtggacataccgcacttattgtccgccgcaatcttcttgtgcgacacataacagaactcatgcctcccttgcctgtcccgaagatagcggtaaatcataaccgctttctttgagacttcatcacggtagatcatttcgaactccctcatcggcatcaccatcctttctttgttcgttagattttgccagcgagaatccgtttttctcagtgacgaccttttctccgacgcttttcggcggatacatcgagataatcggatcttcgagcatcttcttgtttgcgtatgaaacggtacggttacctttgtcaggaactgtgtagatttctttcgggaactcaatgccccacttgaaaaacaatttcagcttcacgagcattggatagaaaccggtcttcataacgcagaatgtacctttgggaagggattttagctcatccggcgtcatcagcgcacgctcaatcatttgtaggctatgcgatggatcgttccggcttctgctaattgaacccgattgtacagttttcgttccaagagctttcgagagtatttgcgccgattcactgttcggtgcgaagccaccgaaaatcgtgagctgtgtattgtcagtgatgatctcgcatccttccttgccatagttcttctgaagctgcgcgaaggactggatgattgcgacaatagacactcggcgtgagcgtgacgccgagaacatcatctccgctccctcaatttttggaatggtcccgaactcatcaagatacatcataactcgattggggagtcgtccatcgtatt

SEQ ID NO: 2427 - DNA, 2774 bp, Unknown
  16S sequences of unknown bacteria
atgcggatgttgcccacgacgagcggggatccgcctgcgccggcaacggtgcgctttgtttcgggcggcacgggggcagcggcggcatcggcgcggatatcgaaaccggggcaatcggcatgcgcgaggttgcgcacgccaagcgcctcgccgatgacggacacctcgccggcgcggaggtggcacgagccgggcgcatcgacgccgtacttgcgctcgaagcggcgtttggagcggcacgccttgcggtaggtgcgctcgtctatgtcgttgccgaagatcgccgatgaccgatcgggtttagtcgccatgctcgtccccacttgtctcaaatccgatactattgctaacgcattgtttattgcatgcgcactattctaatgcgcttttacgtgttttcgattactgggggaaattctcaaatgagtgacagcgtgagtactgcgaccgttccggcagacgagggcaagaagcttgccggcaacgggatcttgtggctgttcgcgattggccagctcggctggtcgatgctttccggcatcatctcgaactggctcgtctactactaccagcctggggagtccctgctctcgcaggggcagcagctcttcatcacgcagggggccgtgttcgtcggcctgaccgtcatcggcctcatcaccgcctccggccgcatcttcgacgccttcaccgacccctggatcgcctccaagtccgaccgttgccggcaccgcctcgggcgccgcgtccccttcctgcgctacgcgcccatcccgttcggcgccgcgacggtgctcatcttcatctcgcccgtcggcgaggtgagctggatcaacaacctgttcctgctcgtcatggtcttgtgcttctacctcgcgatgacctgctactgcactccctacaacgccctcatccccgagctcggccgcacgcagaagcagcgcatcaacgtctcgaccttcatctcgacgacgtacttcttcggcacggcgtttgcctacctcgtccccaacatcgccgccgtcttcgcgcccgacttcggcatcacgaacgcgttccgcctcacgatcggcatcctggcggtcgtcgcggtcgtgtgcatgctcgtcccctcgttcgccatcaacgagcacgagtacgcggtcaccacgccttccgagacgcccacgttcaagagcctcgtcaagacgtttcgcaaccacgagttccgcaccttcgtcggctccgacgtgctgtactggatcgcgctgaccatgttccagaccggtctgccgttctacatcaccgagctcatggggctgagcgacagcatgacgtttccgctgtttgccctcatgaccatcttgagctttgccttctacctgcccgtcaacgtgctcgccaagcgcctgggcaagaagaagatcgtcgtcttcgcgttcttcttcttcacgctcgcctttgccatcaccacctgcgtgggctggttcggcttgcccggcgtcgcatggggcgtcatcgtcgccgtcctggcttcgatccccatggccatcctcggcatcatcccgcaggccgtcgtggcagacatcgccgaggccgacgccatccagacgggcgagaagcgcgagggcatgttctacgcggcacgcaccttcgccttcaagctcggccagtctctcgcgatgctgttgttcacttccatcgcgctcatcggcagcgggggcatgggctatcgcctgaccgccgtgttcgccgccgtgttctgcctgctcggcgccatcgtgttcacccgctaccacgaggacaagatcatgggcatcatctccgagaacttcagggagcggacgaaccgataatgaagccgatatccttcgagatcagctacgagacaagcgggggcccgcgccgtatcagcgccggcctgggcgccccgttcgagacgcaggacctgagcgtctgcccccacgtcgacggctcgcgcattacctgcagcatcgagacgaaagccgagctcaccgtgacggggttctcgcttgagctcgcgcatgagttcggcgcgaaagaccgcgtcctcgtcaacggctaccagtcctggaccgatacggtcgagctctccgtcaggtcacgcatgcgcggcgtgaacgacatccccggccccgtgctgcgcaaatgggtgctcaacggcagcggcgactaccgctttgcagactacgacggcaaacccgggcacctccacggctacacatatgcgtacgtgcgcgcagacgacgcctgcgagctcgtcggctcgctcgacgagtcgggcgggttcaccaagctcgaggtgctcaccgacgagggcaaggtcatcgtgcgccccgaggcaccgctcggcaggctcgcggcgcacgagacgcaaacgctcgtgcagctcgccttggtgcggggaagcctcgacgagtgcttcgaggcgtggtttacgcacagcggcatcaccgcgcgcacgacgcgcccgatcgtcggctacacaagctggtaccggcactactacgacatcgacgaggcaaagctcacggccgacctcgaagcggcgcgcgacgcttttgcgcaggtcgagaccggcgatgcgctcaaggtgttccagatcgacgacggctactgcacggtcggcgactggctcgccgtgaaccctcggaaattcccgcgggggctggccccgctcggcgcctcggcgcgcgaggcgggcttcaccccggggctgtggatcgccccgttcgtctgcgagaaagactcccggcttttcaaggagcatccgg

SEQ ID NO: 2428 - DNA, 32759 bp, Unknown
  16S sequences of unknown bacteria
aaaaaccaatatgtgcgtaaaggatcgcagaatcgggggctgcgccccctgtctcctttcatgtcccgcttcttcccttctcccaccatgcacacggcggccgcgggtcgccccgcagccgccgtactatgttcattttattgcagcccttatttatagcgcacaagctcctttagttcttccaactcatgcacattgtagtactgtggagaaagcagctcggcaccgtccggagttgcaagccaagtatttccaaatagaaagccatctttatcgctaaggacgctggggtgtagggtcagtaccatgttggggacgatctccatctcattcatattgccaatgtccactccgtcacccaaatcatgccccataccatgaccgctccatacaccggtcttgcagccgttttgggccactaccttttccacggccttggctacatctgccacggtgttgcctatcttcatcgcttccgcgccggcagcctctgcttcctttattacttccagaatgtgccgtacctctggctggcagcccttgctgaaaaagatcggccgcagcacctgtgtccagtagccaaagggccctgcaacctccgccgaataaacggtagcggtatcccgctccattcggtagtcagttggacggcagataaaagaatgcggatgttgagagcgcaccagcaccaaagaatcctccgcgccatgtgccctcaggtagccttccccagcgcctaccatctggcgttcagtagcacctacctctatcatcttcaccacatgctcaaaagactccaccgcgatgcgggtggcctctcgggtcagctccacctcaaattcggatttcggctgacgagccttggtgtaggcatcggtaatatccacaatctcagcaccggcatccaatattgccttctggatcggcaccggcagctcggcggtcgcgtacattcccactcggggcttcgtcagccccaactcgcggatccaaccacacaccgtttccaccattgggccgcagtaaatattctcatccggcagccaactcaaacggcgggcatggaactgctgtcctacagtggggataatcagccgaggcatctcacccggcttcataaaaacaaaatcacggcgagtcgttagctgatagcctgaaacatacttagtcgctatctggtaggcctgctgggcagtcgatgtcagcaccagtgcgtccaccctggtatccaccatcagtttatccagcagcgccactcgtctatcccgttctgctacatatttcgcgtctgtaatcatttgtttttcctctcgtttgttatttgaccaactcttttagatcctcccaatagggggactccctgtacttatcggttaggcagcgagctccaccctcagtggacacataagtatctgcgtacagcactccctctccgtttttatccagcaaactgggatggaaggtcagaatcatatttggtacgatctccatcttattggattctccaatattatacccatcgcccaaatcaattcccatggagtgccctgcccatacgcccttggaaagcccatacttttgcgctaccttgttgatggcttcatctacatcgcagatgaggttgccggggcggaatttctccacaccagcctggattgcctctttcacctggcacagcacctcgtaggcctcacggtggctccctctggaaaggaagatgggccggatgatctgtgtccagtagccgtacactccggcaatctccactgaaaacacaaacagatcgtccttttcaatgcggcggaaggttggacggttaataaaggcatgggggtactctcctcgggaaaggatcagcagatcctcggcaccgtgagcacgcagatagccctcagcatagccaatgacctccttttcggtcacgccgggccggatatatttcacaacctcctcaaaggctgcaatcgccaggtcggaagcctcctgaatcagctgcaattcatagggggctttgggcgccttagccactacaaaagcctcggtaatgtccacaatctccgccccggtttcgtaaagcgcgtccgtaaagaacttgggatactcccccagtgatggaacacccacccggggatgttccccgggcagcgcctctatcctacggcagatttcgcccaccatatccggtgtgataaccacatggtccgcgtccagaaaggtcttcagtcgggcatggaagccggcatcggcacgccccagcagggcaatgggctgttccccccgcaccatcatggaaaacatatgcccgcagggggtcgccaggtcggtcatgtatttcacatccgcctgatacgccatcgcgccgtttccatggcacaccatcacagctaggtcgttttcctccatcagcccgtttaggaccgccatccggcgttcccgttccgctatatgcatttcccttgtgcgctccatataggcctgccccctttatagcgacattcccagcagcgaaggcaggaatgtaataattcctggaacgaataccatcaccaacagcaccgccaggcatagccccaccagaataaacgcgtgctttgtcatacagtcaaagggcaccttggcaataccggctgccacaaacaggttaacgccaaagggcggggtaaccataccaagcgaaacgcagataatcataataatacccagcgtaatgggacttacattaaaggagcgcatcaccggcaccaaaataggcgtcagcacgatcatggcggcgttaacagacataaagcagccaatgatggtcagcaaaatgatcagtgcaatcaaaataccagcagcgctgctgaagatccccaggaaccagtcgctcagcatcttgggcacacggttggtggtaatgatccagttaaacccatcggccagcgagacgatcagcatcgcggaagcagcggtaataccggattcaataaacatttttacaatgtccttgaacttgatttctttatataccagcacacccaggatcaaaccgtaaatgaccgcaatgccggaagcctgtgtgggggtaaaaataccggaataaataccacccagaatgatgacgggcatggcaatggcaggcaaaccgtccgcaaagaccttcgccttatccttaaaggtaggcgcatccacaggggcgggcttgtagccgttcctgcgggcaatgatataggcatagatcatcatggcaagccccaaaatgataccaggaacgataccagcacagaacatggtgcccactgaacacccagccagcgtagcgtaaatgaccatggggatactgggcggaatgatacgcccgcagagcccatcaaagcgccagcgaagcctacatcatagccgtcattcaccatagcaggaatcataaagacacccaaagccgccacggtagcagggccggagccggaaatggctgcaaaaatcatggcggccaacacagccacaatggccaggccgccacggatgcggccgacaaacagccggcagaaattgatcagtcggcgtgaaataccacccatgttcataatgctacccgccagcataaagaatgggactgccagcagcgaaagattactggtggaatcgtagcactgctgcgccgtcagcatcagcgaggaagcgccgtgagtcaggttggtcacaatggacgcaaaggacatggaaaacgcaatgggcgttcccaggaacatcgtcaccaggaacaaagccaacagcatgattaacattacgcagcaacctcctcttcatccttctttgtaaagtcatggtagattgtaaacaaaatacggatcagcaccagggcaaagcaaaccggcacagccagctcacccacggcggtgggccaccgggtaatggaatacaccgaccccagtcttatttgcatggaaaccagcgcaatgccggaggccaccacatatccgcttacaaaaatgcagatcaaatcggtaaacagcacaacccatttggctatctttttcggcatctttctcaccaggaactccacccccaggtggcttctggttcctgccgctaccgaagcaccggaaagaatgcaccacaccaacataatgcggttcacctcagtggtccacatcaggttggcgtgcagcacctttgcgtccagtacttctattgccgtgacgataagcataacagtgatggagccaaacagcactattttctccagcatccctattcccttatccatggcatctattatttttttcatcaaaaacacctctgctgtctataagaataactgcccgcgcacaccgtttcgggcggcgggcagttaccgtctttcagttattcatgttttatctcgtcaggatatcagtcccaggttactcccacagcgtccatccaggtcttcagcacatcggcaccgatggtggcctccattgccttccatacaggcttagccgccttctggaattccagccactgctcatcggtcagggtgttcaccttcattcccttttcattcaccaggaaatcataagcagcgtcattcacctcgggcgccagctccttgatatctttggaagcctccacggcgcattccttcagaatatcctgctgctcagtggtcagcttatcccaaaaatctgcgttgaccgcaaacagcgagaaggaccagatatggttggtaatagaaagatactcctgcacctcataaaaagcctggttcttaatggtgtccaagggattctcctggccgtctaccgtaccgttctgcagggacatatagagttcggccatcgacatgggaactgcagatgccttgaattccttcatccatgccaccagagtgggaacatccagcacgcggaagctgagcccttccatatccgcaggggcctggatggggtgcttactgttggtaaacgctctcattgcaatcggcagataggccaggcccacaacattgttgctgtcacgcagcttatccagcatcatttgaccggcttcaccctgacaggcggcataggcgctgtcgctgtcacggaagaagaagggctgatagaatagctgccatgcatcggtgttggggggcggaacaatagccatatcaatgtcgccggactgcagcagcttaaaggtggtctggctgttgcggccggaaagctcaccattgctgtaaatatcaatttcaatggtaccgccgctcttctccgccaccagctttgcgaagttttccataccaatggagtttgctgtttcgggggaatagtcgtgtgccaggcggatcttggttacggttttttcggggtcaccctgtttaccggcgttttcgccgcaggcaaccatagaaagcaccattaccaaagcaagcacaaatgctaaaacctttttcatgtttacctcctacatcaatttcattttttgctctttttccgaggacttttgtccttgtttgtaattatacataaaatgaatctcgatgtgaaacgactctttgttgtattgttagtataaaaatgttataataacaaaaagtcccccaccgtaatgcgtattttaactaaccaaatgctcagaatccgttaatattcaccatgcttttcttcaatctgttcaaaaacaggaggtcatttttgtgaacattcacagccttcagtacttctgcagcgtggcaaagcacctcaatttttccaaagcggccgaagaatgccatattgcccaaaccgccatgagccgcagcatcgccgccatggaagatgaactgggatttcgtctctttgatcgtacccgtcaccatgtagagctgacccctgccggtgcctactttcttaaggaagccgcccaaatcgtggaacagtataatttctctctccagtccggccgggagatctcccgttcctcctccacccggctagatatcggctttggcggctatgatatgaattttgccaggttttatgtcagccgctttatgcggctccacccggagtgttccatcgttctgcgggaataccactacgataagatcttcggcagtctgctttcccgcacctgcgatgtcatctttaccgcgcaaacccgcattgaagatgaggccgctgtacggcaggtgctggtctcgcactctaactatattgtcggtgtcggcctctgtcaccctctcagtcagtacgataccatcacgcctgatcagctcaatggtatacgcttcatctgtcccgttgatattaacggcagctgggaacaagcccggaccctcaaccacctgtttacccattacggcatcaaacccggtcccatcactcgtaccaattccgccattgccgttactaccatgctggatttgggcatgggcgttacctttctcaccgaggacatcgtgctagccaaccaaaatgtcaaaaaaatccccctcctgttcgaacagcccgccaccaaatgtcatgttgccgccaacctcattccatctaagcgtcccctcatcgatcagttcatggacttcgtggcacaaacgccattccatgcggattaagctgccgtcgcccataaacaattattggccggtttattcggctcttcatttacacaagtacaaggagcattcccatgatcgattggaaatccattcccaaaatagatgcccatatccacctgctccctcccgatgtgatcgaaaacaactggggaaacggcgaccgtttcgttgagtacggcagcgtggatgactacctgcggctcatggatcagtaccatatcgaagccgcctgcgtcatgccgttcaatgatccctacatgctctccatggattttcaggccagctccgtccataataacctgctcgccatgtgcctgcaggcggaaaactgcctcttctgtttcgcggatatcgatatccgcaacccggtcgaaacgaccttggaactcctggaaaaggccctggaacaaaaaaaattctgggcgtaaaaattcaccccaccaataccggctaccccgtggacggtgcctattacgaccgtgttttcgcgtgggccgatcaaagccgtgtgccggtggagatccactcctatcccaggacccatctcccggatgatgtctgttccccctcacgcatcaggaatgttatccggaactaccccgcactgcgcgtttccgtggcgcatgccggcgggttccaatgcgaggagctcatcggtctcggcctgtacttcaatatctccgctgtgttgaccgattgggccggccaatacggcatcgaaaaaaccaaccatattctaaggcagctggatgtcaaccggctggtattcgccaccgattaccccgataaccgcaagctcactccgtgcgaaatctatgaccggtatttcgtaatcctcggcagcatggggcttgcctttgggggagcggaaatcccatggattcatcgcgtaaagcacgctcacactctaactgccagtctgaactatcccctaaatataaaaagcaaaggagaaccaccatggattctgtcaagctcgccgtcaatggcaccctcatgcgggggctcccgctggaaaaaaacctcctcgatgccggcgccttcttcctgcgggaagccgctaccgccccctgctaccgcctgtggagcatcaatgacaacaaccccgccatgctgcgggtggatcccgccgacccccaggccgtcagcgttgcggtggaggtatggcaggttcccgccgccgggctcgcctccgtccttatgaaggagcccgaaggtctctcggtcggcaaggtcaccctctctgatggtgaggtcgttctcggcgtcatcggtgagccggagctcgtccgcggccaaaaggagatctcctcctacggcggctggcgcagctatatcgcctcactctgatccatccggcgccgccgctccgctctcatcgcgtcgccatccccctttccttttgtggaatgacaacgctcccccgcttcgcggcggcgcctgtcccgcggctccggccgcaccacatcttgccctatatgcaaaaatcggagatgccgcagcgtccccgattttttatttgcccttgttcagttgttcttttcttcctccggcagcagactcgtcatgctgtgcaggctgatgcccagcgtcgaagcattgtgcagcagcgccgaagtcgtcggcgggatcagtcccgccacccccaggatgatcagcatcaggttaaagccaacgatcgtccggtagttctggtggatccgcgccatcagcgtctcactcagccgccgcagcgtcaccagcgcaaagagatcctccgagccaatggtgatatccgcgatctccctggcaatggccgcgtccgcctccgaaagggccggggaatcgttcaccccgtcgccgatcatgataacggtatggcccttcaccttctcctcccggataaagtttgccttatccccgggcagcatctcggcatagcaggcatccacgcccaccagcaccaccgcgtcctgcgtccggccgtatacctttacctcggtcacaccctctaccgcgcgcaggctgtattccagcagatccgcctcccgcagcgtcatacgggcgcagcacaggtgcacccgcaaccgcccgcggctctcatggcgaataatacatttcatactttcggttcccctccatagggaaaaagaagagccgccaaaacaggcggctcttcgccgatcactcggcaggagtctccgcagctttctcgggggtctcggcggtgtcgaacagaacaccggccgcaaacaatccgatcttcttcatagttgtatgcctcctgtcagtcggcacctcggcagcttccgccatgcttttctgtgattacctttgtttgacaagagcacatacagtttttgcgggcataaataccgcccgacattgcgcatcgcgttgacaggcgccagcctgcctgccgctccgcgcttcctcggatgccatttctcccgcgcaaaaactccgtaggacttttcggcgggggaaaaccggatgatgacaaggaagaggacgccggcatactggcgtatgccaaggacgataacgcagtcagtgccgatttccgcttggggttcctgcaaggtcgtaagaccttgcagggaaaggaggacgcaccgcagcggggagggctgcccgaagcaaagcgcagggtcagcacgacaggagcggaggttgcgtccgacgcaaaagtgtgcgtgtccttgtcaagcgaaggtgtttttcactccacatatttatcgtaaagagtgccgaaagcaagtgcttttttccatcccaagaccacacttttccgcagaaaattcttctttttgcccgcctcattttgtgctgtttttctgccctgcaagatatagtggcacagcatcatttttagccgcaactaattttcttttgcgttcactaaattgccataatgtaaatctggcatgggttccactcatcccaaaggcttgggaatacttccagctccttgaaccccaaactctggtaaaaacggttggtgtcatcatattctttgtagcgccccatctgcactgtttttacctgcaaaaaagaatacccggtttgggccgcatacttctttgctgccgcaaaaagcgctcggccacagcctcgacagtggtactttcggtccactcccatcaccgccagttccatggtatcacgcccggtctccttcagacaaagaaagccgatgggctttccctgctccatcgcggcaaaacaaggttgtccggcgctttgggcaatatattcctcccgcgcctcagctatgccaaaccattccggcagcccctccaagatctgccgtaccaccttttgcttttcttccgccactgtgagctcctgaatctccatattctcctctcctcgctaaaaatgccggcacagttccccatgccggccgttatccttatgcctccgcaggctccgccgcggtgaatttcgccatctccgccagggtatcaaacatccgcaggctctggttttggaacgccgtaaaatcaatcgccatgaccttgtcattcttcacggcagccaccaccttatactcatagctctgcttcaccgtctccacctcgtccgcctcagcacagaagatcacatccggctccagcgccctcagctcactttccgggtacagccagttggtgtagtccgccccgctgcagtggaagcccacctgggccagcagttggccctccagggtatccccagtggccatgcggtaggggtaggagatgagcagggtggcatcgggggcggcagccatcccggaaagggcggcggtcgcttcggccagcttgctgtctatcgccatgcttacggtctccgcagcagcagtgccggtcacattaccggccagcaggctgcccagtgcccggtagttctgctttattccctccaccgagtccgcccggggcagcaccagcacctgagctccggcctgctgcagctcggtcagggtactttcggtcggctgaacagtgcacagcaccagcgtggctccgctggcttttattttttccacctccggctggtaggcgctgcccatccggggtttggcgacagctgccgccggggccgtgcagtattcgcttacccccaccagcaattccccatagcccaggtcgtacaccatttcggtggtcgccggggaaagggataccacagccgtaggggcctcggtcagggtcacattgcccaccgtcaccgggtattccgggtcaggcttgggctccggttcggccgggttgttattacagccggcagtcagcagcagaagcgccgcagcggccagggccagcagttttttcatcatggcacatcctcccttggtttctctctccattgtacccgctttgggcccgcatttcaaatgaactttgtatgaacgccccggaaaattgcggcagagctcctccgcaggtctgtgcagggggcgtattcgggccgcaggccaaaccgtcccccgcgggggacggtttcagcgggctccgcccgctggccccggctgcgccggggcggcctgcggcccgcccctccccttgcggaaactccgcctttataccaaatacattccgtataattcaatcaaatttatactcttttcgacagatctcccgccctctgccattcggcgggccagcatctcttgccaaaagtccgcatccatcgggccaagtccatgcaaggggctagcttgggaaacggccgctcgcccactcctccgcgggctttgtgccaggccaaggaatcggggcgcagccccctccggctccgccggaggcgccggccgttccggccggcgtggccgcccttcgggcggcccgggctgcgccccgcccttttttcggcttttatacagctcgtactttatcgtcaaattatactgacattcgacagaatcccccgcggttttgcgatcacaaatgccgtgtatcatttttgccgcatcaaaactccgcggaacgattcggcgaaagaaaatctaaaataacatcgtcaacgatggttttgcgtttgcgggaaaggaagatgcctctcagcgggaagggctctcccgttaggctccgctaaatccaacccttgcgatacctcaaaaggcaccaagccgccctctttgccgcacttccccctacgacctttccgccgtccacaaaccccttatcaagataaaatgccgtttcctgttattctgcggcggccttcaccacatcctccgccagccgctttatgtcgtccagcgtctgtaattccccggcacggcggcgcagctgggccgccccccgcaccccactgatgtaccatccacagtgcttgcgggcctcatggctggccacccgctcgcccttgtattgcacggccagggtcatctgctccaccatcagctccatgcgttttcccagcggaggggtcggctcatatgccccggtttgcaggtactgctgcacctgccggaacagccacggggcccccagggcgccccggccgatcatgatgagatcgcagccggtggtttcgtacagggccttggcggtttcggggctcaccacatcgccgttgccaatgaccgggatagaaaccgcgtttttcacctggcggatgatctcccaatccaccgggggagcgtacatctgctgccgggtcctgccatgaaccgtcacggcatcagccccggcggcttcggccatttgggcaaattccacggcgttgatgtggctgtcatcccagcccttgcggaacttgacggtgaccgggatgctgctggcctccttcaccgcgcgtataatgctttcggcccggtccggctccagcatcagggcgctgccgctgcggttgccggcaattttgggggcggggcagcccatgttgatatccagccaggcaggggaatactgctgggccagctcggccgcgcgcgccatgggctccggttcatcgccaaaaagctggatggcgcagggcatttccagcgggcctatttccatcagctcggcgcttttgcggctgccctgcaccagccccttgcagctcaccatctcgcccacgcaggccacggccccaaagcgcatggccagctcccgcagggcgcggtcggagacgccggccataggggccagcatggcataggggggcagctcccattttcccagaatcatcctgttttcctcccggtttggaatgcgaacgaaagttctccagtttcattgtagcacaagaatggggggatgtaaagccgcgaacaaaagtttgtaggagtgcacgaaaattctaccatttttggggcttgacaatgggcagggtgcatagaaaaagcccccggtgaggggggctttggggtgggtcatgggttattttttgcgggagagggcggccatgccgagggcggagacagccatgagggccacggccgcggcgaccatatcattggcgccggtggtggggttcttctcgggctcggtcttgggggtgtcctcggtgcggtcggggacgatgacgatggtgccgccggtggtggtctcaatgaagccgttaccaattaccgggtctttatcgccaaccttgccccaattatcattggtcatggtaacttccataccttccggcagggtagtagccttgataatctcgccattgctagcaccgctattgacggaggtattattgctgatggtgatggtggtacccacaccaacattattaaagcggatgatgcggtcgccgacattcttaaaggtattgctggtgatgacaacattgccgtggtcgcaagcttctgaatcctgaatggcaatggcattgtggccggtggtattgaaggtgctgtttgttacgctgacaccgtagacatagcgggtataaacaccctgacggcaattattgaactcgcagttatctaccacaagattacggactttaccgttgttgttctcgttgtaataacgcagtgcaatataatcactgttatcgtcgatgcttccgatattgaatgtgcagttcttgaaggtaaagccgttgatggtagtttcagggattgaagtattgatatcggtctttgccgtgaatgtgataccctcaatcgtgatgttactcatcttctgggctaaataataagtatgcattcctccttggaccgctttatcgagcacatagtccgtagcgttttgatagatgtggccggaggaagcgaaaagacctgctaccgttacttccgcacccgctgctgccttaatggtgacattgttcagcggacgacaataaaagcagttcggagtccagatggtctggctcttataagcaatgatttcctctgcagtattaaacttctgataattcgcagcagattcatcaaatccgccaaccatgtactgggtattgctgcccggatacttggtggcacggcccagctccagctggccgtaggtaccagcagtaagtacaatggtggtattatcgatggagccgtatctgccatcaaggacatcctgcacattggcggaagttacattctgccaaacgccatttacacaggtagggtcgccatcctccgccatcgccgtcaccggcagcataacagccagcatgagcagcgccagcacaacacttaaaagctttttcatttggtattgacctctcttcttttttatttttctcacgggcggggttgtgtttgcagagcaaacacaaaatatccccatggggatatgagaacagagtaaggttaccacttttgggcaggggatgtcaacctaaatgagaaattttggggaggtgcacaaattttcccactaaatttgtgcagggttttcctccagcagggcctgcagggactgccgcagggaaaggtagcgctgctgccagtcctccccggtggggacggtgtaatttaccccaaaccagcggcaaaccccacggcacagggcttcagcgattgcgccctggttttccaccagccactgggcatcggcgccattatcgtggaaggcaagctccggatagaccgaaagcatgggggtgctgttgatctcgtagaaggtggtattctggcggacgccgcgggtggtagccgccgggtaaatggccatgagttcctcgtaggtcatttggcaggcgcgccagctgatgccgccgggctggccataggccaggacctccgggccgcgggcggagccctccctgggggtggcggagctggcattggtgtggatggggaggtagtaatcagcctgccaggaaatggcttccgccacacggacacgcacggtggccgcgggcggggccattttgaccgaaaagccgcagcgggtaagggccgcggcggttttttgcgcgatggaggtggtgacatcgtgctcgaagagggtgggatagccgaagtaggggccgtggggagcgggacggcgctccggggagaggtagatttttttcatggggggatctcctttcgtggggtgtaagatattttatgccggaggggccgggggcgaaagtccctccactaatacggcaaaaacggcccttctttgcaggtgaaaggttaataattcactttttttcacggaaaatttacgaatgcgggaaaatatgggtgtgatttgactaaatgttagtttttatttacagtaaaatggcaggaaaaaggagcccccgaaggggctcccgaaagaggggaatgtgttattttttgcgagtgaggacagcagcaccgagggcggaaacggccatgagggccacggccgcggcgacgacatcattggcgccggtggtggggttcttctgatcgtcggtcttgggggtggtatcctcggagggggtgatgatgacaatggtggaggggccttcctcctcgggatgggtgggaggatcaaggagagaagccttatcaaacagcgctaccttgcagttttcacctaaatctttactgaaagtatttccgtttgctatgctgtttgccagcacagcggcagcatcattagccacctcgctaccttcgggagccaacttagtatcgttccaaatcttgaacgcagcacgattggaaccaccgcctacaccgtaggaaataaagttgttattgcttacagtaacggatttggcagcagttacagcagaaccatcgccacagccctgtacgccaatggcatgtttttgaatattctcaaaggtgttaccattaatggtcaaatcataatcagtaatattgggaacaatgtaaataccatagccctgtggggccatgctcttatcgccaccggtcagcttattgttatttacggcaatgcttgtgcagctcacattagtctttaccgtaatctgcgctgcggtattcccctcaactaccacttttttatcggatacaacaaccataagggagccggctacttcaaagcctttgactctcaaagtgctattacccaaatcaactacctggccaatttccgaatttacataatcaatagagctgatttgcagagaatcaaactttgcaccggattccgcaataagagtaatattttccttatcggtcatcacaaagtgctgggcaccataattgcctgctttaaatttatatgtggtattggccaaaaacggtgagggaatggtattcggggtaacttctacctctgtggtggtatccgccatcgccactaccggcagcatgacggccagcatgaggaatgccaacgcgacgcttaaaaactttttcattagaataaacctctcttcttttttatttttcccgcaggtggggttgtgtttgcagggcaaacacaaaaatatccccatggggatatgaatagcaagaataaactaccacttttggacaggggtgtcaacctttttgagaatttttggtgactcgcacaaaatgcgggggtggtatttggcaaaaaattcccccggcagcaagctaccgggggattccgcgcttattttacattttagccagggaaacagcgatacgggccgcgcagcgggcattattgagcgccagctggacattggaggcgaaggactcgcctccggtcaactccttgatgtgggccagcaggaagggggtgatctccttgccgtggatgtgctgggcatcggccagctccagggccttggtgatgatgccctccatgtaatcgaaatccatggcgtattcatccgggatgggattgccgatgaggacgccgccgggcatttccagctccagcttggtcttgatgatgcgagcgatctcctcctcgctctgggcggcgtaatccacaccgaatccgctctttttgcagaagaaggcggggaaatcgctggtgccattgccgatgacggggacacccatagtctcgaggtactccagcgtgcggccgatatcgaggatctgcttggcgccggcgcagatgacggcgacgggggtgcgggccagctcctgcaggtcggcagagacatccatggtgacctcaccatggcgatgaacgccgccgatgccgccggtggcgaatacatggatgccagccagagccgcgcacatcatggtggaagcgacggtggtagcaccggtcttaccggtggcgaggtaggtggcaaagtcgcggcgagagaccttgccgacattttcgccgcggcacatcagctccagctcttccggggagagaccgactttgatcttgccgccgatgagcgccatagtggcggggtgagcgccgcaagcccggatctctttttccacctctgcggcaaaggagaggttttccggatagggcataccgtggctgaggatggtgctttccagggcgacaacgggctcgccgtttttgatggcttcctgcagctcgggggtaatatcaaggtatttttcgagattcatgtcagatgttcctcctgtaattaaagtattccgtaatacgggtttcaaaaggttcatcgactggggcggacgctccatcgttgaaagcttattatacccattcccacggcggaatgcaaggggttttgatgtgaaatttgtgtgatttttgcgggaaagaacgggagatggcgagcgggccagcggctggcagaaacctgcggaaatgcgatattgacacccggcccaggggatcctattataataaggtataccaagtgatgggagagtggagatcctatgttatcctctgcggccgggctgctgaccgatcaatcctttttgagcgtattttgcgccgccatgctgaccattgggatcggctggggactgcggaagaaaaatatcctgaaggcggaaagccgaccggtactgaatgccctgctgctgaagctgacggtgccgtgcctggcctttgatgcctttatgaccgattttgcccgcggggagctgcggcgcaatgtgcagatcctgctgatctcctttgcgctgtatctttcgatgatcgcgctgtcgcagcttatttttattaaatacggccggcggaaggccaacctatatggcatctgctttgccatagggcagcagacactatacgccatgcctattctacgggctatttaccgggaaaatccgtcggaatcgatgctttccgccagcatggtagctatcgctttccgggtgatgctatacctctacgccttttattccatcagcggggtggcggtgaccggtggcagcctgaagcaaaatctgaaaaaagcgttcctgacgccggtgatgctggctatgttcgcggggttcttcatctggctgacacagggactgcttccctgccccggcggcataccgctgctgcggctggacctgcgattcccggcactgtacgcggtggtaccgcagatggccaccctggtgaaccccctggcgatgctgctgatcggctcgacactgggagagtcccggctgggcgacgcgctgcgggacggcaaggcgtggttcatcgcctttctgcggatgtttatagccccgctgtataccctggcggtgctgtgcctgctccagcagatcggatggacccactttaccgaggtgacgctgatgacggtggtgatgtgctttgctgcgccgctttctgcggtgttgtgcaccttcttcatcacctaccaggaggaagcggatatggccgcacgggtgtgtctgctttccacgctgttctgtgtcctatccacgccgctcttctactgcctggtgaaggccgcagtagccagcggagcgtttcctatataatataggtaagaaaacgcgcgaaagccctccaaacagaggggggcaacggaaggttgctaaaaatccatgaggggttggtcgacagcacccccattccatgatactcttgcggtacaaaacatgaaaggcggatgctgaaatgacactgggtgaacggatcgcatattacaggggaaagctggggctttcccagggggagctggcggagcagttgggcgtgagccgtcaagccgtaagcaaatgggagaccgatgccggactgccggatctagaacggctgatcgcgctttcccggctgtaccatatcacactggatgaactggtaaagggagagtccccggaggaaacggccgaagccccggaggagataccggtggatgcggtcattgcgaagccagcagcccccagcgggcagaaaaccattgggtatatcctgctgggggtgggactgctgtgtgcggtgctggcgctgtttttgaactgggcgctgctgatcccggcgggctacctgctgatttgcgcggtgctgtgcctgacgctgcggcggtatgccgggcggatcattataggcgggacgctgctggcaatcctgctgcccgcgcagcgctggtttggcggtgtaagcctggggagcgtgatcaaccccgttgtttatcagtcggaattttacggcattggggtgtgggtgacctgggggctgtgggcggtgctggtgctgtatgtggtgctggcgctgcggcgcacccgctggcagaaatacaccccgctggcactggggtggacagtggtattggggctgcatggctggctggccccgctgtggcaggtgctgggcggtgcagaagccgccagctggtactatccggtggtctccggccttatcaatctgctggcggcggctgtggtgctgctgacggtccggtccatttaccgggcccgacgggagaaaaagagcgcataaattgaaaagagccgttcccaaaaggagcggctctttggcttattttagggtggagctgttattgaggacgccggcactatacaggaacagcacatcgcagcctgtaaaatcgacaaagccgcccagccggctggaggcgagataccggatatccaccagcgtaacggaggaatagccctccaccagcagcggtgcgatgctgctgccaaaggaatcccggaagatcaccagccggcggccggaggtgttctgcggattttcgatgcgcaggagcgacacggagccggaaaggaacatctcatacggatcacggcccgcggccttttccgcatcgtagataccgccctcggtatcggtttcgtaattatagaccgcggcggtatcgatggcgccgccggtgagatagttcatctcctccggggcgatgggcagcgcggcctggccgtagtaaacaccatagaagggcttttccagcgtttttctggtgtagctgccggtaagctccacgcccatgccacccgccagccgggcagccacatccaggatcttctcctgccgccagtgggcatcggtgcggtagtagtcctccaactccagcagatcgaagatatcgatatactgcatatagccggtgcggctttgcagttcctcagcaaactgctcgtaatcgatggaggggtagccattgggcgcggccataaagtagtttttatccgggatgagggacagatacacccgactgccggcgtccttcaggtaagcttcgtagagataccggaagcgctccgccgcatggtcaagggaagcagtattcatggggtattccagcttggccagatgatctcccacccggtacaggccgttattatcccgctgacgcagcagccctgtggcggtcagggccttgagagtacggaactcatcccgcagcgggaactgatcggtggcgtagtcctcaaagcgatcggcaaaggtgccggaaagcagcgactggctggtgagggcaggcagctgcgccagggagcggcgctccgcatcggaggcggcatcggtgggcttaaaaacagtccaaagggtgaacgccgccaaaaatacccccaacaccgcaatggtgagaatggtacgggtcttattgttttccacagcggcacctccttaaaagcggaaatagaggaacggattgaatgagccatccaccaggtaggcagtgacgaccgccaacagggtcatcagggccacaggggccgcgaccgccagcacccggccggttttggggccttcggaaaggcggttcatccagcgggtgggatagggcgtagcgccgatgacggcgatgatgaaggtgacggcatagctgccaaggtaatagagcgtctctccggtggcaagcggcaccccgcccgccccaaacatgcggcccaggtgggcggcggcttccgaaaggccggcgctatcgaagatgacaaagctgaccgcgaccagcagcagggtataaagatggctgaggacggggagcctttgcaggggctttaagaggaaaactttttccaggatgaggaacacagcgaagaacaggccccacaggacaaagttccaatcggcgccatgccaaagaccggtcagcatccataccacgaggatattgaggtagcggcgggccggggccacccggttgccgcccatggggatatagacataatcccggaaccaggagccaaggctcatgtgccagcgccgccaaaattcggtgacgctgcgggagatatagggataattgaagttttcggcaaaggtgaagccgaaaattttccccaggccgatggccatatcgctgtaaccggaaaaatcgaaatagatgtgcagcatataggccgcggcgtacatccagctgtacagcaccgagggctgggtggtagccttatacaccgtgataagctgataaagcacattggcgatgaggacctttttacccaggcccagcacaaagcgctgcgcgcctgcggcgaccatggccggggtggagcggcgttccttaagctggggttcgatatcggcatagcggacgatgggccccgcgatgagctgcgggaacatggcgatataggtgccgaggtcgatgagattgcgctgggcggccacggtgccccggtggacatccaccacataactgaggatctggaaggtgtagaagctgatgccaatgggcagcgccacccgcagaagcggcaccgaaaggccggtcacggcattgaagctgcggatgaagaaatcggcgtacttgcagtagcccaaaagcagcaggctgaaaaggaccgaggcggtcaaaaagagctttgaccgccggggattgctgatacgatatttttctaccagccgcccaaagaaatagccctgcagaatggatacgaccatgaataggacatatttcggctcgccccacgcatagaacacaagggaaaagaggagcagaacggcattttttgcccggcgcggcaccaaaaaatagcacagcagcgtgagcggcagaaagtagtagagaaacgggatgcttgaaaacagcataagctgatccccccgaaacgattactggatggcttcgtcaaaatcgatgacggcggcgggataggaagcggtgagggtatcacggaagctgttgatgagctcctcatcaccgtacatggccacaacgacctcattcacggtgagaacgacgaccttatcggggaagccgcacatccactggcgggactggatgctgtcacgcagggactgggccagggtcttggcatcggcggcattttttacatggtaggcgccgcaggtgaaggtgttcatattcatcatgtgggtgagagaggcggcgctgtcaatgaggtcgacgctgccggctgggaaagacagcatataatccagattatcggtatcggaaatatcgaatttgccgggcttgtcatccacggggctgccgttatcgccgccggcggccgggaatttatcctcctcgggcaggctgctccaggtcttgctgagaacctccagcggatcggtgacggccgcgtcattgccgccgttattgccggaattgttgccgcaagcggcgaaggccagcaccattgcggctgccagcagaatggaaatgatctttttcatggtacaatttctccttcttttataaagctttttgtatcatccagacgccctgctcattttgagaaagggtcattgtctgtgcattgagggtaaggcggtaggtttcccccgccgtgggctgcgggatggcccaaagaacggtacaggccccgcggccctgttgggtgccgctccaggcggaaatggcatctccctgggtgatccgcaattcgccatcgtctgtggaaagctgccattccccgcggccggaaagggtcagggggacttccaggctgccaagggtatagagcgcgggctccgcggcggtgcgtgggacggcttccgttatggccggcactggctggctgccgatgatggtctcccccaccgaaaggcggagcgtgccggactgctgccacagcaccgagatgccaaataccagcagcagggcagccgctatggcgccccaacggccaaaggccggacggcgaggaacgggcggtaccgttatagcatcctgcagcaggtcgtcatcaatggcggtgacggcggatgccagtgcttcatgcttcatttggtccatccctcgctttcaagatattttgccagacgggtgcgggtacgcagcagcatggatttgacacggctttcggaaaatccaaagtggtcggcgacctgcgcgactgggcagcacatgaaatatcgctgcaggaacacccggcgggcctcctcgctttcggtgcgcaaaaattcgctgagaaggtgggaaaacgcagcggcttcggcctcatcctgcggctcgctgccggatggcaggcattccgccagttcctccagcgaaagggccgcttctcccccgccccgcttttcggccgcgcgggctttatagcggttcagggccaggttgcgggcaatgcgcccgagaaacgccgcgaaaaactgcgggcgctgcggcgggatggcattccaggtacgcaggtaggtgtcattgacattttcctcgctgtcttcccggttcatcagaatattcatggagagccgcatacagtatgccccgtatttacgggaagtttcatcgatggcctgcgggctgcgctgccagtaaagctcgatgatcttttcgtcctccatcgggcactcctttcccgctcccggatcggtgccctcactcatatagacaacaagtgagaaggtttggttgcgccggagagcaaattttttttgaaaaatctgaaattgatctttgggcgagaatacccgcaggagtcatggggctgctgcgggtttctttatggggtatattgcgcccggttttacgggagaagttccaggctgccgccatcttctacggtgtggccttccagcagcaggagcttctccgccagcaggcgggagaaaccaccaatgatcgcagccgtggcgatgatgtcctccacccgatcggtatccagcatggacggctcctcgtcctcatgcttgagaatggtagcgcaggcggcgcgcacctcccgggtgaaataaacggcggccaggctgtgacgcccgatgtactcggtgtagatgggacgcagttcctcctcggtgagctccgacgggatgagccgctgcaccagtgagataccgaggccctgcttgagggtgcaaatcataatgaggtaggccaggtgcagtcggtaatagcgctttttgacggggccgggcatggcgcgcgtgcgcacatagttattgatggcagcggcagtgacagcctcctcctccttgagctcagggggaagataatcaagatagccgcgcagcagggtaacgacctgctccatatacagtccgatatccgggatctcctcccaagcgggaagatgatagcggttgaggtagcggtcccagcgacgcagcttgcccgctaccagatctttatcaaagttcacggcagcacacctctcttttggcgatattataccacatatgaaaggtgcccgcaagaatttgtgatgaatattacagcttgacatgattataaaaatgttgtaatctaatgaagcacattagatgaaagagggttttacatcttgtacgaaatctttaccgatactgccgccaatttagattgctccctgctggaggaactgggggtgggattgatccccttttccttctattataatggggaggagcaccgggtgaccagcctggagcaatttgatgggcacgcctactatgatatgattcgggccggaaccgatgtgaccacctcgctggtggagccgcagcggtatattgacggttttaccccgctgctgcgggagggacgggatattctgtttgtggggatgtccagcggcatcagcggcagctatgcttccgccgaggtggccgccgccacactgcgggaggaattcccggaacggaaaatacagctggtggataccctttcggcttcgctgggagaggggctgcaggtactgaaagccgtggaataccgggccgaaggggtggatatcgataccgcggccgattgcctgctggaaggccgccataacatgtgccaggtctttaccgtggataacctgaaatacctgaaaaaaggcgggcgcatcagcaacctgaaggctgccgtgggcaccgttttgcagataaagccgttgctgaagggggacccggaagggaaaattgtatgctttgcgcaggtgcggggtcggaagaaatccattgaactgatggcagagcaatatgaccgctatgtggaacacgccgaatgcgaaaccatcggcattgcacacggcgactgtcccgaggacgcggaagcgctgattgcactgctgaaccgcaaccacccgccgaagaacatcattaatgcctgctacgagccgatgaccggcgcccatgtagggcccggcgctttggcgctgttcttctacggaaaaaaggaattccggcaggcgacgaaataagatattcggaggaaaagcatataattctgatatgacgaataatatttcgtcattgccgaataacaatcattgcccccgtcacatgcgggggctataattatcagtaccattattctgtaatgagatgatcgcatcttattaaattatgaaattataatttttcattgcaaaattagttcggatattttatagctaaggtaaaagatagcccacaaggagagcaactatatgaccacccctgccaaacaactgaaaaaggatcgttccacaggcggcgctgcccggctgtgggccttggccgccctgctgctggcggtctttttggggtccttctttttgggacggtatggggtatcccttacactggggcagttcctggggctgatggccgagggactgcagcgggtgctgaccgccctggtaaactgggcaggtaagccgtttggctttgcctccgagcggctgtttgccgtgcctgtgacctggccctccgtaatggagaccatcgtgctgaatatccggatgccccgcattattatggcctgtctggtgggctgctgcctggcttccgccggtgcatgctaccagggcgttttccagaacccgatggcggcccccgatctgctgggtgcttccaccggtgcctgctttggcgcggcactggccattctgcatgggcgttcctccgctatgatcaccctgtacgctttctttttcagcctgcttacggtgctgctggtctttgtgatcggtcagcgtgccccggggcagaaaactgttaacttgattttggccggtattatggtcagctcgctcttttcggcagggacttcctacatcaagctggtggcggaccccggcagtaagcttccggaaatcacctactggctgatgggcagtctttccggcacccgcggggtggatatccgttttgctgtctttcccatggcactggggcttatccctctgctgctgatccgttggcggctgaacctgctgaccctgggcgaagaagaagcccgcgcgctggggatcaataccgccctgctgcggctgattgtagtggtatgcgccacgctggtcaccgccgcttcggtttcggtcagcggtctgatcggctgggtgggtttggtcatcccccacctgtgccgccggtatatcggcaatgactaccgcaagctgctcccggcttcgatgctgttcggggccactttcctgctgctggtggataacatcagccggaacctgctggcggtggaaatccccatcggtattctgaccgcctttatcggtgcgccgttctttatctacctgatgcaccagaaaggaggcggcgtatgagctaccctgccatagaagccaagggcgtgcgcttctcctacggaaaaaatgaaattctgcatggggtggattttgctgcccaaaaagggcagctggtcgcggtgctgggacccaacggcgccggaaaaagtacgctgttccgctgcctgttggggctgtaccacagctaccagggcagcatcaccatagagggccgagaggtaaaaaacatgcagccgcgggaaatcgcggccaaggtggcctatatcccgcagacccatacccctaccttccactatactgtgctggagatggtgctaatgggcaccacacaccgggtacggggcctgcaaagccccggcgccaaggaagtggccatagcacgagaagccctggcacaggttgggattgcggacatggagaaccgcagctacggcagactttccggcggcgagcagcagctggtgctgattgcccgggcgctggcgcagcagacccgcctgctgattatggacgagccgaccagcagcctggactacgggaaccagctgcgggtgatgcagcgggtcaagacgctggcacggcaggggtataccatcctgctttccagccacaacccgcagcaggcgctgctgtttgccgaccgtattctggcgctgcatggcggggtcatctgcgccgacggcatcccggaggaggtcatctcccctgccctattggaaaagctgtatcacatcaaggcacggctggccgaggccgaggagggacggttgatcgtcccgatgctgaaggaggatgccgatgtttcgttggaatgaggatatgatccgctttttgcgggatgccagcgaacacagcgactaccaccatttgctggcggaataccttgccaagcgattgcccgaaaacgcccatgtgtgtgatgcgggctgtgggttggggtacctcagcctgcagctggccccctactgccgacaagtaacggcggtagatgtaagcccggaggcactggcggttctggccgcaaattgcgataaagaaaaaatcaagaatgtagatatccgctgcggtgagatagcggaactgccgcccgatgagccctatgatgccatggtattctgcttctttggcactgggaacgaagcgctgcgcatcgctaaggagcagtgctgtggacccgttatcatcatcaaaaagggctggagcgagcatcgcttctcgctgggcaagcagaagatgggccacgaaagctacgccgacaccatggcgcttctggatggatacggcatcccccataccagcgaaacattgacgctggaaatgggacagcctttccggagtctggacgacgcctgccggttctttgagatctacgagcggagcggcgctgccgtgaccgaagaagccgtgcgcgcacggctgaccgccaccggggatgacgaattcccgtggtacctgccgcagcctaaggtaatgggcattatccagttggatagcagggatatccctgagttataaaatccaaaaagaatgaacaaaaggagaaaaagacatgaaaaaaatgcttagcattctgctggcagtcatgatgatcgccaccctggcgctgaccggctgcggacagaacaatgatcccgccccgacccccgatcccgagccgaccacccgtaccttcaccgactctctgggccgcgaagtgaccctgcccgtcaatcttagtaagatcgccatttccggtcctttggcccagatcgtggtattcgccatcgctcccgaaatgatggttggtattgccaacggctgggcggatgaggccaaggggctgatccccgatgagtactacaatctgcctctgctgggccagctgtacggcggcaagggagagctgaacctggaaaccctgctgcaatccggtgccgaggtggttattgatgtaggcgagcagaaggacggcatggccgatgacctgaacgctctgcaggagcagaccgggattcctttcgttcacattgactgctacaccggcagcatgggggatacctaccgcaccctgggcaccctgctgggcaaggagaccgagggcaacaccctgggtgagtactgcgatatggtttactcccgcaccaataagattgccgaaagcgtagagaaggccaacctgctgtactgcctgggtgataagggcgaaaatgtcatcgccaagggcagctaccatgccgagatcattgacctgctttccaacaacctggcagttgtagaatccccctcctccaagggcaccggcaacgaggttgatattgagcagatcctgaagtggaatcctgatgtgattctatttgcccccggcagcgtatacgctaccgttggtgaggatcccgcctggcagggcgtgaccgccatcaaggaggggcattactatgaagttcccaacggcccctacaactggatgggctttcctccctctgttcagcgtatgctgggcatgatgtggatggccaagctgctttatccggagactgccgactatgatctgcaggccgaggtgaccgagtacttccggctgttctaccacaccaccttgagcgaagatgcctacaatgctctggcagccaactccattggcaccgtagaagtaaaggctgccgcgtaaacaaaactttgatagaagcatccggccattttacgatggccggatgcttctatgcttcgatgctgcattatcaaatattttttgcccatttccgtgcaaaccgacttgtaacctatgcgaaaaagcagtataatataagctaagcattattctcttataagataaacgggagggcgaacacacacatgctggaagcaggcggacgggtacaatcaattgaaaaagcggtcagaatcctggagatcctggcggaggctggcacgcccatgccgctgcgggagattgcgcggcgcacggagctgcccaaaagcaccctgcacggcattatctccaccctgcgggaaaccgggttggtagaacaatccgctgaggatggctgttacggactggggctacacctgtttgaactggggtgtgcggccagcggcagccggaacattaccgccatcagtcggcccttcctgcaaagcctggccaatcgggcaggcgagaccgcattcttggcggcactggatggcaccgatgccctgctgctggaggtcaccgaagcccccaacccgctgcgtgtcgcattagcgccaggcacccgtatgccgctgcattgcaccgcccagggcaaggtgttcctggcgtggaatgagaatgctatgcggcaagtgtgccgcggcgagctggtcgcctacaccccccatacccacaccaccccggagcaaatccaggctgatgtggctgctacgcgggaacgcggttatgccattgaagatggcgagcaccggattggcctgcgcgccattgcagcgcctatagccgatgccgacgggcgagtacggtataccattggcgtggtgggcatgttccgccgggtccattcggaggaattttcaactgccgcacatctgacggtagaagccgccagggccattgcggcatcgctgcaaagacagccttagctgcataaaaacagagccgccccgacaggggcggctttttcatagggaaagtttgtgcgaagggcggggcctgccccctgtacaaacctaaaaccgtgcgcactgccagcctgcggtacgcactgtttctgttttatgtttagggcttaggctccagagctgccaacgcctcggtaatggttttatcgttggcttccatcccgtatttatctacctcggcacggctgcgggggccgtgggtcaggcatcctgccccaccgatgcacccaccggtgcaggccattccttcaatgaaattggcatccagcagctttttgctcttcttgaacagggcaatgcgacactgttcaataccgtcacaggaggttgctttcagctcaaaatcggtgtggccatgctccttgatcccttgggccaccgcttccgccaaaccgccgcagcgggcaaaaatgcgtccgaagtaggaggcctcatccagcattccttcctccagcgcagtgatatcgatttcccggctgtcaaaaagcgcctgtaactcctcaaaggtcattgcggcatccacataggggcggacttcctgcttggcggcctccccctttttggccgtgcagggaccgataaagacaaccttggccgttgcatcatgctccttcagatagcgggcaatggtggccatgggggagagattgtgagagatataaggtttcaattccgggaaggccttttcaatatagctgacaaatccggggcagcaggagctggtcagaaagcccttttccaccagctcacggctttcggcatccgccaccatatcggcgccgagcgccgcttccgccaccgagtaaaaccccaaccgatgcagcccggtgacaacctgccccagcttggcgtaggtgaattggctggagatggagggggcaatgaccgcatagacatggtatttctcattgtccccgctcttttttatcatatcaatgacattgaggatataggatttatcggtgatggcgccaaaggggcactgataaacgcaggcaccgcaggaaatgcaggtattgttatcaatagcggcggccttattctcattcatggtgatggccttgatcttgcaggcgttctcgcagggacgcttgcggtctacaatggcggaataagggcagacccgggcacaggcaccgcagtccacacacttggccttatcgatgtgcgccacatggttgtggaaggtgatggctcccttggggcaggcatcctcgcaccggcgggctagacagccgcggcaggaattggtgacctcatagccgcccatggggcactcatcgcaggcgatatcaatgacctcgatgacattggggttctgcttattgccgcccatggccatgcgtacccgttcgctcaggatggcacgctccttgtagacacagcagtagatggtctcggcattgcggggcgccagctcccgcggaatggacatgacattatccagcagggtatcattccaggcctgccgggccacctcccgcagcaccttgtatttcaggtattgcaccttggtatcaaactttctcatgggctcccccttattttttagaaatacatgaccttgaccctcttgcccattttacgcagcagctcggagagctcctccaccagcttcattttgatattgaagctgatgggcaggttgggatcctgatgggcggggtttaccgcccggccaacgaagaaattgacatccgtcgcttcctcaaacagcatccggctgataagacaggcaccatcgtgaccatagccccattcctcatggcgttcgttctgatccagcacatccttggcgtactcaatgacccggctgatggtgataatgccctctgtcaccaggtccacaccctccatgtgggcaatgggcggcaggccactgctttggtagtgcagctcggtggtgatgggcgaccccagatactgcgaagcgatggacgccgtggtgccgccgcagataatgcgcttgccgcccttggaaaagaacagcgtcatcatacgggcatcgtcatcccggttgcggggcgggccaaacagaatattgaccggtgcgcggcg

SEQ ID NO: 2429 - DNA, 9476 bp, Unknown
  16S sequences of unknown bacteria
gttctcgctgttttccttgcatttattataccacaaatcgacggaaatgtccagtcgtgcaatacttttgggggtggtcaggagacattagatagggaggttgatctgcgtctgtttgacgcggtcgagctgccgataaaatatcgcgagactgtgtacagtgagtacgcgtatgagacggtgacagtggatgaggagacggcgaggacggaggcgtaccgtgagttccgtcggaggtgcgaggaggagctgcgcggcaacgagcttgtgagccgcgatataagcgcgggcatggtcgatggcgtctacgtgatagactgccgtctgtctctcctcacggacatagcgcgggaagtagaaatttatagatgagattatattgcccctttttgaagcttgggaaaaagggagggggtgcagggggaggggaaagcccttcccgaagggctttcccctccccctgcgaacaaacgcatagcagaaatgaggaagttgaatgcctgaaaagataataatgacggattcggtcgatcagacggcgaagatattcggggagctagacgtcaatatcgagaagcttgagagggctttcggggtgactatcgcggcgagggattcgagcggcgggagcgctgtcagcgtttccggcggggatatggcgtcggtggataaggcggcggacgcgcttgggtatctgaggcggatggcgaagctcaatgatgttttgacggctcagaatgttgattatgtgattgatatgatggcgggcgggcggcaggatgagcttcgtgagcttgacgacgacgcgatatgcctgactaaccgcgggaagcctatcaaggctaagacgatcgggcagaagaagtatgttgagtcgataaagaagaatactgtggtgatgggtatcggaccggcggggacgggaaagacgtttctggcggtggcgatggcggtcacggcgcttaagtctaagaaggtcgagaggattattcttacacgaccggctgttgaggcgggggagaggctcgggtttttgccgggggatcttcagagtaagattgatccttatctgaggccgctttatgacgcgctttatgagatgctcgggactgaggcttatcagaggaacgtcgagagggggacgattgagattgcgccgctggcttatatgcgcgggcggactctcgatgattcgttcataattcttgacgaggcgcagaataccacgccggagcagatgaagatgttcctgacgcgtctcgggttcaattcgaaggcggtcgtcacaggtgacctgacgcagacggaccttccgagagggacgcgttccgggcttgccgaggcggtgaagatacttgaggggattgatgatatcgcggtgcacaggttcaccgagcgtgacgttgtgcggcacaggcttgtgcagaagattatcctcgcgtatgataactacgacaaggagcgcgccgcgaaacatgaagaatataaaggtcaggcaaagagatacagatataacgacaaggattaacggaggatatgaaaatgagacactacatttatttttcgaatgagcaggaaaaggagccggtgacaccggagctcaggacgcttgtgaaggtcgcgatatatttcgcgctcgactatgaggatttcgggaagagcgcggaggtgtccgtaacctttaccgataacgaggggatacaggagataaaccgcgagcagaggaatatcgacgctccgaccgacgtgctctctttcccgataatgagcgacgacgacaaggcggcggataccgaccgctcgaatggcgcggtgcttctcggcgacattgtcctgaatctcgagcgcgcgagggcgcaggcggctgagtacggacacagctatacgcgtgaggtcgcttttctgaccgtccattcggtgctgcatctgctcggctatgaccacctgacgagcgaggaggcggaccgcgatatgcgcgcgagacaggacgccgtgctcgggatgatggggatcgcgagatgaagcgctgtccgaaatgcggctcgataacctgcggcgacacagagtgccgtgtctgcggagagacgctgacatacgctgagactgagatgtgcgatcgcgagagtattccgcccggaaggtacggggtcagatatttcacgggacgttttttcctgccggtgctttcggtgctgtttgccgttggggcggcgactctgagcggatggaatgagaagacgctgacaggatatgtggtgcttattgtgctgtcgctcgccgttgtcgcggcgcaggcgcttattgagcggttctatccggaggtgcttgagttttgcatgagacggcacaagcgcgagtactcggaagctatgctgaggattgatatcgctgtagcgtcggttctcatcatcgtggtctctgtaataatactttttatcacgcactgaaaaaatacgaaaggtttcagaaaataaaatgacaagaacaggattcattgcaatagtgggacgtccgaacgtcggaaaatcgacgctgcttaacgcgcttctcggcgagaaggtcgcgataacctcgaagaagccgcagacgaccagaaaccgcataaccggtatcctcaccgagggcgaggatcagttcgtcttcatggacacgcccggtatgctgaagccgaagaacaagctcggcgatttcatggtcaagacgataagctcgaccatcggcgaggtcgacgcggcaatacttgtggtcgacgccgcgaagccggtttcggacgtcgagagaaccatactcgagcgtctgaaaaaacagggaacgccggtcatcctcgcgataaacaagaccgacgccgtcaacggtcagaaggtcgccgagtgcataatggcgtactcgtcgatattcgatttccacgcggtcattccgatggcggctatcaagggcgagggcgtgaatatcgtgaccgaggaggtctccccgctgctgcacgagagcgactggttcttcccggaggacatgataaccgaccagccggagagagcgctcgccgccgagatcatccgcgagaagctgctccgtaccctgaacgacgagatcccgcacggaaccgccgtcgtcatagagtcgttcgaggagaagcccgacatcataaagatccgcgccgagatctactgcgagaaggactcgcataagggaatcatcataggcaagaacggcgccgagctcaagaaggtcgggacatgggcgagagaggacatggaggcgttcttcggcgtgaaggtcgcgcttgatttgtgggtgaaggtcaaggagaactggcgggacagcgccgcgctgctctctacgttcggcttcaaggaagagaattaaagaaggtctgcctgaaatgcgaaaggtgccaagacgatgctcataacactgaagggacttgtcctcagggagacaaaggtgagcgacagcgcgagatatataaccattctgaccgaagaacacggtaagatatcggtcctcgtgcgcggcgccatgaagccgggaagcgccgcgtcgctcccgacgaaggtgttctgcttctcggagttcgtgctttacgagtcgcacgggaaataccgctacaacgacgcgaccgtcatcgacagcttcttcgggctgagcggggattacacggcgttcattctcgcgtcctacgtcgttggcgccgctgatttcgttaccgaggaggagcagccggacgccgggatataccgcctgacgctgaacacgctctgggcgctcacccaccttgaaaaacgcgacgccagaataataaagggcgcgttcgagatgcggctcgccggatattgcgggttcgcgccgaatctgttctactgcgccgactgcggaaagcccgttgtcgaggagcgcgtcttcctcgacgtgatgaacggctgcgtcaggtgcgcggactgcgcgaagctgcataataccgcggtgtacgacgacaacgacataaaggtcgacgatatgcgcacggcgatgatactgttaccgctcgacgttccggtcgccgacgcgctgcggtacatactcgcggcgggggactcgaagatattctcgttcacgctcgccgacacatggatgccggagtttctgagtgtctgcgagaaatatctcgagaaccatgtcgagcaccgcttcgagcagctcgatatgctggattttgactgaaaacgccggaaagaacggctcaggcggaattttatattgcggcgccgacgagaatgtgatataattgattatataagacagatttcgtactgacgaaaggattttgaattttggaacactatgaaagagcgctgaaaacgctcgaatacgacaagatactcgcgatgctcgccgagagggcgccgaccgagggggcaaaggagctggcgctccagctgagaccgtccgattcccccgaccgcatactcaggatgcagcgcgagactaccgaggcgaaggcgatgcaggcggtcaagggaatgccttccttcggcatgataaaggacatacgcgacgccgccgaccgcgcggagaagggcgcgaccctctcgcagcgcgagcttctcgacatcgcgaacgtcctgaaaacttcccgctcgcttctcgagtacagccgtaccgacagacgcgagacaacaagcatagacgacatctttgagcggctcattccggacaagaagctcgaggaccgcatatacaccgcggtaatctccgaggacatgatcgcggacgaggcgagcccggctctcggcgacataagacgcaagatgcgcgccgcgaacagccgcatacgcgacaatcttcagggtttcatcaacggcggctcaaacaagtatcttcaggaaaacattgtcacgatgagaaacggacgctatgtcgtcccggtcaaggtcgagtaccgaaacgaggtgaaaggacttgtccatgacacctccgcgtccggcgcgacgctcttcatcgagccgatgtcggtcgtcgaggcgaacaacgagctccgtatgctcgaggtcaaggaacagaccgagatcgagcgcatactcgcggagctgtccgcggcgtgcggaaatatcgagacctccctcgcgctcaattaccgcaatataaccgagctcgcgttcatcttcgcgaagagcgagctgtctttcagaatggacggcgcgcaggcgaggataaccggcgacaggcgcgtcagcctcatccgcgcgagacaccctctgctcgacgctgagaaggtcgtcccgataaccgtcaccctcggcgggaagaacggcataatcgttatcaccggtccgaacacaggcggtaagacggtcacgatgaaaacgatcgggcttttcgcgctgatggctcagtccggacttcatatcccggcgagcgagacgtcggagatgtgcgtctttgacgacattttcgcggatataggcgacgagcagtcgatcgaacagtcgctgtcaaccttctcgtcacatatggtgaatatcgtcgggataaccgagaacatgacgaaccgctcgctcgtcctgatagacgagctcggagccggaaccgacccggtcgagggcgcggcgctcgcgatatcggtgctcgagaaggtgcacagtgtcggcgctctctgcgcggcgacgacgcactacgccgagctgaaggcgttcgcgctcgagacggacgggtttataaacgcgtcctgcgagttcgacgtcaacacgctgagaccgacctacagactcataatcggcacgcccggaaagtcgaacgctttcgcgatttcctcaaagctcggtctgtccgacgagatcgtgaaccgggcgaaggaactcgtcagcgccgagaacaagcagttcgaggacgtgatcgcacgccttgaggcgagccgtctcgagatggacaagaaccgcgccgaggctgagaaaatgcgcgcagagttcgaggcgtacaagactgagaacgagaagaagatagccgaccgcctcgcgatagccgaccgcgagctcgaaaaggcgcgcgccgaggcttcgtcgatcatcaagagcgcgaaggtcacaagcgactacgtcatggaacagctcgagaaggtcaagaaagaaaaggagagcgcgaagctcggtgaggcgctcgaacaatcgaggcgcgacatcagaaagaagctgcgcgagagcgattcgtcggtcaaccctgtccacgagaaggtcgcggaggattacgtcctgccgagaccgctcaagaagggcgacgacgtgcttctcataaacgtgaaccagaagggcgtcgtcacagacgatccggacaaggacggaaacgtcatggttcaggcgggaatcatcaagacccgcacgaaggtgtcgaacctcatgcttctcgacgagaacaaggtgaccttcaccgacgccgagaagaagcagatggcggcggacaagtaccgcgtcaccgtctcgagggatttccgcgacgagatagacctccgcggaatgatcggcgacgacgcgtggtatatggtcgacaagtatttcgacgaggcgcacatcgcgggcatacacagcttgcgcctgatccacggaaagggcaccggagcgctgaagaacgcgctctggaactaccttaagaaggacccgcgggtcgtctcataccgcctcggaaaatacggcgagggagacctcggagtcactatcgttgaagtgaaataaacgtcccacgtatgtaaagagggtgcggaagttgaaacggatatcggaaaagctcatgagggcacgtatactcgtactcgctgttcttcttatcacgctgttttcctcggtttcctgcggggcggacacacaggtgatacgtatcagcgacggcgtctggagcgggacggtgattccggacaccgtgccgacggaaaatgttcagtcggaggatgtcaccgtcacagagccgccggacgacaccggaaccgtcacagacgccgtgatatcgtccgacgagagcgaacctgttaccatgccggacacccatccggacgagagtgctcctgagacagagacagctccggctgacacagcggcggacgacacgactgcaccgctgcccgaaacgaccgccgcgccggaaacggtcagagcgccggagacgacgaaagctcccgagacaaaggttcaggagacgacgaaagctccggaaacgaccgccgcgccgtcgacgacctctcagtcatcgtcgtcagacagaaagaccggcaccgtatactgggttgagagcggaaaggtctggcacacgacggacaagtgctcgactctttcacgctcgaagtatataatgtccggaacggttgacaccgcgaagaacgccggaaaagagcgcgtctgcaagcgctgcggcgggggataagacacgaaaatatggaatttaattacataaaaaatgaacgtaatataaaattccaatcaaatgagcccggatttgattaaatacgatataaaatcggaaaagtgctttatttttccgccggtatctgctataatatttacgtgagcataaagacgcggcggcggacacacggatacctgtgtgccataagtccgggctgtccggcatccgcgccattcaggagtgtatctcaaaggagttgctttatatgtcagaaaaaatgatactcggcgctcagctctatactgtgcgcgactatatgaagaacgaagaggatttcgcgaggactatggagcggatcgcgaagatcggctacaagtacgttcaggtctccggcatcggcgacgtcagcgcgcaggctatagccaaggctgtcaaggacaccggactcaaggtcatcctcacccacacaagcggcgaccgcatccttcacgagaccgagaaggtcatcgaggagcacgagcttttcggatgtgacggaatcggcataggcggtatcttcaattacaagccgtgggggccggagggcttcaagcgcttcgcggacgatttcgcgccggctatcgagaagatcactaaggcggggaagaagttcctttatcacaaccataagttcgagtttgagcgctgcgaggacaagaggctgttccttgattatatcatgaacgcgtctcctgatctcatgctcaccttcgatacctattgggctcaggcgggcggcgctgacccggcggcggctatcacgaagtacgcgccgaagatattcacgacccacctcaaggatatgcagataaagaacgaccagcaggtcatggctgaggtcggcgagggcaacatgaactttgaccgcatcatcgacgcctgcgtcaaggcggggataaagtatcacatggtcgagcaggatatctgcccggcggatccgttcgacagccttgagacgagctataagaacatcatggcgcgttacggtcagtattttgagtaatatccgttttatcgcaggaaggactacataagatggcagaatttgtgctcagcgctttcgctgacgaatattcaccgaagttcgacgagcagctcgaggggctgaagaagaacggcgtcggtttcatcgagatacgcggcgtcgacgggacaaacgtcgccgacctcaccgacgagcagttgcatgaggtcagggcaaagctcgacgcggcggggataggcgtttcgtccatcggctcgccgattggtaagatcaaggtgtacgatgagtttgagccgcatcttgagaagcttgagaggtgcatcagcgcggctaagatactcggtactccgaatatccgtatgttcagtttctacattccggaggggaagacccgtgaggagtgcagacctgaggtcatgagaaggcttggcgtgatgcttgatatcgcgaagaaggcgggggttacgctctgccatgagaacgagaagggcatttacggagattctccggagacctgtcttgatatcaacaatgagttcggcggagagatgaagctgatctttgacccggcgaatttcattgagtgcgggtgcgagccgttcccgcatggatacgggctgcttggtgaccgtatttattatatgcatatcaaggacgctaccgctgagaagatgatagctccggcggggaagggtgtcggacggatacctgagataatcgctgatcttgataagaagcgcagcgggaagatcttcctgacggttgagccgcatctgcgtgtgttcgcggggcttgccgggcttgagacggacgagaagactaagatgccgaatacatatgggacgagcgcggaggcgttcggcgccgcggtcgacgcgataaaggcgataatcgcgaagtaaagataaaatccgggagtccggggagcttttcaaaaatccccggatcgccggaattttcgcgtactgtcagtatcgcgctttcgcatacaataaaattaaatcgatttaattccctgcgctctttcttaagcttgtttttgtatgaagtttgagaaaagggaggggtgcggggagggaaaaaccctttt

SEQ ID NO: 2430 - DNA, 11960 bp, Unknown
  16S sequences of unknown bacteria
cgcggccatctacatagatgcggccgctgctcacccgatcgatcgtggcgatgcagttcagcagcgtcgtcttgcctgacccgctggcgcccatgatcgcgacgaactcccctttttccacccgcagcgacatccggtcgaccgccttggtgaggctgaagcggttgccataatacttttcgatgttttccaccctgaggatctcactcatcctgctcacctctcccctcttcatgcacgacctgataataatcatctgccgcaaacgtgatgcacacgctggttccctctcccggcgctgaatcgatcgcgatggcatgtcccagccgccggcacagcttgtcacacagatacaggcccatcccggtgctcgtcttggatacgcggccgttctgaccggtgaacgacttctcaaagacacgcccaagatctgatgccgggatgccgatgccgttgtccgagatgatcaggcgcgcctcatgccccatctccttcgtctcgatccggatgcatccgccctgctccggacaatatttgatcgcgttgctcatgatctgattgatgatgaattcgatccatttgctgtcggtgaacaccatggcgccgctttcctcaaactcgatgcggatgcgcctgtacagcaggctgtccttgttgcgccggatgacatgctgcaccagctcatccagcgagcagcgcttgatcagataatccttttccgtattctcgctgcgcatgtaatacagcacctgctccacatcgttttcgatcctgccgaactgctcgcgcagcttcttgttcatctctccgggattattgtgcaggatcagctgcccagccgcgatcggcagctttacctcatgcacccacatctcgatataatccttgaagtcctccagcgcatcctgatactgaaggatgtgctcgctcatcgacttatcggtctcatacaggatctcctccagcagctttccttccaggaacgagggcgaggaagtcagctcatgcacgagatatttctgatccagctgatccagcgccgcgaacagccggcggtaatacccggaccgccgctgatattcataggccagcagcgcgccgccaaacagcatcaccagcacgaacgacgcgatcatgatcgacacatgcacatcaaagatcagcaggaagagctccaggcagatcaggaacaacagatagatcagaatgctgacgagatgatcgagcgcgtatgtgctcagcttcatacgagcagatacccctgtccgcggcgcgtctcgatcacatcgacgaggccgatctcctccagcttgcggcgcagccgggtgatgttcacggtcagcgtgttgtcatcgatgaacttgttggtgtcccacagataatccatcaaatcatcccggctgacgatgcagcccttatgctgcagcaggaaatggaatatggccatctcattctttgacagcagcagctcctttccgcctttttccagcgtgctgcgcagcacgttcaccttgacgccgcggtagacctcttccgtatgctgacggttcatccgcttgaacagcgcctcgatatgcagaagcagcagcgtcgggttatagggcttcgtgatatagtcgtctgccccatagctcatcgacagcacctcatccacctcattgttcttggatgtcaccatgatgaccggcacatcgctcttcgcgcgcagctgcttgagcacctgctggccgttgatgcccgggatcatgatgtctaagagcaccagatccgcgtccatctcgatcagcgcgtctgccgcatgatcgaacgtgcgcaggatgcgcgcttcatagccgttgttttccagcaggatcttcagctcttcccgcagccgttcatcatcttccacgattatgatcttcttcatcttcatcacctgtttcattatacctgattctctcaaatgccgccgcacccttacagcgctgtaagcatcacatactgaaatgataccataaaagccagactttgtgatagaatgagtccggagggatcaccatgaacaacaatgaatccgcaaatccgggcatttcccgcttttcctgcacgagcgtgctggatgaagcgctgatcgcccaatggaacgcgttccactttcatcacattcagaacaaatcgatctggctgagcatcatctgcggtgcgctcatcgcggtcatcggcgcggtcatgctcatcatggacctgcgcgcaggcagcgacatgctcatcagcgccgtgatcgtcctggccggcgcgctcatcctcagcatgggcatccgcacgccgaagatgaacgaaaagcgcatgaaggcgcgctacgccggcagtcagagacagtatgcgttttatgatcattacctgagcgtgcgcacaggcggcgatatggccgaatgcccgtataaccgcatcaaagctgtctatgcagcagaaggctgctggtacttatacaccttttccaacagcgcttacatcgtcagtgaacaaggcttctctcagggagacgccgaaagcttcaacgccttcctgaagagcacgtttccagatcaattccaccaggtctcctgatgtccccgcgaggacatcttttttcttgacggccgcccgcacatgctatgataaagttgtaaagaaagcttgacaaaggaggatgcgtccatggaaaaagaagaagtgctgaacaaagcgcgaagcgatcattcccggcaagaaccgcgcagacagctgcttgagcgaaacgcgggctatctctcgttcatcgccctgtctgcgatcggcgtcatttggaagctggccgagtggttcatcgatcagaccctgggcacggcgagcatcaacgggctttccttcccgctttctgactttctgttcggcttcctctctttgggcatggccgtgacggagatctccctgctgatccagacccggcagatccgctatctcaccctcgccctgttcttcctgctcttgcccgccatcatgtcctggcgcattttctgcggttgacgaatgcggacgcgcatggtatgcttgagcagttatcaagaacagaaatgagggaaatatgatcaaattcagtgaactgcccatcagttcccgcatcgtccgcgccgtgcgcgacatgggatttgaaacggcaaccgaaatacaggaaaaagcgattccgatcatccttcagggcagagatgtcctgggcaaatcaaataccggcaccggaaagaccgccgcgttcggcatcccggccatcgagaccgcacagccgctgcagcgccatcccggcacgctgatcctctgccccacccgcgagctcgtcttgcaggtgagcagcgaactgcgcaagtttgccaaatataaagaaggcatccgcgtcacgccggtctacggcggagaaccgatcgactatcagatccagcagctgaaaaagggaagcgccatcgtcgtcggcaccccgggcaggatcatggaccacctgcgccggcgcactttgcggctgagcgagctgaacatgatgatcttagacgaagccgacgagatgctgaacatggggttcaaggaagacatcgagaccatcctgaagtccgtcccggaagaccggcatcatcagaccatcctgttttccgcgacctggccggaagcgatcctgaagatcacgcaggaatttcaagacgatcccgtcaaagtagagatctcctccacgcagcgcaccatcgatacgatcgcccagtcttattatgaagtcccaaaaggacagaaggatctggcgctcgaagtgctgctggaaatgtaccgcccctctttatgcatgatcttctgcaacacgaagaagatggtggatgagctcagcgagacgctgggcaaggccggctatcagagctcctgcctgcatggagacatcaagcaggagacgcgcaccaaggtcatgaaccagttccgcagcggcgctttcccgatcctgatcgccacagatgtcgccgcgcgcggcatcgacgtggatgatgtcgatctggtcatcaactacgacctccctcaggatgatgaatattacatccaccgcgtgggacgcaccggacgtgccggaaagagcggagaagccgtgacgctcatctaccctgcgcagcgcagggacctcagccgcgtcatctcctacaccaaggcggacatccgcagaaagcagttcccggacagcgaacagctgaaggcattcagccgccgccggttcatcgatgagatcagcgaggcatgccgcaaaggaagcgatgatgacaccatcgcgctcacctatgagctgatggcgcagggcatcgcccccttcaatctgatcagcacgctgatcgcgatgaattaccgtccgaaggacctcgacacctcctccctcatcaaggcgcagcgcaggcagaaggaacggatgcgcacgctcagcctgagcctggggaaacaggatggcatccgcaccggccatgtcgtcgccgccatcatcgaggcatccgggatcgacgccgacgccatcggcgcggtgcatatccataaccgcagcacgagcgtggatatcgctgccgagcagatcgatctggtcgtcaaaaagatgaaaaaggcgaagatccgcggcaagaacgtccgggtgagccgggaagagaaagcggaaaaagagcccgcacagaagaagcgtgcggaaaatggcaagaagaagaacagatccagcgaaagcctgaaaaagaagaaattccgcaagaccaaaaaagagaagcagtaaaaaagagccttcggggcggtcagaccacccgaaggctcttgatgtatcttacagctgtttctcgtattctttcagcgcatgcgcgatctgatccgggcagctggtcggctttgcgccgcagcgaacaccttcaaatgaagcgatcacctcatcgatgtgctttccctcaaggatacgggagatccccatcagattgcccgggcatcccccgacaatatccactttgcggatgacatcgtgatcgatgtcaaagcgcatctctctggaacagacccctttcggccgataaatgaatgtcgtcacttctattccctctctctctgtaaacggttgaggacctggtgggccagcgcgccgatcaacaggccgctgagcacgccgagcgcgcacagcagcggcagcagcgcctgcatgaagaactgccggtagatccagctcacagcgatgacctgcccgatgcagtggaacacgctgcccagcacgctgacgccgtagatgctgaagcagcggcatcggcgggcgatgctcatcgccgcacagctgagcaagacgccgctcagcgaaagccagaacgatgtcgcaaacagcgtgccctgcagcagcgagacaaacagcacccgcatgaggctgacggcaagcatggcgcgcgcatcatagagatacagcgtgatcagcgcgatgatattggccaggcccagacggaatccgggcaccggcagcgggatcacgatgagcgattcgacataatgaaacaggatggccagcgcacagagcatcgtgaaggtggtcagacggcgtgtcgcgctcattggatctgcgtatccacggcgccttccccgccgccctcgatctgcacgaccacctcattgggcaggcagatgatcggggtagccggatcgctcacatacccctggatcgaacagtaatgatacggggaattctctttttcgacccgcacctttccatccttcacttcgatctccacctcgcccagctttccatccaccgcatagacaccatcttcctgcagcggcaccctgagcacttcctcttctctgacactgacgaccacatcgctgttcccctgtgcgtcataggcgaaccacaacggcacataaaaaagcacacagctgatcatgatgacaagaatgcaaattttatctgcccgcttcatatcgtcctccaacgacatcaattatacgtcagtatgtgcctttttgaaagatttaattttcctcatccagcgcctgctggtatgtctcgacatatttctggatcgagatggtgcatccgctgagcacatcggcgttcaatgccctcccctgctcatcatacagcaggtcctgcgcgccatgctccgccagatacccttccaggaaagcgatctgttcatgccattccttaccgatgctgctcgcgcgcttgaggccgtattcctctttctgctcctttttggagaccccgccctcggtctcatcgatggatactgagacgacatcttcgccgttcatctcgacctcgaccttgatctcttcatcgccgttttcgctgaccgcctctttcttcacgctggcgctgcatgcgcacagcagcgctgccgccataaggattgccatcttcttcatcttgcagacctcctagttcactgtctgaattgtttcctctttctccttttctatacccgcgcggaagaaagaaatgtcagaatgaagcaggaagccgcggtattcagccttttttctctgtctcgcggtatgtttcggccagctctgcatagggcgccgcattccagcggatcatctcgatctgctcagggcggatgggcttgacatgaaacggcgcgccgatcgccacctgatgcgcggcgacccgcttgtcctcgctgaccagcgcgcaggcgcccacgatgctctcgctttccacataagcgccgttgagcagagtggcccgcatgccgatgagcacatgatcttccagatgcgcgccatgcacgatcgcgccatggccgatggtgacgccgcggccgaccacgacatcatatcctttgtcacagtgcatgatcgtcccatcctgcacgttgcttccttccccgatcacgatgcggcccgtgtctgcccgcaggatgcagccataccatatcgaggcgccggaggcgacatgcacatcgccgatcagcaccgcatcctctgcgatgaaagcatcctccgcgatctgcggaagctttcctttccattctttcaatatcatttgcatcacctgttcaccgaacattatagcatgcgcctgcgcagaaaacagcagtttatcgggaaaccgcgttcttctcctggcggcggaaggcacgatacagcttgagaaacgcgcgcttttcgatgcgtgagacataagagcgggaaatgccgagctcctgcgcaatctccttctgggtctgttccttgcgtccatgcaggccgaagcgcttttcgatgatcatcagctcccgctcatccagcagcggcagaaacgcctgcagctgcttcagccgttcctccagcacgatctgctcacagacgcttcgctgttcaggggcggcgatcgcgtccatcagggtgatctcgctgccatccttctcattggcgatcggctcattgagcgagacatccgaaaaggaattgcggttcttgcgcagatacatgaggatctcgttctcgatgcagcgggaagcataggtcgtgagcttcttccccttttccggcgcaaacgtatctacggccttgatcagcccgatcgtcccgatgctgatcagatcatcggtctgggtcctgcggatgtcatacttcttcacgatatgcgccacgagcctgagattgtgctcgatcagctgatcgcgcgcatacgcgtctcccttctgcagcgccgcaaggcagcgctcctcatcttcccgcgacaacgggcgggcaaagctctgcgaacggatatatccggtaaaataaaacatgtgggtcaggatctccatcagccacgcaaacatttcatcacctgtttccactttatgcgacagcttccgcgattatgcgcagcaaaacgatccgcaccgtttgctttcgatttaaatttttgataagataaaactgtatgttcagtcaatgggagggatcggtatgagaaatatccccggcactgtctgcctgatgagcgcaatgttcatcctctgcggatgcatgaatcaggaagcaggatcggtgaacgaaacgattcaggaaaacaatgaacgcatcggcacgactgccgaaacgaacagcgagatcacggaagtggacgacatggacagcgcgcgtgccctgctgagcgaacagtgggacatccagcagcctggtgcccttcccgagggattcagcgtccaaggctattatgtctatgaccgcaacatggtggagatccgctatcatgacgaagaagggcatgagctctattaccgcaccagcacccgcagcggggacatcagcggaaacacgcagcaatacagtcagaaagaaacgatcgatgccggttccttcaccgacatcaaggtaaaaggaagcaatgatctgtggaatgtggcagtctgggtcaaggatggcatttcgtattccatcaccgatgaaaggggactgaacacggcggtattgagcaccatgatcgaaagcctcagcagcgaatgaatgttcgctgcttttttttgaaatgtttttcaatttaaacgcttacttacaactttttcagaaaatgtttcaaaatccattgacaccttttctccctttttgtagaatgtttccgtactcaacattcaaatgcatcgatcaggaagggatttccccgctccgctcacagagagccgcataagctgagaaacggcagcatggaagggaaagacgatcgcctgtgagcagtgaactgaacacatacacatgtcagtaagggatccgcagtttccgcgttatggaaagacacattggacatgatgtggatgagcggcagcaatgcaagctgagtggtaccgcggaaacagggttttcgtcttggcgcagaattttttctcaccaagacgaagacccttttttggatgctgagagaaagggaggaaagtttatgaatggtttactgttattggggatcgcctgcgtcatcctgatcgcggcatatctgctgtatggccgttatctcgtcaagacctggggcatcgatcccaatgccgtcactccggccgtggaaaaagaagacggagtcgattacgtgcccagcaataaatgggaggtgttcgcgcatcagttttcatccatcgccggcgctggtccggtcaccggtccggtcatggcgatgatgttcggctggctgccggcattcctgtggatcatcatcggtggcatcttcttcggtgccgtacaagatttcggcgcattatacgcatcggtaaaatcacatggcaaatcgatgggacagctcatcgaggatcatatcggtcataccggcaggaagctgttctttctgttcagctggctgttcaccttgctggtcatcgccgcgttcgcggacatggtcgccggcaccttcaatggcttttctgagtccggagaggcgctgcagcccaacgcgtctgccgcaagcatctcaatcctgtatgtgttcgtggccatcgctttcggcctgttcttgcgcaagacaaagatcagcggatggaaacaggccgtgatcgccatcgcgctcatcctgctcatgctggcggccggcatcgcttttccggtctatttgggcaaacaggcatggatctacatcgtgttcgtctatatcttctttgcctccatcacaccgatgtggctgctgaaacagccgcgtgactatctgaccactttcttgttcatcggcatgatcgccgcggccgtgatcggcgtcttcgtcagcaacccgaccatcaccacgccggcctttactggctttgtctctgagagcggcagctatttgttcccgacgctgttcgtcacgatcgcctgcggcgcggtcagcgggttccactcactggtttccagcgagaccagcagcaagcagatccgcaatgagaaagacatgctgcaggtcggatacggaagcatgctgctggaatcactgctcgcggtgctcgtcatcgtcgtggtcggctcgttgagctccctgagcgccagcggcgtcctcaatgcagacctgagcgcaatggctgaaggcgcaacgccgttcacccagttttcagtcggtgtgaccggcctgatcgcgcagctcggcctgccgcaggaatggggactgtgcatcatgacgatgttcgtctccgccctggcactcacttccctggacgccgtggcacgcatcggcaagatgtctttccaggaattcttcgaagcggacaagaacaaagagagatcaccgctcatccgcttcctcaccaacaaatatgtggcgaccttcatcacgctgttcgccggatggctgctcagcctgggcggctacaacaacatctggccgctgttcggctctgccaaccagctgcttgccgcgatggtgctgatcgccctctcggtattcctgaaagtgaccggccgcaaaggcttcatgctgtatttcccgatgtgcgccatgctcatcgtcacgatgtcttcgctcggcctttccatctacaacatctgcatgaagctgttcgtcaatggcggctttgtcttcctcactgacggcctgcagctgatcgtcgcgatcctgctggtagcgctgggactgatgatcgccttctgttccggcaagaagctggtcaccgccaagcaggaaactgaatgatgatcatgaaaagatcggaatctttccggtctttttttgcgcttggatcgaaaaaaaaagccatgaccatcgtcacagccttgcagtcattcgctcatgaatggctgataatgcagagcgaagctgatcttcgtgttgagatcctccaggatgatcgcaaacgcatccggatcaaagacggccacatcgatgtaagagtaaaattccccgatggcgccgccgatggtgcgggcgaccgacagcttctgcagttgctcacccagccgcttctccatcgtctggcggatcagcgcgttcttttcatccgtataagggttttcataatacagataaccatactcgccgcccttatcatggaaatccttgcaagagtcatcattgccctgcagcacttcctcctgcagcagagcgttggtcgtgatgatgagcttcatgtcattgcgcagcgtgtcatgcaccggctgctcgctcagcttatacaccatatagatgctcgtcgggtcatgatattccagccaatcgttcgcgatgatgatgtcgcagacatcctcgtaaaagttcggcagaaggcagaagttctctccatcggacagcggctcatcgatggcctgaacgctggcgatccgcgcttccagctccagttcgcccaaaaacagctcgagcatgtacgcggacatgtcccgcttgcgatcctcatccaggatatcccggtatccgggacaatagacctgggtgtgcaggcacttgttcgtttcatcgatctcatagaacacggtgaaatccgcgccggaatacacatgatccttgatgcgcacggcagcattggccgctttggaggtaaacggcggcagccatgcgttgatgatccagtcctccaccagctcgcgcggcgcgttctgccggatcagcgcagcgatatactgcacggtcttgttcgggccggtgtcgagcgtaaactcgaaaaacccgtcggcgttgcgctcgatcagcgccttgcatccgcataccttttccagcatgcggtcgatctcgccgcgcagctcctcaagctgtgcctcatcctcttcgcgcagcgcgctttccagctcttcgcgcatcgccatgaaattttcccagaaatacttaacccgcatcttgcagttcacagacatccctcttttctcaagtcagtccattatagcatgatgtccgtgtcattgctatgcattcgccagccgatttttcagctctttcaagatccgggttactattcacagcagggaaatgaaaaggcgcgggaaaaacacgatgttagaatcagtcttctgattctgcatcgtgttttttcatttctgcaattgtgatatatctttctcctaacgccctttttatcaattcg

SEQ ID NO: 2431 - DNA, 26079 bp, Unknown
  16S sequences of unknown bacteria
tgaacggtgcaggtttgttcttttattaaaatccccgagaaaaaagtgaagaacctgttgtaaatagttcttctagtttaattcttgtatttattttgtacagtatactagatgcaattctccggaacaaaaaagcatccacccatagaaactgcatgcttcttcgggtgaatgctttatcgctattgttgatattttcttctttataagccgtagcgggctgcgtgaaatcccttgaacaccggatccccggtatactccagcacttccgcttccccggtaagcgcctgccatgcgcctctcgccagcgccgccaactcgtattctcccgggagaacccataccggcgcaatccattccacgtacggacgaatttgatcgatcacataggttgaatgcgccacgccaccggtgataataatcgcttccactttcccttgcaaggcggctgcacaggatccgatggcctttccgaattggtacgccatggcatcggtgcacagctttgcatactcatctccgtgcttgatacggcacacaatttcacgcacgtcatccgttccaagatggctgtaaagcccacccttccgagtgagaagttcctccatctgtttgtaggtgtactttccgctatacgccatcttgatgattttcaccgtcggaaaagagcccactctggttggcgtcatcggaccgtctcccgccagattatcgttgctgtcaatcatctttccttttcgatgggcggtaaaagaaaccccgccaccgatatgagcgaccacaaaattatgatcttcgtatcggatgcctttctccaggcagtaccgatgtgccgcctctttctgattcagacagtgcacatggctgtcccggtacatccctttaattccgctgatgcgagctacatcctggaactcatccacatccggtggattgaataccagtgctctcccgccgtatctggattccagataacgggcaatctgacaggccagcatcgccgggtgggagacaccggttcgtgcagtctgacagtcataaatcagctgatcatttaccgaatacacgccggaaacacaggatgccatcccgccaccccgggccacaaaggagtccacatcatccaaatccacctgattcacccgacaagcattttctaccagctttgcccggtacatcaattgagactggacgcagtcgaactgctccagttcttccttggtatgatagatgttctctataaataccttctgatcgttccggtataccccgatttttgtggaggtggatcccgggttgatcgttacaatcgtaaaaatctttttaccgtctacgatttgcatgtctcggtctcctttgcgtttcattcggtgtccttctgctcaagcgattgcctgcagccatcggccgcaggcaatccaagcaggtagttattaagcaggctaggcttgcgctttcgcctctttgatggaatcaatcagcagcggaacaaccttgaacaggtcgccaacgatgccgtaatctgccacttcgaaaatcggtgcattgtccgccttgttgatagcgatgatgcattccgaatcctgcatgccggccttgtgctgaatcgcaccggaaattcccagtgctacgtataccttcggatgtacggtctttccggtctgacctacctgatggtccgcaccgatccagccggcgtctactaccgcacgggatgcgccaacgacgccgcccagcaggtctgccagctcttccgccagcttaattccgccgtctacatcctttgcaataccacggccaacggatacgatgaaatccgcaccgatcaggtcaaccatcttcttggcagccttcacgatatccactacttcggtctcaatatccgatgcttccagcttgaattccggatgaacgagttcaaccgcatttgcttttgcttcgtcgaacggtctcttcttcataacgcccggacgaaccgttgccattgccggacggaatctcgggcacacgatggttgccatcaagtgtccgccgaatgccggacgggtcatcttcatattggtatttacatcgaagagcttgctttcgaacttggtgttctccacatccagagaagaaccggtcttcaggaagtcgatgtatccgcccagatctacatccaggtgtgtgcagtctgcgcacagaccggtgtgaagtcttgcggcacatctcggcgccaggtctcttccgatgttggaagcgccgaacagcatgatttccggcttgtattcttctaccatgtcacagatgactttggtgtatccatctgtggtgtaattcttcagaagcgggctgtcgcatacgatgacctgatcggcaccgtaaccgcccaattcctttgcaattccttctacgttctctcccaggaggataccgcacaggtttactcccagttcgtctgccaacttccggccttcggaaatcagctcaaaagttgtcggcatcattacgccctgacgctgctcacagaaaacccatacattcttgaaagcagcaatatctgcactatcgtaagccataaatatttctcctttcttagatgatgtgcttgccggtgaggatacctgccagctcgtctgttgtttcttttccgcagccgtccaaaatcattccggcgccctttctcggtggagtgaaggacttgaagatgttggtcggggatcccttcaaaccgatggtggttttgtcgatcagcgggtgatccttcaacgcttcgtaatccattaccttaaccggcatgtcgaagcacttttcggttcctgctacggacatgtatctcggctcgttcagctccttgatgcaggtaatcatgcatggtgtgtgtgtttttactaccatgtagccgtcttccagcattctctgaacggtcagtgtatttccgtctttctcaatctttccggcatatgtaatctgcgggaggtggagtttttccgcaatctgcggtccaacctgtgccgtatctccatcgattgcctgacgtccggcgatgatgatatcttcgtcgcccagtccgtaggtgtcgattgccgctgcaataatctgagatgtagcatacgtatcggagccgccgaattctcttgcggaaatcagcacggtttcgtccacgcccattgccatcagctctctcagcatgccttctgccggaggcggtcccatggtgaatgcaactacctcacagccatattcgtctttcagcgccagagccgcttccaccgcattcaggtcatccgggttgatgattgtctgcatggatgcacggttcagcgtaccgtcatcgttcactgctaccttgccggaggtatcaggaacctgctttacagttaccaaaattttcatatttccgttacctccttactttctgagcaggctgttggcgataaccacctgctggatttcactggttccttcgaagatgctcaggatacgagcgtcacggtacattctttccactctgtactcttcgatgtatccgtatccgccgtgaatctgaacggcttcgtatgcgcatctgtttgccatctctgcggcaaagaacttcgcttcggagcacgccttgctggcatccggatggttggcatccttcagaaccgctgcgtgataggtcagctgacgagctgcttccagttcggtctgcatcttagcaatcttgaagctaatagcctggaaatctgccagtctgtgtccgaactgctttctctccatggaatacttcacggcttcgtccagacaaccctgtgccagaccgattgccattgcggctacgcccagacgtccgccgtccagagtcttcatcgcatactggaatcccttgttcagaggtcctaccaggttttccttcggaacgcgaacgtcttcgaatacaacgtcgcaagtcggataacccttgatacccatcttcttctccggagcgcccagggaaacgccgtcggcgtgcatgtccacgatgaacatggagattcctctggaacccttcaggctcagatcggtctttgcgaaaataataatccagtctgccatcggtgcaccggagataaagcacttacggccgttgatgatataatcatcgccatccggaattgcggtagtggtggtaccaccggcatcggagccggcacccggctcggtcaatccgaataccatgattttctcaccgcttgcaaccagcggcagatatttttccttctgctctttgcttcctgccagcatcagcgggccgccgcccagagagttggatgtgtttgcatagattgccagtaccaggtcctgacgagcaaattcttcgtccatcagtacataggacaggctgtcaccgccggctccgccgtattctgccggaatctttgttcccatgaagccgtagcgagccatttttttatgcatctcccagttgaattccccggtgagatccagttcgtcctgcagttctttggtgaattccgtctctgcaaactgacggaacagcttctgctgcagggcatgctttttgtcaagaatcatgttttcctccttgatttttgctttaaaatgccgggagagtaagtccccctcccggccttaccgattcattttattgtggaatttcgtgtgcggaagaacccttggtcagcacttcgtaaattccgtcgataccggagagtgccatggatctgccggcctcttccgtaaagaatgccatgtgcggtgtgtgaattacgttcacgaaggaccgcagatacttcagcttgaagtacggcattccaggtgtgcggatgatatcctcatcgtgtgggatgtggatgatgccctcttcgcccgggaatgcatccatgaacagtgcgccgattttctcggattccacgccgtcgatgatggcatcgatatccatcagaccgccgcgggcattgttcaccagaaccacgccgttcttcatcttagacagcgcctctccgtcgatcatattctctgtgctctcggacaggttggtgtgcagtgtgataacatcggattctttgtacagggtgtccagatccacgtaagttgcatattcttttactgcatcgttctggtacatatcgtatgccaggatacggcatccgaatccggacagaatcttgataacggtatatccgatcttgccggcaccgataacacccacggtgagggaacgcagttcccggctcattttacccttcagtgtgaagtcgttgtcgtttgtgttatacagcgctttctttgctttccggatgctcatcaggattgccattacggtgtattccgcaacgccgttcggagcgtagcttccgtgagtaatccgaagtcccagctctcttgcatacggaacgtcgatgtagtcgtatccaacgcagcggaacgcctgaacctttacgccattctcaaccattgtatccagaatgctcttggagaaatcactctgtcccagtgtggtcacgccgtcgcaacccttgctcatctctacggtggaagaatccagaatcgctccggtggaaatcagttcgattcccagttccttgcagcgagcttcaataaccggtttttcgtccggacggacttcataagcagcaattttcatatcttcttctcctttacttttgaccctctgccgggtcccgttttgatcactaatttgtttccagtccctaactctatagcagccggtgtaaaaacattttcacgatctacacgtttccgatattcccactaatctctcagtgccgggtccatcggaatggcagcgccttcttccagaagttttgctacttcttcatcggaatatccatattccttcagaatgctttcggtctgttcacccagatacggtcctctgttgtattccggcaaacccatttccttgaacattacaggcggtctaaccagcgtacgcttgtttccgttgctgtactgcatttcgtagaagatgtcggaagcccatgcctgcttgtcttccaacagggtatcccagttctgtgccactgcgtaaggcaggtcggccgcatccagaatcttgcaccactcgtcgcaggtctttccgcggaactcgttggtaatccattccgagaattcttttctgttcggaaccagattcttctgcggatagaacttcggattctctgccatttccgggtgtcccatggcattcatgagaaccggataatgtctgtcatactgcggcatcgcaatctggagccactgatcgtctgcggtctgatatgccagagtcagcgggtttccgttctcccatctctccatcgggaacttgcagctgtcggagccgtactggctggcctgcagcatcagggatacgtcccatacggcactgtggaagagggatactacaacctgatcgccttcaccggtagtctttgcacgatacagtgctgccagtacgccggccgccaggttcattgccacctggtgatctccgaagccctgtacggtgagcatcggcaggctctttttatctctcagaggtcccagaattccgcctcttgcatagaatgcggtgaaatcgaatcccggcagatctttgtccggtcccacttcgccgtatccggaaacataaccgaataccagtgccggatactttgcgtggagagtttcccaatccaggccggctctcttcagcggtccctgacgccagttgcagataaatacatccgcatcggcgatcagcttctccagagcttctcttccttcttcggatttcgtgttcagggaaatacatctcttgccggcattctccaagtcgtaggatgtgttttccttctgatccagcggacgaccttcgtttacagcggtgtatctcagcgggtctcccttcggagcttccactttgataacgtctgcacccaggtcagcgaggaatcttgcggtacaaggagcggcaataaatgttgccagctctacaaccttcaccccttccagggggagtcttacttcgctcatttcataacctcctgcttttctaagctacatattcaccatatctcggaatgtttcgagattggttcgaatctgttcaaactgcttcatctgacggtctacttcgattaatgtcaccggaatgtccgccttttcgcatgccttcttgatcatcacgtagtcgaattcttccggatcgcagaacttcgtcatgaccacgataacgcccttggcgtttctctcttttgctgtgtccacaatccactgcactcttggtttttctacattgtagagaacggaacagttgtccatgtttccgaacttctctgccagtgcctgaagtgcatcatcgccttccggaacatcggtccgatactgacgggactgtgccgctacatcgtcggccacaatgtggaatcccagctcatccatgatggcattcagctgcggtgcgtctgtcaggataccggagacgataaccggaagcttttccgctgccggtgcggtgccttccagttccttaatgagctgctctaccagtgcggtatgctcttctttcagcatgaagaacgcactcttgaacaggtcgctacgctgtgccgctgtgatttcaggatggttcgccagaacttcttctgcccggcgcattacttgattgtgtctgttatagattcgattggattctgccagtgcggctgcgtcgaacttgccacccagcttttccagatcgtgaatcactctttcatatccggcctttgtgtacgcaatgccgtatgccggctttctgtgctgcggataagtcatcggaatgaacggaatatccttcacggcatatttccagttctctcccaacgtcttcagtgtatcgcacagagacggaatgacgattgcgctggcacccttataagctccgttgattcccagttccagcatggactgcacgatggaacataggaatgccggaaaatattctttggaacggttcagttcaacatcagcaccccacgcgcccattggcacgaatcccattgaatggagtatttcttcaggagtatagacaggggaagtcaaaacgacttttttaccctgttggagataggaatccatctgagcacgcggtgctgttgctatcttatgaaactgatcgaaaatttcgtttaccatcgttactctcccttcgcttctttgttcgcttccatgatttccatcaagccctgtacgcgggtatcgtactgtgcttcggagaagttccgcggatctgcctggtcgccgtcgaaactggttaccggaattccgcaagcttcgccgatctgacggctcatctcgctcatgaatccactccacagtttgcaggaacggttggtatgaaccagaagtccttccacgttgttgtccttgcagagcttgattctcttatctctggatttctcaaggttgatggcgttcggtacgctgcagtatgcggcgatcatctcatcgaaggagtggtagtcgaaaccgaatgcatcggcataaatggtggttaccatgttaatacctctgtcccgcaggccgtgagaagtcgctctcagatatggccagcaagcgattccttcgaacatcactctgtatttctcttcgccgcgataggtgctggtgccgttctcgtggttttctttgtattctttcaggagctgctccatcgcctctccggccgcttccttgcctcttgcggttaccattaccgccatgtggttcagaaggtcgaagccgttgaacggagatggtgtgtacttcgcctgtgctgttgcatccagccatgctctgctggagcgacagctgaatccggtcacttccttgaaccgctcgtcggaccacttcaggtcgaacagattctccagggtgtgtaccgcatcccagaactgagcggatacataatcgatttccgcctgggacacttcgtaatccgggttgaacggaatgtccagaaggatcatcgggatattcagttcaatggccaggttttcgtaccatttaatcatgcagttgcagatgttgttgcagcagagcagtacatccggcattgccacgtcctgctccggacattccttcagcttcgcgtacgccatgctgattcgagcatacgcacagatgtcgttggaatatccatccgcttctgccacttcgcacattctttcgccggcacctcttgcagcaattcccgctgcctggttctccggatatgcagttgccagtcccaaagtttccggaatttctaccgggaagttactggatacccacgcaaccggttttccttccttcttcgcctcgatggcatccgcaaatgcatcggaagcgattttaccgagtttgtacttcgccgaattcggatccaccggacggcgggctttcttttcctctgccataagaacctcctgctttctttcgcaattcagtaatgtgttgtaaaaataatattctcttcaatagctcttccggctattttatcgcttgtcgatatgcgtacagcgctgcgccgatagcaccgaagtactgtgccagcggatccaccgcgatctccatgtccaagctttcggacaatgctcttcgtacagcaccgttctttgccactccgccggacatgcacaccataggcgttacgccagccctccttgccagtgcggacacccgggctgccacgctgctgcagattcctgcaatcagatcttctcgtttcaccccatttgccagctggctgatgacttccgattcagcgaacaccgtgcaagtgcttgagatcgaggccggattgctggattttgctgcacaggcatcaaagtcgccaatgtccatttggagaatcgttgccatcacatccagaaaacgtcctgtgcctgccgcacacttgtcattcatgacgaagttggacattctgccgctctccgacaagacgatgactttcgcatcctgtcctccgatgtcaatgacgcttcgaagttccgggaaaacgaaccttccgcccagtccgtgacaggtcagctcgctgacctcgccgtcgccgaattcaaaattttttcttccgtatccggttacaatcgttcttgcaacgtcctcgggtgttatttcacactccttcaggacggtatccatcgctttcttgggactgtccgtacccatacctcccacaaggagactttttccgatgatttcttttccatcccgaaggagaatgcatttcgatgttgtcgatccgatatcaattcccagtgtgatcattttccacccctgacattttgtgttttctttaatgcaattccattataccaaccgttaatttttcgtcaatatccatcggcgattttgtgagcgttttaacaactggttttactttcattttgcaaggaattctttttatctaaattttccttgattttaaaggcttttgtcttgtcaagtttttatcgatattttctatagactatctatcgtttgataaatttttttcatatattgcattaatattcattgaattctataatgaaactgattagttcttaacatcagattgatggagtttgcctatggatattaataaattgaaggcctttgtggctgtgtgtaacaccggaagttataccaaagttgccaaatcattcggctatacccacgccggaatttcttacatgattaaaagcttggaagatgaggtgggcttttcccttctggagaaaaagggaaccagtcggattccaaccgccaatgcccgaaaaattcttccggaaatcctgaacgttttggattccatggaacggctggagcattccattgcattgggacgcagcagcatggcggcgggactgaacattgccgccatcgagtcggcttctatcaaatggattccgctgaccatttcccgcttctctgtggaacacccggacgtcccggtgaatgtttttaccggagacccgttccagattaacggatggcttcgggacgacgatgcggacgtgggcctgacggttcgctcctggaccgatccggattacagttggacgccgctgattcaggatcgtttctacggactccttccgaaaagcgacccgcatcagcattccgtttcggtgcaggatttcgaggacaaatatattttcatcccgaatccttacggaaaccgggatatcaccaatctgctggataagtacgacatttcctatcaggtgccgaacgataacaccatcagcatgatgtcggtaaatactaacgtggcggtgggaagagggtattcgatttccaccggtctgatgatcgattccaaccgggtggtggcagaaattccggaattgcagccgaaaatcctgccgattgagccggagacctaccgggaaatcggactttcgagaaagaaaaatgcgggccgaagcccgctggtggatgattttattcgctgtttgaaacaggtgattcaggaatacccgattaagccgattgaatcggaagcttcggattcggaagatgaaaaataaggtatatgaaaaggacttcgcagagtggctgtacagttcacgctttttgactgaaaatgcgaattcagcgtgaacgcaattcgctgcttttgcaaaattctaattttggagtgtcggattgccattgacgattcacgccagaacgctgatttccttcaaaaagcgtgaaccgttcttgtcgggttgactttcacacaggaaatatcatggcgaaaccgtgtatcacagaaacaatgttcacgctaattagcttaatttggaaaagtagcgtgaagtcgctctgaaattctaggcgtatttcattacatctgctcgataagctccaattgtcaagaaggcgcttgtgggagatacgattataatccccaaggaaaactagatgacaatgccgttgcagtggtccacttcatgctggataatctgtgcagtccagccggtgaacgctctccgctgcagcttccaatccatatcccggaactccacctcgatgtcttcatagcgggtagtcttgcggacaccggtaagggagagacatccttcttccgtctcgaatggtttctttgccgagaggattctcggattgaacatgaccatatccatgatgcccatgtttacgataatgatgttctttcggatgccaatcatgttggccgccatgcccacgcatccgtctcggtgcgcctgcagggtgtccatcaaatcccggccgattgtccaatcttctttcgttgccggctccgacttctgtcccaggaaaaagggatctttcataatttctcgtaccatctttcctcctatatttccacaatttccacttcgcatccgttttcgcgaaggagcgccaccagatcgtctccctgcagccacaccgttgccgtattctcattcgggtgaatgccgatgatgctgtctttgaattccgaatccaaatacagagtaatcggtgcctcttccacgttcagtaatcccagaggcgtcacggctcccggcgtcagatccatatattttttcaaatcttccggcgaggcaaaagaaagtggccgcagcccgtgggctttccggaagtccttgaggttgacgcgcttgtctccttttaccgtgatcagataataattctttttcttgtcgtcccggacgaagaggtttttggcgtccccctccggataaggaagatcgatggactccagttcttccatattgtacaccgccgggtgctccgtgatttcaaatgggatgttgtgatctttcagatattgataagtttcttgtttgttcatagtgagcctccttcttcacgctcctgctgctgaaggtagaacatcgccttttgagtttctatctctgctttcaattcttcttccgtcggcaggtataatttgtacttggaagcaaatagctgttcattgccgtgcataacggaatatcgggcgatatcatcatcggtatcggagcaaagtacaataccgatcgttgggttatcgccttcgctgcgcttcagttcatcatacatgcggatatacatatccatctgccctacgtcttgatgcatgatcttctctgttttcaggtcgatgaggacaaaacatttcagtatgtaattgtaaaacacgaggtcgatgtaatagtcctgcttctccgtatggatatgctgctgtcttgccacaaaagcatatccctttccaagttccatcaagaatttctgaagattggagagaatgctcttctccaggtcactctcggtaaaatctgtattctgagcaaatcctaagaactctgcaacgaccggattcttgataaatgcggcttccttctcataccaatcacgagcagctttgtctttaacttgcaataacgctctgtaatgcgaccaagaaagcaacatcccggattgtctacacgtcgtgtcgacaatttcaggaaaggttttgtaaaacttcagataatgatataaattacttctatcatatccttttccatatcgctgagtcagctctttggaaattttctttattacctctaaaccatactccgagcgttcatctccatctaattcttcttctgctattctgtaaccaattaaccagttcctctgaaccagtgcaacattgaccgcctgatgtgctgctttttgtgaggactcgatgatcccacacatatcttttaagatgtcatcagttttaacaaaactatccacaatattattctgattgattttctccgtcttgttgtccataccatcactccttggaagttcttattccaacgtaagaagaagtgccatcttaaatttcctcgttgcttttaccgaatgcagcccgcctttcgcaaagcggaagttctcaccggcttgaatcggatgttcctcgccctcgtaaccgatgaccccctcgccatccagcgcgaatatgattgcctccccgggagcggcatgttccgacagcccggttccctcgtcaaatgccatgacaacgaacttcattttatcgttgtgcaccacatccatatttacaattttgccatccgcataaggtacaagttctgccaaacgaaaaacctctccggctttaattaattcgttcataatatcatcctttcttactgctacttcggtataaacggttccttctgacgttcgcatacccatcggcgtgtctgtcagtgtcacgatgctgtccccggtttccaggtttcgggtaaaaccatcattgccatacacctccaggcttccggctgcgacaacgattatcttataataagggtaaatctcggcgctgatgtccgtgttcttcgccagcgaaaaaacggtaatataattctcgccgccatgaatttcttttgaaattgtgcatccgggaatcgataggttctctttcgctattgaaaatttccgcccataaaggctgttttgttcaatggattccatggccgtccttctttcaattacttaatccaagtctttgctctcaattatgctgcactgcctttcgcaatacgtatattgtaccacagaaaatagtaaaagcagacccacgacttcgaacttcgaaatcacggggctgcttgtctgtctgtgctgcgaacctatttcataggctagctcatttactccagctcggaatcatccaatcctacgtatgtcggcattttgctttctcgcttaaataccaccagagacttcttatcgagattataaatgatgtcctcatcagaatggtacattatgtctttggcattaccatccaacgtcaacacgtttcctttttcagtatacttgcctttctgtataaccgaatcgttcggcttatagatgcaataattaccatcgctttcaatagctatgataacatcaacgtcacccacaacggcctgatacgtacccaccggcgtatccttcggggatttcggcaacgttaacaaaacaaaattaaacgataccgatgcaatcaacaggattactaaaagccactttttcttcatgcgccctccccttaaaggttcttcatcaatgctagtcttaatcatcttagcgaattatatgttgcgtgtcaacatggacgccggcagaccggaaaaatccggggcatgttggcgtgactcgacgaagggcaaaggctttgcgggaaggtcgacgccaacatggacgttgaccggccttgaaaatccggggcgtgttggcgtgaccaggcggaagacaaaggctttgcggtgaggatagcgccaacatgcttatgcccatcaatcggtaaacaaaaataccgacctcaaaacgaacgtttgaggtcggtatttttgttttctattcggcttcttagacttcacgcgaagcttactcgcctgcgagcggctttcgcgactcctgtcgcattgctccttttctgcccagtcgtggcaatgctccatccgctgattcgcctcgttcgcggggcggcaccccggtgccgcttttcccgctccagaactatcttcgctcctgcggagctcgctagttctgactcggcttcataaccgggaagagctgtacgtcccggatggttgtagaatctgtgatgagcattaccaggcggtcaataccgattccgatgccgcctgttggaggcagaccgatttccagtgcattgacgtagtcggtgtccatcgggtgtgcttcgtcgtcgatacccaggtccagttctctctgctgctctgcaaatctctcgtactggtcgattgggtcattcagctcggagaaggcgttggacagttcccatccgttgatgtatgcctcgaaacgacgagtgattctcgggtctttcgggtctctcttggacagcggggatacgtctaccggatgtccggtgaggaataccggtccgtccagcaggcccggaaggtcctcgcaatattcttcgaacatctcggcgatgattttgccgcgcgtccagttctttacatcttcctcgttcatgccgtacttgattgctgcggcacgagcttcttcatcatcgtcgattttatcgaacggaattccggttaccttgataacggtctccgtcatatcgatcttgttccacggcggagtaacatcgaaactctttccttcgtaggtgataatcggagaaccgtttaccgccatcgcgcacttgtacacaacctgttccatcaggtccatcatatcttccaggttgccgtatgccatatacgcttccatggaggtgaattccgggctgtggttcttgtccataccttcgttccggaataccttgcccagttcgtatactctgtccagtccgccgacaatcagtctcttcagcggaagctccagggagattctcagcttcaggtcgaagtccagggcgttgtggtgggtgttgaacggacgagcgtttgcaccgccggcgatggtctgcagaaccggggtctctacttccaggaatccgtaatcctcttccaatacttcccgaacggtctttacaatcttcgcacggttgtagaaggtttcccgaacatcttcgttcatgatcaggtctacataacgctgacgatatctcagatcgatgtcctgaaggccgctccacttatccggcagcacctgcagggattttgccagaagggtcagctcctgcgtatgaacggatacctcgtcggtacgggtcttgaagacaaaaccgcgcaggcccacgatatcaccgatgtcgtaagtcttgaagatcttgtactcatcgacgccgatatcatctctcttgatatagcactgaattctgccctgcttatcctgtacatcgaagaacgccgccttgcccatgattctttttctcataatacgaccggcgatggcaacttcctcgccttccatggcttcgaagttctccttgatgtccttgctgtgtgcagttacgttgtacgtttcctgtacaaatgggtctctgcccatatcacgaagttcctgcaatttctctctgcggatttttctctgttcgctgacttcttctgcggtcagttccacggtctcgggagcattgtgattatcgttactcatgtcgtttcctttttcttttcctttctgcaatgtgctgcgcgtacaaacttcctataaaacttccaaaatctcgtattttgcggttccctccggtacggagaattccacaacgtcgccctgttttgtgccaatcaggtgctcgcctaccagggatacgttggacagctttccgttgaacggatccgcctcggtgtttcctacaatctggtatgtcatctcttcatcgtataccaggtcctttacgcgaaccgtaacaccggtctgcacggttccctcggattccaggtcatcggcatccacaacctttgcggttctcagaatttcctcgatttccttgatgcggtcttcgttctctgcctgcgcttccttcgctgcatcgtattccgagttctcggaaatatctccgtaggaaatcgcttccttcagtcttgccgcaatctccagccgcatcgggccggtgcagttctccagttccttcaccaggttatcgtaaccgaccttcgtcatttcatgcattgcattcgccatgttctagttgctcctttcatatcttcgaacattttcgcttccggtaattctcagaatcgcggaatacttcagtttaaacgtaattatatctccgatttcaatcggctctttaacatcttcaatatccagaatggtgtggtcgcccgaagccccgatgacttccatgccctctatcgtcggcaccagatccgaaatttctccgtagtcggcgcggcccacggccaccagcgcccgggttcgctcgccccggtccacataggtctgtttcttgccgaaagcatccacgcccagctgcccgattggatgagaggccttctttttgacttcaactacctgggcttccagggtaaaagcattatctctcagtgcgtccatttccgaatatccgtagcaagtcttcatgtcctccagcgatcccgccagagcggccgcgccaatgcgcagcatgttgattttctccggcatgtatccgccgaacacgcccatcaggctggatgtggctccgccggacacgatttccagctctcggccgatggatttctccacccgaatcgccaggtccgccagctcctgcattttatcttccgtagccattaccgagccgtagcagcccagattggttccgattcccgccaggtggaggtggggcagttcccgttccacggtttctgcggtttccaccagctcatcgtagttgaagtagccttccctcaggtcgcccaaatccgccatcagcaccacgttatgcaccacgccgtgagcttctgccgccttgtccagcgcccgcagggtaaccagttcactgttcaggctgcaatccgccacctgcaccagctcgtccaattccgaaagcatcggcacccgaatcatcagcaggggaacaccgatgtttccctcgcggcagcgcttcagctgctccatgcgagaggaggcaatcatctttgcgccgccggccacgtaatcttccgccaccgacagaatgccgttggcccctttgatgacgccggccacaaaaatcccggtgtcctcgcaccaatcgcaaattgtttttacattatgtctcaggctctcgtggtcgattacaatcgcgggatatcttctctctgtcatccccgtacctcctatgcccatttgttatcttcatctcggcgcaggattttgtgcgtcgtggtcttgttgaattcccgatcccgaataatcacgtgggtaatctttttgaacagcggcagtttctcgttggctttatccacctctcggttgataaattccgtcacctgctctttggagtaatccgcaccgaacttatcctcgatggcctccttgttcacccggatggtagcatatatgccgcggcgagtcgggtctgcattggtttcatcgccccacaccatgctctcgctgatgtattcgctcttctggaggtagaactccagctcctccggatacacgttcttaccgtttccggtgatgataatgctcttcttccggccggtgatgtagacatattcctgttcatcgatgtatcctaggtcaccggtgtgataccatccgtcggaatcaatggcctgtgccgttcgctccggatccttgtaatatcccatcatcaccgtcggaccgcggaagcagatctcgccgaagccgtcctcatccttatccacaatcttgcattcgctcagcgggaaaaggtatccggcggacttgttgttgatgaatttggcgttgtccgggttcagggcgataaccggggagcactccgtcaggccgtatccctgcgcgctccggaatcccaaatcgccgaagtaatccaggatgtcgccgtccaccgccgcaccgccgcagatgaccgtgcgaagctctccgccaaagagttccgtaatctgcttggtggcctgcttggaaatatccagaccgattttcttcgtcacccggttgattcggaacagggtattcagctgtttttccttgccgctcttccgaacgtttctcgtaatcttgttgtacagattttcgaagataaccggaacgcccagcagcaggttcggccgggtttcctgcatatcctttacgatatatttcagaccctggcaaatcgccatggtggttccgttgtacacgcactccaggaaggtggccgtacactcataggtgtggtgcagcggcaggatggagaagaaggtatcctctccctgacgcacttccagaagggtctgcgccagataggtgtccagcaccaagttcttctggttcagcattacgcccttggatacgtcggtggtgccggaggtaaaaagaatgaccgacaggtccgtattgactaccggggcatcgatgtattttcgatcgccgttgtgcaccgctttccggcctgtctcccgaagcttattccaggagatgtatccgtccttcggcgattcatcttcttccatggccacgttaatcacgtattccagctgagattctccgctttccttgatggctttgaatgtctcgtaatatttgttttccaccgtaatgacggcgctgagctcgcccttaacggtgagttgctttaattcctcttcgtggagttccttgtccagcggaacgatgacgcccacgccgccggttaccgccaagtatgtttcacaccactgatagctgttctttccgataacgccgattttcttctcccgcagtcccagatccagaaatgcggttcccagcgcatacacatcgtccagcacctggcggaatgtgatttcccggaaaggttcgtttcggttgaacttctgcttgaacagggcccgctccggaaagcgtgccaccgtggtctccagcatatcctttaggtccccggaatatggtgtccccggtactgcacgcgggggttggaccagttgtcaatctgttcctgaatccggtccatttccgcccgttcctgcctgcggatttccttatactcttctgccggaatggatcgaccgatcatcaaatttgtattcatagttctgttcctcaaatctctttatcttcagggtggtggtcttgatgaattcttcgtctcgaacctcaatccgctttaccctcttgtacggcggcatcttgtcgttggcgtcgtccacgatttttcgaaggacgcggtaaatctctccatcttcctgaacaccctgttcccgaagaacgctgtagttcggatagatgattgccgtgcagatcaggtcgtcctttgtatcgtcatgcttgccgtagacgatgacttcctggatccgctcatccagctgcaggtagtattccacctcttccgggaaaatattctttccgcccttggtgacgataacattcttcttccgtccggtaatgaacaggaagccgtcttcatcgaagtatccgtaatcgccggtgtacagccatccgtcccgcaaggttttcgccgtgttctccggatccttgtaatatccctgcatcaccgacggtccctttgcgataatctcgccgatgccttcctcattctcatccacgattcgaacttcggtacccggcagcggtttgcctgccgccgcggatttccggtaccgatccgagttcatggcaatgatcggggagcattccgtcattccgtatccctggaacatcgggaatcctatggcttcaaaatcatcgatcaccgccggatcgattgccgcaccgccggcaatgaacatgtagtggttcttgccgaacagcttgtgaatggtctggaacatcttccgggtcgctctcggatggttctggaacttcatcttcttggacagggcgattcctctctgaagtttggaaagagaaccgctcttctctgcctgcttccataccttccggtgcatattctcaaagatcaggggaacgcccagcataacgctgcactccgcctcggcaaagttggactgaatgtgtttcaggccttcgcagaccaccaccgtggcaccttggtaaaaactggtcatcacggtgcagctcatttcgtaagcatggtgaatcggcagtaccgacagcacccgctccccatccggaatacggaagaacttggacatgttgtacacgttctgtgccaggttccgatgggaaagcattacgcccttagctagaccggtggtgccggaggtgaacagaatcgtggacaaatcgtccgcgtttacttccgcctcctcgtactcgcagtgaccttcccggagttttcttttacccactttgaccaattcggactgaagcagaattcgggaatcctctcgatacttggaataatccttttccggagaatccgtaattaccagataccgaagggactccaccgcatccaggcacggaatcagagagtccaccatcttcggggagacgaacagcagctccacatcggcacggcgcagcaggttttcaatttctcctatctggaggctcttgtcaatcggaacgatgacgcccacacccgtcacaacggtaaaataagagagcgcccagcgatgggagttctctccggtcaccgcaatcttgctgtccttgaggcccatgccgagaagcgcggttcccagcgcccggcgctgcacgtcaaattccttataggtgatggattggaaaggatccttatgcacgtccttgtacatgtaggccgtgcggtccggatattccgccaccgtgttctcaataacttccttcagtgtctccacatacggcccttcataataaacgccgtcatacttcttgttgttcatatattgtccctctacccttcggttcgccggtgaatatctttaagcagtcaaaggacgaagcccgcagcagattccctgccaaaggcttcgttgtagcatagtattttatcaccaaaacgccgaaatgtcaatgttttaaggcctttcaaccagttcgaaccgctccttctcttcgccgtccacggtcactttactgcagaacattttcttcgggcgcgcccacagcaccttatcctcatccatggattggtagatcaccagctcctccagagtctcgctgtgctttgccacgcccagaacacggtacttctttcccttgaagtggcggtataccgcaccttcaatgacccgatcccgattctcatccacgtaatcgatatcgttgtagtcgcaccattccatcgccacttttcggaaggccgcttcccggtagtggtcccagtgaacggagacgttcagatcctgcaccgtctcccggaacaggttcagactgtcatcccgggaaatcgcctggagcagctttgcccgaagcaccggatcgtccgcatggcgggcgaaatccgtcaccatcttcttttcatccagttcataccgatccggcaggcggatgtaccgttcatcatcggtcagatcgatatcccggtttcccagaatctccccgtcgatggtcatttccagatctccggtttcggtgtcgtagtagtattctgtatccttcgccgaagtggcgattgcattgatgatttcctcaattctaatttccattcttcccactcctttgctttcattattgattccggaattgcttccttttcagacttctattgtagtctagaatccccggttattcaatacttctatggcgtcaaaccgaaaaggaaattgcttttttctactcctgcatggccgcccgaaccagttcccggaacagcggatgtgcggcattcgggcgggatttgaattccggatgatactgcacgcccacgaagaacctcaaggccggaatttccaccgcttccaccagacgaccgtccggcgatgtgcctgtcacatccattcccgccagctgaatcgcctcccgatactcgttgttgaattcgtaccggtgacggtggcgttcctgaatttcttttttcccgtatgctcgttccagaatgcttccgcttcgaatggcacaaggatatgctcccagccgcatggtgccgcccttcgggatgttgccccgctgatccggcatgaagtcgatgaccttgtgggtgctctcctcgttgaactcggcggaatccgcgtcctcatagcccagcacatcccgggcaaattccatcactgcggtctgcatgcccaggcagattcccagatacggcacatcgtgctcccgggcatatcgagccgcctgcattttaccttccacgccccggacgccgaagccgcccggcaccagaatgccgtccacatcccccagaatggtttccggatcctgttcctccagatcctccgattcgatccagcggatgtccacatgcacgccgttctcgtagcctccatgatgcagcgcctctgccacggaaaggtaagcgtcgtggagcttggtgtattttccgatcagtccgatggtcacatgaccccggcgggattcaatccgctgcagcatttcgttccattcgtgcagatccaatacccccggatccagtccaagttctcggcacacgatttcgctgaagcgggattcttccagcattaccggtgcgtagtacagctccggcacgtctttgttgcagatgacgcaatccggcttcacgttgcagaacatggcgattttctcacggatttcatcgtcgatatctccctcggcacgaagcaccagcacgtccggtgcgatgcccaggcctcgcagttcctttaccgaatgctgggtcggcttcgtcttgtactccccgctgctcgttacatgcagaagcggggtaacgtggatgaacatgctgttctcccggcccacttcgatggccacctgacggatagcctccaggaacggctggctctcgatatctcccacggtgccgccgatttccgtgatgatcacatccgcatccgtggtgcggcccaccgtgtagataaaggatttaatttcatccgtcacgtgcggaatcacctgcacggtgctgcccagatattccccgttccgctccttgttcaggatgttccagtacacttttcccgtggtgagattggaatagcgattcaaattctcatcgataaagcgctcgtaatggcccaggtccaggtccgtctccgcgccatcctccgtgacgaacacctcgccgtgctgatacggactcatggttcccggatcgatattgatgtacggatccaatttctgggaggccaccttgtacccccgggacttcagcagccgccccagcgccgccgccgtaatgcccttgcccagtccggaaataacgcctccggtcacaaaaatgtactttttcatcatgccctccctttctttccccgctccccgcgggtgcttaaaaaacttccaaaaaataaaaaagataaggtttttccgtccggagagtgatgaaaacctcaggtcccgtttcatcgccaccttctcgaaaattccttatattcgcgcaaatatatttaaaaataatatgcagttattataccaaaattcggccgtcctcgcaattgtttttcgctccgtcattttgttttttcagtaaaacaaaaggggctttcccgaagccccctatcgtattgcaaagtattccggcactaccaggttttccgtccgtctccgctgatgggaatcacgtctcccaggaaggtgggttccggttcgtacatgcacttgcccatatccttggcccgagccagcacctctcgcagatctctcatggtctgcccgcggtaggtcacatcctctgccggaatgccttctacctccaggcccaacttcgcgccggtatacagcgcccgatactcgtggtactgctgcgtcaccacaatcatgcttttcaccgcaaaaacgctcttcgcccggtaaacggattcgtaggtggagaagcccgcgtgatccaggaatatgtcctttttcttcactcccgccttcaaggcgtattccttcatggcttccacttcattgtattccacctgaccgttgtcgccgctgaacagaagtttcttcacgattccggccttgtacagctcaatcccccggtccagccggtccttcagcatcggcgacggcttccggtccacgtacaccgaagcacccagcaccagcgcacagtctgccggcttggccttcgtgtatcggctctcctccaaagtggtgaggtgcttgccgccttcctttttcacctgccggtccattcccaggacgatcagaagtcccagaatgcccaaaatcaccagaatctttattatcatcaaagctattttcctcttgctttttttctgtttaaccattttctccctttctataatcatagattgacataatatcacatcaatgtgaagaataaaagatgtttgccccaacacttcttcatgtttgacccccatggtatcggaagtccgtttgtgctatgattaggatgattttacagattgaaaaaaccgatcttgtaccggaatcggaaggagaaaaacataagtataagacattacaacgttgagacagagaaggaattttaaaggcaaaccgagctccaactaataggcattattacacttatgatttataggctgtatgggcttcgtaagtataaaaaacaaatagaaagggatgagggaattgctaaagagcttcaagacagaaataaatccgtcagaagagcagaaggtcaag

SEQ ID NO: 2432 - DNA, 14027 bp, Unknown
  16S sequences of unknown bacteria
gaaaaaggcattcattccaaccacaagctcacggtttgttgcaagctcaaggggataatcaaacagcagcacgcgataatccttcgaaagcccgtcaacatagtccatccacatttcgagggtgttcattccgccgtttagcaaaacaacggtttttgccgttttattgccgcacagcacatatctgaaccgtgccccgttcaccgttatgttttcacaggggtgctctgccgcaaagattttcagcttttcggaaaacagcataatttatatccttctttcatccgttgattttactgatgattcgtttttacacaggcgattttgtttatgttttttcgataacggctacggcacaggggattctgccgtcacataaaataaaacgggtgttttcatatcccgcgtcggcaaaaaattgcctgtatgttttaaaggtgaattcgtttttaaaatcggtgccgaccttttttacggcgcccgaaaggccgttccttttgcccttgtcggttttattcatgtaggtggggatgattagtctgccgcccgatttgcacactcggtcaagttcattcagagctgcagccgggttttcaagaagatgaatgacatttgcggcgacaactgcgtcaaaccgctcgtcggggtaggggagggttaaaatatttgacctttcaaatcgaacgtttcgtctgcccttaagtttttttcctgcccttttcagcattttttcggaaaagtcggtggcaatcagatttttgcatttcggcgccatggccgcggtgagcagacccgtgccgcaggcacattccaaaacctcatcggaacggaaaatcagcttttcgactgcggcgcacagcgccttgtttgcttttcggttaatgccgtcggcaaaaaggtcgtatgcccaggcaacgttgtcccaaaacatatcatatcggctcccttaacaaaacagaatttcggtgcttttgcaaagtcacggagaatcaaagatttttcgccttgtcggttttgcacccgactccctccaaaaatcccttttttgcgttttcctcggtgtcgtccgattcgtcgtaggcatcatagggggcgagaggatcatgaaccctctttttgaagggcgagcaaagcttgtctttgtgggcaaatgcaaattcaaaattatcggtccaaccggtgtgtccggttatgaaaagcggccgtacaccgatttttttcagcttggtttccaaaacggcaagagattttacggcaagcttgttgttttccgcaagagtagaaataaagctgtatcctccgtctgcgccgaaccacagcgtatcaccggtgaacagatatttgtcgtcaatgagatagaccatatgtccccatgtgtggccgggaacaagaaaacatttgattttaatgccgccgatacgaagggtttggccgtcctttacaagaagtatcttgttgttaacggtaacctgcggcagcttataaagacgataaattacctttctgcgaacctctcccgtaagatagcgattttcaatttcgcccacataaagcattgcttttttgaaaagcctcgggccgtcggcttcaactgcgccgacgtggtcggtgtcctgatgtgtaatgagtatatgacggattgatttcggatttatgccgagccactccattttttcttcaaggcggtcatagctgtagcctgcgtcaatcataattgcggtgtcacccttgcggtaaaagaaaatgttggctgcccattcccgcacgcaggcaacgtgctcgtcaatccaacccgtgttaagcggcttgaagatctctttgccgcgatacattttgctcatttttcttctctgaaattcggtcgctttttttgacatgacgatacctctttttttaaccgcattgttttttgctgtgagccctgcggttatcaaatgaattttgcgggcaagttgttggttagtgtatgctaacctttggcgaatttaaaagccgcccgcggcagcgttaaaggtttttctgtcggtattatatcataaagcttttgctatttcaatgacagattatagatttactcatattatgattttttggcgcttgcgcagaaacaaagagtcatgactcttcagaaatacaaatctcacatgtctgagcgcaagatatgttgcgaattgggcgattatatggtatactattctcagaggtgagattatggaacttagggtactcggatattttttggcagtagccagagaagaaaactttacacgggcggcggagcagcttcatgtcacgcagccgaccctttcccgtcaaatcgctgatttggaagccgaactcggcgtcaagctttttgtgcgcagcaatcataatattgttttgacagaggacgggatgctgctcaaacgccgagcgcaggagttagtgtccctcgccgacaagacaaagcgggattttctctacaaagaggaaaatttagagggaacggtcacgatcggcagcggtgaatttttgtcaaccgggatactgaccgactgcattgctcagttccgaaagaaatatccgcttgtccgttatgagctgtacagcggcaacgccggcaatatcaaggacagcatcgagcgaggtcttttggatatggggctgatgtcggagcccattgacatccgcaaatatgagtttgtctctatgccggtgaaagagcaatggggtgcgcttgtaaaagaggattctccgcttgccgaaagagaagcgatcacgccggcagaccttgcaggactgccgcttatctctgctgtgggcgatattgcacagagtaatctcggaaagtggttcggcccctatcttgaacaaatcgaagtcattgccaagggaaatttgctttacaatgaagctatgcttgcaggaagcaatgtcggtgccgtgctcggcatcaagctgaattgcagttataacggactgcggtttatcccgttttcaccggcgctcacagcgacaacggcacttgcatggaaaaaagagcagattttttcttcggcagcggcggcctttattgaatttgccaagaaatacataataagcatatctcacgacgatttataagtattagacatttcaacatcctatcgttataataaaggtgttccaaaaacggagcacctttattttattgcacgaaaggacgagccaaatgaccatcaaagaagctgccgagcgataccgcattcccacagaaatcttagacgaatatgaaagctggggcttttgcggtaataacgacgggaatatcggagttcggcagtacgaccaaacggacattgaacggttgagcctgattatgacgctgcatgatgtgggcttttcgggtacagaagccgagcgttatatgcggcttgccctatcggataaagatacttccaaagagcggacggaaatgcttcgaaaaaagcgcaacggaacgcttgacgaaattcacataaaacaggaacagctcgacaggctcgacttcctgcggtttgaaatcacaaaatcgaatcattgagaggagtgttcatgctgatggctttatcctatccacggccgatatggtacagatcagcgcaatggacctggagtgcggtctgattttggacgttccgaatgtgaaggaagtctatcggctgcacggcatccgatttgaacaataaaaggaggaactttccttgaaaaactgttgccgctttactcaccatttccatcccgacaaaatgaggtgagcgaatgaaaccgaaaatgatcgtcaaactgggcgcagatattctgatgacagtagctctcctgtttttgatgggctatcagttttggggcgaggcggctcacgaatgggtcggcacaggaatgttcgtgctgtttattttgcaccatattctgaacctgaattggcacaagcggatattcaaaggcaaatatacggctatgcgaaccgtgaccctgtgcgttgacattctcgtgctgcttgctatgcttgcgctcatgtacagcggcattgtgatgtcccgtcatgtgttcgcttttctgccgatcgagagcggcatggcgttcgcccgaaaactgcatattctcggtgcgtattggggatttattcttatgagcctgcatttaggtttgcattggaatatgctcctcggtatgctgagaaagcagataaaacagccggtatcacggacaagaaatacggcgctgtttcttgtctctgcggtcattgccgcttacggcgtgtatgtgtttatcagccgtaactttgctacatatctgttcctgcaaagcgaatttgtctttctcgattacagcgagccgaatctgctgttttatcttgactatctggcactgatggggctgtgtgtttttatcgcacattacgcgtccaagctgttccgcagaaaaaaggaggtcaaaaaatgaagagaatactttcaataatactgatgagcgtactgctgctcggtacacttactgcctgcggcagacagacggatccttcctccatgccgtctgcttccgaggaaacacggcaggaaagcacggacgctccatctgacagcgagagcgtgttgcccgacgaatcggaaacgaccgagccgccctccgaatctgcggagaaaaaactgaaaatgaccgtaaacgggcaggaggttctcatcacgttgtatgatacacctatcgcaaatgcgctatatgcggcgctgccgatgaaactgaatttttccgattttaacggcacagagaaaattgcatatccgaccgaggcgcttccgacagagggtgagccggacggctgtgaccccgatgtgggcgatctgtgcctttatgcgccgtggggtaatctctgcatcttctacaaggattttcgttattctcagtccctgatcaagctgggccatgtagaatccggcatggaactattgaccggtacaaatgaagatttcacggtcacgctcgaaaggatggactgatatggaatatacgaaattaggaaaaaccgatattgaagtttcaaaggtctgtgtaggctgcatgagcttcggcaaagcgggcaccatgcacgattggacgctggacgaaacagccaccgagaaagtggtgaagcacgcccttgatcttggcatcaactttttcgacaccgccaacggctattccgtcgggacgagtgaggaatatctcgggcgggcgctgaagaagaatgtcagccgtgacaaggtggtgattgcctcaaaggtatatttcaaccccggcaggctgtcccgtgaggcgatccaccgtgaaattgacggtacgctgaaaaggctcggaaccgactacctcgacctgtatattattcaccgtttcgactatgaaacgccgatcgaggaaacgatgtcgacacagaatgacttagggaaggcaggcaaggtgcgagcgttgggagcctccgccatgtacggctatcagttctacaatatgcagctttgcgccagtgacaacggctttgcccgctttgaggcgatggaaaaccactacaacctgctttaccgtgaagacgagcgggagctgatccctatctgcaagcaaatgggcgtgagcttaatgccgtacagccctcttgcggcgggacacctgacccgacctacatggaacacggataccctccgcagtaaaacggatcgtgtggctatgggtaaatatgaccgcaccgaggagcaggatatgcagatagtcacccgcgttgcggagcttgccgaaaagtacggcgtaaagatgcaggaaatagcactttcgtggcattgggcgaaaggcgtggcttcgcctatcgtgggtgcgaccaaagcgcagtatctcgacgatgccgccgctgcgctgaatgtcacgctcacagacgaggacattgcctatttggagaaaccgtatctcccgcaccgtatcatgggagcaatcgaccgcaatccgccgcagggcgtgatgctgctggaagagaaaaaataagcacagccccgatgagtttcagattcattgccgccgttcggaattttatgcagatggataagctgactgcaccgctgctgcgggaactcattgaccgcatagatgtgtacgaagtgaccgggacaggcaaaaaccgcaaacaaatgataaagatacactataagtttgtagggtgtctggaactgccgagcctttggagcagacacaactaccgagaagaaacccgcaagggcattgccgtagaatatgttccgaacgcacaatcggcataacaaaaaagagcaggacaattcctgctcatacaaagaggcacaaaaaggcaaaaagaaatcgagtgtccttaccaaacttaaggttggttaagaacactcgatatggtgcgagagacgggacttgaacccgtacgccatagacacacgcccctcaaacgtgcctgtctgccaattccagcactctcgcgactgcaagcagaattatatcaaaaagggtaccgtttgtcaatacctaattttaaaaaaatcaaactttttttcgggtgatttttatttggcagaggagagagcaattgggacgggtttatgaataaaaagccttgaaaattcgaatgaaatttgccgtattgtacaaccgaataacataaattatttccgctaaatattcgtaaaccgcgacatgtgaaaataaaaacgaaaaaaatcggcggagagcattgccaagggacgctcttcgccgaaaatttttaccgttcttctcggaaataattgagaccgagatgtgcgggaggctgattttctcttttctttctgacgcttataagaataagcaccacaatagttacgatgtaggggagcattttaataagctcttttgcactgctggaaaggccgggaatatagacgcagatgatgtaaagtccgccaaacaggaaggaacttaaaatggcggatttcggtctccaaatggcaaatatgactattgcgattgcaagccatccgcggtcgccgaagccgtcgtttgtccacgcgcctgcggtataatccataacgaagtataatcctccgagaccggctattgcaccgccgatgcaggtggaaaggtatttgtatagggtgacgtttatgcctgcggcgtcggctgtggcggggttttcacccacggcgcgtagattcagtccgactcttgtgcgattgagcacaaaggaacagatgagtgcaataataacggcaagatatgcaagaaaaccgaaggaaagaaatgtctgaccgaatataccggttttatcggcaatggggagataggctttgtatgcctttcccgtttcgatgagcgaaattgaaccgctttcgccgaaaaagttaagaagtgagccgccgaaaaagtttccgattcccacgccgaaggtggtgagcgcaagaccggtgacgttttggttggcgcggagcgaaaccgtcaaaaagctgtatataagggaaagaagaaccgaaccgagaacacaggaaaagaaggaaataaggatacaaagtatgggaacgggattttcggtcgagtgctcgtaaagataaccgccgattatgccggaaataccgccgacatacattattccgggaatgccgaggttgaggtttccgctcttttcggtgattatttcgcccgtcgagccgaagagcaggggaatgccctgaattatggcggcgttgataaatgtcataattgtggaaaacatcagccgattacctcctttgaagcttttttgcggaagttgattttatagtttataaaaaattcgcaaccgattatgaagaagaggatgattccggtaagaatgtcggaaacactttcgttaagacggaaggtcgtcgcgatttccccggcacctttttgcagaaatacaatcaggaaagaggtgattatcatgagaatgggattgaattttgcaagccacgaaaccataatggctgtaaatcccattcctccggcaaggtttttggaaacagtatgattggttcccgaaacgagcaggaagccggcaagtccgcaaaggccgcccgacaccatcatggttctgacaataacctttttaacatttatgccgatgtatcttgcggtgttttcactttctcccacaacagcgatttcatagccgtgtttgctgaatttaaggtatataaacataacgacggtgacaatcacaacaatgagaatgttgaggaaatatttctgtccgaaaaccgagggaagccagcctgcctcggtggattggttgatgacgcccatgacgttggaaccgctcggtacccacaccatgataaagaaggacacaagctgcatggcaacatagttcatcataagtgtaaaaaggctttcgtttgtgccccattttgccttgaaaacggcggggaggagaccccaaatcatgccggcggcgacacttgtgacaagcatgattattatgagaaggagaggggacatgctgtcttttatatagaacatacatgcagccgacgcaagtccgcccacgagaacctgaccttcggcgccaaggttccaaaaccgcattttaaaagcgggggtaacggcaagagaaattatgagcagcatggcgaggttttgaagcatattccaaaactttctgcttgtgccgaagctgcctttaaacatgctctgatagacgcttacgggattaagctttgtgagaagcacaataacgagcgccgaaacgataagagcggcgacaatggcgagagcgcgtataagccagcttttccaccaaactataccgtctctttttgtgatatgtataagaggctcttttactgccttttgactgttactcattgggttgggcctccttttttgtttcgtttgcaagctgatgctttgatttggtcatgagaagtccgatttgttccttggtcgcggtacgtccgtcgacaattcccgtgacgcttcctccgccgatgaccattatacggtcgcaaagctcgagaagtacatcaagatcctctcccacaaagatgacggctacgccgctttccttttgggcgttgagaagattgtatatggtataggaagaattgatgtcaagacctctgacgggataggccgccataaggacgctgggagcggcggcaatctcacgtccgacaagaaccttttggacattaccgcccgaaagacggcgaaccggcgtttgggcgctcggtgtcaccacctcaagctgttcgataatgttgtcggcaaggttttttggcgactttctcgaaagaaacatcgattttcccttgttatagcttcttagcatcatgttgtcgacaatgtccatattgccgacaagacccatgccgaggcggtcctccggaacaaaggaaaggcggacgccgagatttctgatttgaaggggagtcttgtcccttaagttttcaacctttccggttttggggtcgttatatattatttcgccggagtcaatgtgctgaagtcccgcaatggcctcgagaagctctctctgaccgctgcccgctatacctgcgataccgagaatttctccggaatttgcataaaaggaaacatcgttcaaaagaggaattccgtcgcggctcatgcagtttatgtgattgatttctatgcgcttttgaggatctttgggttcgcttctttcgatgttgaggtcgatctttttgcccaccatcatttcggtaagctcggcttcgtttgtcttgtctgtatcgaccgttccgatatattcgcccttgcggagcaccgatacgcggtcggaaatgtcaagaacctcgtgaagcttgtgtgttataatgataatggcttttccgtcgtccttcatgcggcgcaaaacggcaaaaagcttttgggtctcctgaggggtgagcacggcggtgggctcgtcgagaatgagaatattggcacctctgtaaagcacctttataatttccaccgtctgtttttcggaaaccgacatttcatatatttttttgttcgggtcaatgtcaaatccgtatttgttgcttatttcggccacacgctgagcagccttttttatgttgtatttttcctcaagtccgagcacgacgttttcggcggccgtgaaaacatctacaagcttgaaatgctgatgaatcatgccgattttatagtcgaaagcgtcttttggggacttgatgacaacctcgttgccgtcgataaaaatgtgaccctcatcggggaaatatatacccgaaatcatattcatcaaggtggttttaccgcttccgttttcgccgagaagcgacaatatttcaccgctgttcaccgacaggttgacatcgcggttggccacgacgctgccgaatcttttggttatgccgcgaagctctattgcaacattgcccataaaatctctcccttttgaaactgcatatatttttcttaactctcaaagcaatgtactcaaaaatacactcatttcaaagttaaattgttttttaaaaaagaaagtataggcggagtgatttcgctccgcctataacattttttaaaagattactcgctgataccgtcgatgtatttgatgtcgaagtagggagctgctctgtaggtcgactccttgaattcgccgtctttaacaacctcggtctcgggaacgaaatcgcctgcgtcgtcaacatcggcaagatagctggtgaggacttcgccctttacggtgaaggtgctggtgtcgaaaaccttgatttcaccggattcgagtttagccttgacctcgtcgatcttctcctgagttccgggagcggcgactttctcgttaagctcggtaagagcaacatagccctcggcaagagttccgcacttgtcggtggggatggcctcgcccttctgggtgttttcgatgatgagcttgaagtagggagcccagtcgatcttggaggaaataagtgcggtgttgggtcccatggaaatggtgcttatgttgtaagcaacgttgggaacgcctttttcttcacaagccttgggagcgccttcggagtcggcatgctggctgatgagaacgcagccgttgttgataaggttaagagcggcctctctctcgagagcgatgtcgaaccaagagttggtgtaggtgaccttcatggtggcggaggggcaaaccgaacgggcgccgagatagaaggaggtcataccggaaacaacttcagcatagttgaaggctccgacataaccgataacggcctggtctgcggtgatggagccgtcctcgatcatctgattgatcttcatacctgcggcaacgccggcaagataacggccctgataaatatcggcaaatgcattgtggaaattggcgacattctcggtgtgagcctttacgccggtagcgtggcagaactgaacgtcgggattttcctttgcggcctgaagcacaaactgctcatgaccgaaggagtctgcgaaaataacgttgcagccttcgtcaacaagctgtgcggcagcttcatagcactcgttgctctcgggaatgttggtcttgataagaacctgttcgtcggtgagaccgagctccttctgaacgctcttgagagcctgaatgaagttgttgtcgtaggtggaattttcgtcgtgcaggcagataagaccgatcttgaaatcggcgttcttcgcgtccgccttgccttcgtcgttctccttgccgccgcaggaagcgaatgccgcaaccataacaacagcgagaagcagtgcgagaatctttttcatctttttgtttcctccaatttttttattctcaaaagccgccgtcaagcaagttcaaatttgcctttaccgagttgcttgacgattgctaaagattcaagtcttattcccatattgcggatgatttttccgccctcttggaatcccttttcaatgactattcccacgccttcaaccgttccgccggcctgtttaacaaggtcgataaggccgagagcggcattgccgttggcaagaaaatcgtcgataataagcacgcggtcatcggatttgagatactccttgtccaccgtgacgtcatagtaaacgtccttggtgaaggaatagaccttagtgctgtatttgctgtcactcaaattcttgtgattgccttttttggcaaaaacaacaggcacagcaaaaaactgcgccgcggcgcaagctattcctatgcctgatgcttctattgtgagtattttattgatattctgatccttaaaaaggcggtgaaactctttaccgatttcgaaaagaagagcggtatcgatctgatgattgagaaaactgtcgaccttgagaatgtcgtctccgatgacctttccgtcctttaaaattcgctgcttcaacagttccattctctctcacccgcaaaaacataatcttttcaaagaaaaagcatacctatagtatattttaaacccaaaataaaatcaagaccacaaaatatatttgtaagataatctatcttttgtataaattttgcggtcttgattgcgttattatctaaaaatgtgacaaaatatttaacgaaggttatcgtcgtccggatggtcgggagagccgtcgtcgtcgctgaacaggttgcgtgtacgttccttgcccttggtggaaaaacttgcaagggtggggttttcatcgtcctgactgtcattatcggatgattttccgtccattttgcggttatagcgaatgagcgaatagacgcacactcccgcaatgccgagcagcacgataatgataagcggcatctctatttttttgaaaaaggaaacctttttttcacgaggttcttcatcctcctcgacttccgaagtgctttcctttttcttttttatcttgcttggggtgtcatcctcggaaacttcttcctcgtaataagtccgctgtgaaacggcagagctttcctcttcaaccgaaaccgccgagctttcttcgctgctcgaaaggtcgctttcggggagggatgagctttcgtgagacacttcggacacatgggaaacatccgaaacatgagaaaccgccgaggtatgttcggaaacggttgtttcgggcgaggaattgtccggttcggccgccgccgaaaaagctataaggaatatgattgccaaagctgccgttacggcggaaatctgtttaacaagaatgttcttgcctgttgtcaacaaaatgcacctctttcggataaatcggggtacccttaatactgcttgccccaataaagcatatgcttggcaggctttccgcagcacacgcatttgtcggaaatttcctcctgctcaaagggaatacatcttgaggtaagacctgcgtcttccttgattttttcctcacaggcaaggtcgccgcaccacatggctcttacaaaaccggggtgattgtcggcaatgtccttcatttcctccatgttatgggcgtcaaaggtcatttgctcgcggcgctttttgcccttttcaagcagaccgtcgtgaacggcttttaaaagctcgggaacctttgtttcgatttcgtcgagggacacaacggttttttcaccgttatctctgcgcacgagaacgcagcagttgttttctatgtctctcggaccgatttcgagacggaggggaacgcccttcatttcatattcggcaaatttccaaccgggggagttgtcggaaacgtcggtttttacgcggcaaatatttttaaaacgctgttcaagctgttcggccttttcggtgacgccgggcttatgagcggcaatgggaacgatgataagctgaatgggagcaacggcgggggggagcacaaggccgttgtcgtcgccgtgggtcatgataatggcaccgataatgcgggtggacattccccaggatgtttggtgaggatagcgaagcttgttttcacggtcggaaaactggattccgaaggccttggcaaagccgtcgccgaaataatggctggttccgctttgaagagccttgccgtcgtgcatcatggcctcgatggtataggtggcctcggctccggcgaatttttccttgtcggttttctggccc

SEQ ID NO: 2433 - DNA, 32759 bp, Unknown
  16S sequences of unknown bacteria
aggagtgcaaggtttgcggctacaagaaggcggcagttgagattccggctaccggaacaccgactgagccgggcaagccgactggtccggattctccgcagaccggtgacaacagcaatatgatcctctggatcgcactgctgtttatcagcggcggtgttctgacaggtgtaacggtatttgataagaggaaaaggcattccgtcaaataatcaaagataagtagcaattaacgatccatcacggaaacatcacaattacggcacagagggcataaaaaccgctgtgccgtatttctttccttgacgactgttttggagaaacaagcaatttctcgggcataacccaacaattttttgccggattccatgtatactgtgtatatcacacttatgcactcttcacttttgccccggcagcggacacacggatatcaacagataccaaatacagcgaggtaattatgaaaacaaggagaagtccctaacaatcatgtacataagcgaaacgcaacactcaagaccgtcttaacaaaacggtttttatatgcacgccctcatgcggctgtactatgccttaaagcatagcgcagtcgcttttttgtttccccgaataccgtaacaggaggtgaccgcgatgtttagccttgcagaatcaatcgacgaaactcaacacaacgcagtgccataaaaagcggcgccctgccgttttcaagcgacaaggtgaaagaatgaaaaagaatacaggaaagaaacaggtgttgaaatagcaaaggctgtctttgcgcagacacacagacacctatatttttttgacctctgcggtcaacagaattccatacgatatctgcaaaaaaccaacaataaatctgttatttcggaatttcaaattggcttggctttctgcgtttgtataaacggcagcgtactgtcaaattttgcggtaggctgtcgaagccctccgtatcaatcgtttttgacctaacaaaaaacgattgaacggaggtacataaacttgaaaaaactgaaccctaaaaaggtttttattatagccgacggcggctatcgggaaataactcccgtggagcatgaatttcggaaagaaaccgatgcaggctaccgagaaaagaaattcatcggcctgcacagcatgatcatggaggtgagtgaaaaggaatacattgaattctaccgcagcaaacggcgacagaaatatctcgacgagcagcgcagggataacggcgatgtttcgtatgacgccttgaacagtgatgaattcaatggtgaggaaattctgattgccgagctgccggatgtttgcgatacgcttgtccatcagcaattgttggacaagctgcgccaagcggtggacgctctgccggaggatgaaaaggctctgattgcccagcatttctatgacgaagttccgcagacggagcttgccgagcgctacggcgtttcacagcaggcaatcagcaagaaaatcgcaaagatccgtgcgaaactcaaaaaacttttagaaaaataaaaaacttggttgtagcccccttgctttttcggctgaaaaagtgagggggcttttttatcgcctccggtgttctttgaaaaccgaatagcacagcgcatcctttaccttccttctgctgtcgggaaaccgatgagccacacgggattttctcggacggtgcggcgcatccgcaccgaaggccatgacaggcagaagcaataatgatacttgcgtccagtcacaggccgagcgttgaagcggtacgaacaaagtaccgtaagccgtcgcagccaatgagggcgcctcgcagagatcctgggagtggtggaattccaatgaggtcaaatgcatgaccggagaatgcgttcccttgttcggggcgtcgtggacaaatacgaacagaaccaagaacgattgatacaaaacacaaggcggtcgtttgcccaaaagcactcggctgccttttacttaaaacggaggctaactatgaaagagattaaacgaggcgaaatctattccgccgacttcggtacaggcttcggcagtgagcaaggcggaattcgcccgtccttgattttacagaatgatatcggcaacaggcacagccccaccaccatcgtggcggcgatcacaggcagaaaaacaaaagcagctctgcccacccatgtgaaaatcatggcgaaagggcttaaaaccgaatccaccgtcctgctcgaacaaatcaggacgatagacaaagagaggctcggcgaatacatcggcaggctcgacagcaagacactcgccgccgttgaccgtgccattgtggtaagcttcggcattaaatatttggaggggctgctcaatggataaaagaaccgacatcaacaatgcatcattcgtttacagcgtgagtcttttacgaatgctgcttgatatgaatctgataaccgaggacgaatacgaaaaaatcgctcagatcagtgccgaacattacggtgctgatctgatttatgtctgaaatcttaattctcaggtttttgcaaaaaaccgctggaagtattcgaactattgtggtatggtgtgtcgtgccaaaaggcgaataacagcaaggtgaccccttgcggaaaggagaaagacatgaacattactgaaatcacaagcacaaagaagcagacagccgaacggcttcggttagccccgtattgccgcgtatcgagcgattcaacagaccagctccattccttcgccgcacagatccgctactacagcgactatgccaagaagcatcccgaatatacgctggtggacatctacgccgatgaaggtctgaccggcaccgagatgaaaaagcgggacgagctgaatcggctgatagccgactgcaggaaaggcaaggtcgaccgcatcatcgtcaaatcggtttcccgattggcacggaacaccgaggagctgctcgtactgctgcggatgtgcaaagagatcggcgtgagcgtgtatttcgaggaacagggcatcgacaccgaaaaactgaatatggaaatgatcgtaacattccccggtatggccgcacagcaagaaagtgtgaacatatcggggaatttgcgttggagctatcaaaagcggatgcagtccggtgacttcaattgcacctgtccggcttacggcttcgacctcaaggacggcgagctcgtaatcaacgaaacggaggcggcggtcattcgacggatattcgacctatacctccaaggatacggaacgcttgccattgcgaaaatgctgaatgaggacggcataccgcggaaacacggctacgaaaaatggctgccgagttccatcaactatgtgttgaacaatgaacgctatatgggagatgcgctcctgcaaaagagctacaccaccgaaaccctgccgtttcggaaaatgaaaaacgacggacggctgccgcaatactatgtggagaacagcaaccctgccatcgtcagccgagaaacctttcaggcggcacagaatctgctgcgctcacggaaaacggaaagatgcaaaagaaagtcctatccgctgactggaaagctgcgctgtcccgaatgcggcagagccttccgacatcaggtggtaaacggcaaggcgcattggatatgctcctgccgctcgtccggtgcgaccgaatgtcagcaccgccatgtgcgtgaggatatcgtatacgggatattcaccgatatggttatcaagctgaaaacctaccgaggcgaactgctcggtacgctgattcaccaaatggaaaccatgcaggaccgcacaagccgcaatcaggagcgtatacggcagatagataaagaaattgccgacctcggtgcgaagaaccatgtcattgcaaggctgcacacaagcggcgctatgaacgccgccgattacgccatgcagacttcggagatcggcaaccgcctcaccgagttgcgcatcgagcggcggcaaaagctcactgaggatgaggacgaccaattactcgccaccctcaaagacttaaatactatcctcgatgaatatgagccgaccgtcgagtttgacaacgggctgtttgacgaaatcgtcgagagtatcacggtggacagtagcgaacaccttaccttcaagctcatcggcggcattgcactgaccgagcaaatccccaagaaaggacggtgagaaccaaatgaaaaacagaaccctgccttacggctactgctgtaaagacggcgttatcgtcatagaaccgcaggaaagcaaagtgctgaaacagatatatgccgcctaccttgacggctcctcaatgctgaccatagccgagcagctgaacagagaaaaaatcgaatacagggacggcgttaccggttggaacaaagggcggctcaaacacctcattgataatacaaagtaccttggcacagcggtgtatccgccgatcatagaccaagcaacctatgagaaaatacagaaaacaaagcatgggcgcaacacacaaaagaatatggacaaaacacaggacatattcaagctgaccgtccccgtccgatgcccaagctgcggcgaccgaatgcgtcgccgacacgacagccgatgcaaatgccaagagcgctggacttgcgaaaacaaggattgccgtctgcgaatcgagatatccgatgccgaactgctgaccgaactcgccgaccttctcggtacggtaaccgccgacagcatcaaaaagcctgccgaaacaccctacgaaccgagtgccgaggtaatacgcctgaacaacgagatcagccgaatgcttgacgcagctgaaatagacaaggcgatgttgcgaagcaaaatgacggagtgcctccggcagaaatacaaagagcttggcaatgagtgctgcgccgtacaaaggctgaaagccgaacttggcagtacggcagacatcgccgagcggctgaaccgcgcggtcagcgaaatacgcctgtacaccgacaaaacggcagacatcatactgctgaacggacagatcctacgaaaggagtcagacaatggaacagactgttgtatccccgccgagagtggtgcggataatcgaaccgacaatatcggtcagagagagcgtgaaaacccattaccgagttctgcgggtggcggcatactgccgcgtttccactaagcaggaggaacagcttaacagttatgaaaatcaggtggaacactataccgaacgcatcaattccgaaaacggatggacgcttgaaggtatctacgccgacaagggcatctccggcacaagcgtgaaaaaccgagatgaattcaaccgtatgatccgccgctgcaagcaagggaaaatcgacatgatcatcacaaaatccattgcccggttcgcgcggaacacggtggactgcttgaagtatgtccgactgctcaatgacctcggtgtcgatgtgtacttcgaggaacagggcatccacagcaatcagcccggtgccgagttttacattaccatctatggcagcattgcgcaaagcgaatcggaaaacatcagcgccaacattaaatggggcaaggcgcaggccgcccgtgaaggcaaggtagtattcagatacaaaaacttcctcggctaccgcaagggcgaggacggacaacccgaaatcgttcccgaagaagccgaaacgatccgccttatatataaccgcttcctcgcaggcgacagcttaaaaggaattgccaaactacttgaagaaaagggcatcaaaagcccgacgggaaaagcagaatggcagttttccacgatacagtccattctctccaacgagagatacaaaggcgatgccatcatcaataagacctacatcaccgactgcatcagcaaaaaggtcagagtcaacaacggcgaacgcccgaaatactatgtagagaatagtcaccctgccatcatcgactcggctaccttcggcagagttcaggaggaactcgcaaggcgctccggcaaacgcaagatcagccgaaaagccaagaccgggcaaggcaaatactcaagcaaatacgctctgacagaactgctcgtctgcggtgaatgcaagtccgcctaccgccgatgcacatggacggcaagcggtaaaaagaaaatcgtgtggcgatgcatcaaccgcattgaatacgccaagaaatactgtcacaactcgccatccgtagaggaaagcatactgcaacgggctgtgatggcggcgatcatggaaaccaccaaccaaaatgcagaggtgctgcggacactaaagacgcatatcggcatgggcttggcgggagaaaggagcgaggataacagcatcgacctacagatacggatcgccgaaatcgacgcagaattcaaaaaaatgctcgaccgagtgtccaccgacaccatcgaagcctttgacgaggaaactgcaactcccgactcgatgacatctacacgatactcgacggcataaagaaccgcccgatggaatacgatgaccagatcgtccgccaactgcttgaatgcatagtggtggactccaaagaacagattaccgtaatattcaaaggcggtcttaaatcggtgcagccgctgaccgaatgacagcggctcacctccgcacccaactttgaaagttcaagatttttcgtaagggaacaaatactaaccccaaaaaggcgaaaaaatctattttatagtcctcccacaagaaaaaaggacttgtgaatgcaagtccttttttcgattttattcggtcatacggaacgaatgaaatatcgtcaatatttgaattagtattttcggacaaaacggatttttcttcggatgccgaacaagattttactatatcaacgtacatgcagagaacagaagctctctgagaccgatgtatattcggaaataatccgaaagcggaagaggatttttaccgcgtccgcattcgagggtgaacgccggattaccaatttcccggacgtaccaatccgtcagcccgccgtatgatgccgtatcctcggtttcgctgagtttataggaacacattttggctatggtttttccgagcgcttttgatttatccggtgcggcatcaccgccgtagaatatttcttccccctgtgaatgaaacgtcagcagcagttttattgaatcgtcaaatcgcagcagactgcacagcgcgcccgtttccggttcgctttccgggtattcaccgctgtattttccgggacccggcaggatatttctttcgcgttcaagtgttttgtattctttgaacagagcgttgtaattgtggttgaggtccactccgcgtgcgtttgactgccacgatccgaaatcactgcttcctccgttcatgataagcacgcgctctctgagaggaaagtgctcccacattccgccgatgtggagatccactccgtcgggattcagcatcggaacgatcattattcttcttgacgagaagaggtatttcatgttgagattgtacattcgactgccgttctttatgcattcgcagtattcgtttataaatcgcagcagaacaaccgagcatatccattccatggcatggtgggttccgacatataagacgcttttctgagcatggacatcaccgagcgtaactaacgggatgcttttgccgcaaagactttttccgatatttactaccgatataaaatcgtatctttcgcaaaaaatctgcagatattccatcatcatcgaatatgtcagcggggaggtataatcgagaatcgcccgttctctgttgatttcattcattatgtgttctcttcctttcggtttatattctatttttattcggattttttcgtaatatgtctgaataatttacaaatcgacgctttcttttgtttgcgcattatgctatcattaaataaataatcggttagcggggagcctgtaatgactgacaatataaacaagccggactttttttaccttaaaagttttttttgcatttttattccggcattgattgcacgctgcgtgagagtggcgtattcttatactgccactaatgttatgtccgatccaatcgtgaccgatgtgcttaactataccgctgtggcgtttacctgtatttttattgcggcggcttatacttcggtggcaacggcggtatattcctattcgccgtcgaaagggattatctctcttttgatattttccggagtttatcttgccgactgcatagcgagatttctcttagactatatcggcggagagattaattcgtaccgtataatgcttgcgtttatatcgctttcggcggaattctttaccgcggcggcacttgcgtttgtcgcatggatggtcgcttttatagaaaataagctttatttcacacatgagtcggaaaacagatattcggtaaaatcggcattgaacggcgtaatacttgttcagtttcttttgccgtttattagatggatatatcgttcggtcaaattccttatcggtgtggaattcattccgacggttgacgaggtcaactcaataattttggacggtgttgtgatcgttgtcggctacggcattcttgctttctttgtgtcaaggatcgtatatcgccttatttccaaaaacaatgcaacggaaaataaataaaaacgtaagaagctattcactttttttgagaaatgtgatataatttctatacttctgaaaaaagaatgaaagttggaactgatatgaaaagaacaagaatgttcgcttccgtttccgccgtaatcatagcggtgtcggcgctgcttacatcgtgtgcacaggctaccttcgacggggatctgagagtacgttatgattataatctcaaggaataccttaagcccggaaagtattccggattggaggtatacatcggtgatacgaacgtaagcaccgaggagatcgataacagcgtgaagagaaaccgtgttttcggctgcgattggatagacattaccgaccgaccgtgcaaggacggcgatataataggtattgcataccaaggatatcttgccggagacggtgataagaaggatcgcatgatttccgctatttctaagggatttgcaaacggtgagcctatggacgagcttgagggaagtcaaaaggtgctttcggttgttgttggaagtgatgaccttttccccggttttgacgatcaggttacaggacagtttagtgtcggcgaacgaaaaaccttgacgtacactctccccgatccgtgctggcaatacccggcatatgcgggcgagactatagagcttgatgtaatctgcacatatattcaggagattatctatcccgaagacggttccgttatgggatatgattccgaagagagctacagagcttctgccgcttcaactcttcagcgcacgagaaatgagcagatcgagagctatgttaatacaagagtgtggatccagattcacgacaacttcaaggtgaaaaagtatcccgaaaaggaactcgaggaagctaaaaattcgattcttgccggagtagaggagagtgcgcgtaaagcggaacagacgcttgaagaatatgtgaaggaaaagtactaccagacagtggatgaattcaatgctgcggtgcagaagcaggcagaagaaaaggtcaaggacgagatgatagtatattatatagcgcgtcaggaaaagatggcaattaccgattccgtgtattccgaaaaggctcttgagatagcccaggatgagggatacggtgatcttgacatgtatattgcttacagagcttacagtctcggatatctgacgaccgatgaagaggttacggatgagataagacaaaaagccgtggacaatctgaaggaaaccatacttcgcaacatggttgatgattttgtttacgagaataccgtacaggctacgaccaaaaagtgattttcagtatcaaaacctaccgtgagaatatgtgcagcagcggcggacacattcatgacgttgaaaacggttctttttgagtgaaacaagcttttcgcggcagacagagggtataatcactgcccgagaaaaaaacggaataatttcatattaagcatctgcttcggcaggtgcttttttccggaaatcagaaaatctttcttgacaacctaccgttcgatagtagtaatggtgatattagttgtaggatggaaatcgaaatgatggaatccgcaaagcatctctgtacagccatttcggaagcaagcaggaaattcttgatgcacttgttgaaacagtgacggaacagtacaacaggcattctattttttgcaatggcggattgggatgatcgggtcttcacaagggattcgggtctttacaagggataaggaagatatcgcgccggatgctgcgatacaaataatcttaggacatgtacgttatataccgcatgatccgctgatctgcaagtccctcaatatgctgaccgttgagcagtttcaatgaacgcattgcagaccaagtagaattatacggatgtcattcggtatttcaccgggttcatccgctttctaatccgtcagggtaagctgaatgatgacgatccggagatcatggcggcacagctttgttttcctgttttcatctgaaatttcttactactccatatataacaaaacagcttctgcaaatgatgtttttcatttgcagaagctgcttctttaattgatttcaaccgagatctttttgtctgttgactttgcggctgccttgataacagtcctgattgagcgggcgatgtttccgtgctttccgataaccatgcccacgtcaccctcagcaacgttcaggttaagtataatagagtctccctcgaccgtctcggtgacgctgacttcatccggattgtcaacaatcgcttttaccatatcgcaaagcagagtgttaacatctatcatctggtcacctgtttatttgctgataacgccgctctttacaagaagggcacgaacggtatcagtgggctgcgcaccgtttccgatccatttctgaattttttcggcatcaagcttgatctcaacgggctccttcattggatcgtagaagcctacttcttcgataaaacgtccgtcacggggagagcgggaatccgcaactacaacgcgatagaagggagccttttttgcgcccattcttctgagtctgatttttactgccatttttcatttctccttaaatattaaaagtattttcaaattgcatgaagcaatgttttgactgttgcttatattctgaacggaagcttcatccgtcctttcttgcctttccttccgttgcccatgaactgtttcatcattttgttcatctgctcgtactgcttgaggaggcggttaacttcttcaacggaagttccggagcctgccgcgacgcgcttcttgcgtgaagcattgagtatttccggatgctcgcgttctctgaccgtcatagacaaaataatggcctcggtacggctgagtgcgcggtcgtcgatatcggcatctttgactgcagatgacataccgggaagcatggccagtatatcttttatattgcccatattctttatctgacggaattgttcgagataatcggtgagagtaaacgaagcctcacgaagctttttctccatttcctcggcttttttttgatcgaacgactgttctgctttttcaataagcgagagcacatcgcccatgccgagtattctcgaagccattctgtcgggataaaaaggctcgatcatgtcaagcttttcgcccgttccgacaaactttatcggctttccggtaacgtatcttaccgaaagggcggcaccgccgcgtgtatcgccgtcaagcttagtgagtataacgccggtgatatccaaaagctcgttgaaggattcagccacattgactgcatcctgacctgtcatggaatcgaccacaagaagaatttctgtcggatttacggtgttctttatatccgaaagctctttcatgagcacttcatcgacgtgcaggcgtccggcggtatcgagaaataccatatcgtatccgtttttatcggcatattttacggcttccgatgcgatctttaccggggattcggttcccatttgaaataccggaattccgagagtttctccgactacctcgagctgttttatcgcggcaggtctataaatatcacaggcgacaagaaggggctttttgccttgcttcttgtacattcccgcaagttttccggaatgtgtggttttaccggagccctgaagacctaccatcatcactattgtcggcggttttgaggaaatctcgagcttagcctgggattttcccataagctcaacaagctcctcgttgactatctttattatttgctgcgacggaacaaggctttccaaaacctcggctccgacagcacgttcggtgaccttttttatgaattcgcgtacaactttaaagttaacgtctgcctcgagaagcgcaagcttaacctcacgcattccttcccggacatcggcttccgtgagctttcccttgtttctgaatttactgaatgcatttgcaagcttttcggaaagattctgaaacatggagcctcctttcagtttttggctgtatctgttataaaatccttttgccgaagctttgccgcaagatcacgaatgaccgtgcgcattgcgttttcctcaagtgaacaggctttctccatatcttcggcaaattcggttctgaattcgttgaaagcgttgatgcttttgaaaagaccgagcttttcgtcgagctccgtgagttcagcttcgcttttctttatggaatcacggacaccctgacgtgagattccagtgttttccgatatttcggaaagggaatagtcgtcgttgtagtacatatcaatgatttcgcgtttgcgatctgtcaaaagcgagccgtatatgtcgataagtgcggcgatccgcatatccttttcaaacataaatagcctccgaaagctgtaaagcataacactttacatagtatatcagatttgcgggtgcttgtcaagcgtttttataaattttccggcgctttcaagcgcatttaccgtattaaaatagcagcagtcggaagaatccgactgctttcaagacctatataagattaactgagatatttgtttttgtatttgcggtattcattattaaagccttcgtcgctcatgtctttaacgctgttcaggtagctgtgagtatcatagcttccttgctcaacttcgatcatggtgacggcgatgttagaacagtgatcagaaactctctcataattgttaagaagatccgaaagcacaaatcccatttcgattgtacattctccggtctgcagacgggatatatgacttgtcttgacttcggctaccaagcggtcgataacctgctcgagaggctcgacggacgaagccttttcaacgtcgtttgtgctgaaggaatcgtaggtgaggtcgagtatctcaattaaagcgtttgtaagattgcgaagatcttcttttgccttatccgagaacgaaagacctttttcgtgtacttcctgagcacttttaagtatgttcaccgcatgatctccgagacgttcgaaatctccgatcgtatggagcattttcgatatctgacggctgtctttgtcggagacgtcctttgacgagattttcacaagatatgttccgagcttgtcctcatacatgtcgagctcatcttcgtttttaagaatgcggtcaacctttttggcactgtacttttcaaaaaggcttatcgcgtctttgatcgtatcgcgtgcgatttccgccatttttacagtgcggtttgtacattccgaaattgcaaacgaaggagttgaaataagacgctcgtcaagaaattcgtatttctctttatgttcggaatcgcgtacaataaaggtggacattttttcaagggattttgcaaatgggaacaggatcgcggtggtggctatattgaatacgctgtggactgccgcaattccgacaggagagatggcgttgttgagaaaattaaatttgaaaatgagattaagaccggagaagagtatcaggaaaactactgttccgataaggttgaaaagaatgtggattaccgatacccgttttgcgtttttgtttacacctatacttgaaattattgcggtgacacaggtaccgatgttttgtcccattataacgggaagagccattccgaaagtgatatttcccgttagagaaagcgcctgaagaatgcccaccgatgcggcggagctctgtatgattcccgtgaaaatcgcaccgacggcgacgccgagtatcggagcaaggggaagggaatagaaacttgtaagcacggacgaaaaatcgggagaatccgcaagcggtttcattgcatcgctcatgagggtcatcccggacataagcacggcaaatccgagcattatcgtgccaacatcctgtttacgcttgtccttggacatcatgaccagtatgattcccacaagagcgaatataggagcgaaattttcaggcttaagaagatttacaagaatattgtcgctttcaattccggcaacggaaagtatccatgcggtaagcgtagttcctatgtttgagcccattatgacaccgatcgtctgtccgagcttcattatccccgaatttacaagaccgacgagcatgacggtcattgccgaagaagattggattgcaatagttattccggcgccgagagcaagagccgtgaacctgttgtcggtcgcccgtttaagtatcttttcaagcttacttcccgacattttttcaagtccggaggacataacatgcataccgtatagaaaaaacgccaatcctccgagcaaggtgataactgaaaaaacagtcattatataacctttcttacgtcaaaaaagaggagcgataaagaaaatatttaccgctcctctttctttcaccaactatattattttgaaagtcttgccttgagagcggaaagttcttcgcgcagttcgcaaggtacggtgccgccgatcatatcgtagaattctttgatattttcaacatccgcaagccaagcttcgttatctaccgagagaagctcgtttacggtgtcttcggtgatgtcgagtccttcgatgttgatgtcttttgcgtagggaacatagccgattgcggtctctcttgcgtctaccttgccctcgcagcgcgcgagaatccaaagtagaacacgcatattgtcgccgaatccgggccaaatgaagtgaccgtctgcgtcggtgcggaaccagtttacatggaagatcttcggaggattggggatgttcttgcccatctcgagccaatgaccgaagtagtcacccatgtcatatccggtaaacggacgcattgccataggatcgcggcgtactacaccgactgcaccggaggctgctgccgtagtttcggatgccatgattgatccgacaaaggttccgttctgccaacttgtagactgatataccagcggagcagtctttgcacggcgccctccgaatacgatcgcggaaatcggcacacccttcggattgttgaattcggaagagaggcaggggcagttagttgccttggcggtaaagcgggagttgggatgagcgccgcaggtgctcttgtcgttcttgttgtacatgctgatatcccacttgtttccgcgccagtcgatagcgtttgacggcggattgtcgttgagaccttcccaccaaacggtgttgttgtcgagatcgtgaacaacgttggtgaagatggtgtcacgctgagtggtagcaagtgcgttgggattggacttgctgtttgttccgggagcaactccgaagaagccgttctcggggtttacggcccaaagtcttccgtcctcgccgacgcggagccatgcaatgtcgtcacctacgcaccataccttatatcccttcttcttgtagatttccgggggaataagcatagcgaggttggtcttgccgcacgcagacgggaatgccgcactgatatacttgagctcgccttcgggagtttcaatgccgaggatgagcatatgctctgccatccagccttccttgcgcccgagataggatgcaatacggagagcgaaacacttctttccgagaagaacgtttccgccgtatccggagttgatgctccaaatggtgttgtcctccgggaagtgacagatataacggttctcttcgtcgaggtctgccttcgcgtggagtccctttataaatccggtatcatcgccgagagcgtcgagaacatcgtttccgacgcgggtcattataagcatattcaaaactacataaatagagtcggtaagctcgattccgtattttgcgaaaggagatccgactatactcatggagtagggaattacgtacatagtctttccggtcatagaacccgtgtagagcttggtgagctttgtatagcattccttgggatccatccagttgttgatgtttcctgcgtcctctttctttcgggtgcagatgaaggtgcgtccctcgacgcgagccacgtcgtttaccgcggtacgatgcaggtagcagccggggagaagcttctcgttaagctttatcatttcgccggttgagcaagcctcggcgcgaagtgcgtctgcctgttcctcgcttccgtcgatccatacgatcttggcgggattggtcatttctgccatctcgttaacccatgaaagaacgtatttgttgtttgtcatagtgccctcctatgttttgtgttgaaatcagaaaacttagaaaaccaatttttcctatgttagattatatacccgaaaaatcaacttttcaataccaaactccactgaattttctattttacagtttgttaacatattttgcgacttggatatgttaagcaattgtaaacattgccgttttggtcgaaagaagaaacaaatgtttgatttttaaattcttatctgatataatacatggggatgccccttattttatcagcaaaggagtaacatatatgaagaagccgcttacggataaagaacgcgcaattcttgaatttgtcatatccgcgacgaggcttaacggatatccgccgtcggtgagggatatatgcgcagagacagggataaaaagcacatctacggtgttttcctatataaaaaggcttgaggaaaaagggtatctcgagaaggaagacggaaagagccgttcaatacgcacgaaagccgatccggcagagcggaatagcataagagtgccgctgatcggagatgttgcggcgggactgccgattttggcatcggaggatctcagcggagaagagtatatcgattttactccttcgggtggcagtgcttcatctttcggcgggcggttatttgcccttcgtattcgcggaacaagtatgatcgaagccggaatactcgacggagatatcgtagtggttgaaagaacgccggtcgccgacgatggggatatcgtggtagcgctgatcggagacgaagcgaccgttaaaaccttttaccgcgaaaaagaccgcttcaggctgcagccggaaaaccgcaccatggagcctatttatacgaaggagctttcggttctcggcaaggtcgttgccgacatcagatattattcctgaacaatttttgctgattttgcggtttgaatattgacaaattgccgcaattattgtatgatattaatcataaataacccgcacggaaaatggagtttgtggtatgaattcaaaaagaatcttagatgcgctcaagcaaataccttttcaggtgatgtttctctgcctttcggggcttattgctatttttgtaatgattattccggattacatatcgaaggctttgatgtggttcagcgaaggcatgaccgcaaagctcggtgtcggaagtataatcgttaccgtgatcggcatagcagcttcgatggtagctatgtttgagtttatgaaaaaatccggagatgacggagcacttgttgctgctcagtcggaggcgggaaaagataagttcaacgttctttatcccattataattgttgtctgctcgcttgctctctatacattggtttgctttgccgtcggattcgactatattgcaggtgccgtaaaagctttagctcccctgcttgcaggattcagcgcaaacgatgtgttcagcgatatatcgatgaaagacaggtttatcgcttacataatagtaacggttccgcaaataccgatgatgtttatcggttatatttacggctttaagacacgcatcaaaaatatacatgcagtctgattgatttgctgaataaaccgctccgtaattggacaaaacagttacggggtgtttttttgcttactttgaggagatattccggcgcggcggtgttcggaggaataatctatactttcattgaaattttgtggcgcgggtattcgcattggagcatgaccgttttgggcggcgtgtgctttgcacttctttatttcttatatgaaaaggcgggcggtgtacatctgcttctgagatgtgcggcgggcagcgccttcattaccgcagccgaattttttaccgggtgcatagtcaatctgcggctcggatggaacgtctggagctattcgtccctgcgctataatattttcgggcaggtaagtctgcttttttccgttttatggttttttctttgcataccgggatttaaggtgtgtgcaatttaccgaaaagcggcagattttattgacaaacaaatcaagcagtgatataattaatcgtaatctcaatatcgtgggggtttaatgtcttgtatataaggcatttttctttggaacgcacgcttaaaaaagggagaacttattcatatgtacaatcatgaattttatctgaagattttcagagaatttgaagttgacgatacgccggaaacctttgaaccctgcaacataggtcacataaatactactcttatggtgcgttgtgacggtcaaatcaagtacgtccttcaaaagatcaatacttctattttcaaaaagcctgccgagctcatcgagaacatattgaatgttactgattttataaagaaaaaggtgcttgcagccgggggggacccggcaagggaagtgcttcgcctgatacccacaagggacgggaccttttatacgaccgacgcagacggatgtgtttggagaatgtattatttcatcatcggtgcgaaaacatttcagaccgccgaaactccggagctcttttataattccgcacttgctttcggaaaattccagcgtatgctttcggattttcccgctgataagcttcacgaaacgattcccaactttcataatacggtaagccgttttgcggacttcaaaaaggctctcgcagatgatgttgcgggacgcgcggacagtgtacgtgaagaagtccaatttgtacttgaccatgagggtatatgctcatacataacggacagaatagcatcaggagaatatccgcttcgcgttacgcataacgacacaaagctcaacaatgtcatgatcgatgagaaaaccttcaaggcggtctgcgttatagatttggataccgttatgcccggatcggtgctgtatgatttcggtgatagcatacgcttcggagcttccaatgcagatgaagatgaacgcgatctttcgaaagttttcatgcgtcttgatcttttcgaggattatacgcgcggctttatagcgggtcttgaaaattcgcttacggatgcagaaattctcggactcccgatgggcgccatcattataacgtttgaaacgggaattcgttttcttgcagatcatctcaacggagatacctatttcgctgttcatcgcgagaatcagaatcttgatcgcgcgcgcactcagctcaaacttgtaagcgatatggaaaagaagcttcccgagatgaatgagataataaaaaaatatttataaacattttttgtgaggtgtaattatggctattttaattacaggcggtaccggattcataggctctcataccgttgtcgagttacttaacgacggtcgtgatgtagttattctcgataacctttccaacagtaaggaatgtgttatcgacagaattgagactattaccggaaagcgtccgaagttctataatgccgatcttcttgattacgaagctgtcgaccgtgtatttaacgagaacgatattgactcggtcattcactttgcgggtctcaaggctgtcggtgaatctgttgctcagccgataagatattatcacaacaatcttaccggaacgttgatactttgcgaggttatggcaaagcacaatgtcaagctgattgtattcagttcttctgcaaccgtatacggtaagcccgaaagcgtgccgatccgtgaggattttccgctttccactacaaatccctacggagaaacgaagttggttattgagcgcattctcgcagatatctgcgtttccgatccggagtggagcgtatccatacttcgttatttcaatcctatcggtgcgcatgagagcggtttgatcggcgaagaccccaaaggaattccgaacaatcttcttccgtatatctccaaggttgccggtggtaagcttgagtgcctttccgttttcggaaacgattacaatactcccgacggtacgggtgtgcgtgattacattcacgttgttgatcttgccgacgctcatctcaaggctctcgatcaggcgcgcaaggtgaagggaatagattacttcaacatcggtaccggcaacggatattccgttcttcagatcgtttccgcatatgaaaaggctaccggcaaaaaagtaaactacaaaatctcgccccgccgtcccggcgatatcgacgagtgctacgccgatcccacaaaggcgcgtgaggttctcggatggaccgcaaagcgcggtattgatgagatgtgcatagaccttgcacgttggcaggaaaagaatcccgacggatatccggactgaaaataatttttgagaggacttcaaaatgatcattaaagaacccttcggaactctcccggacaatactccggttactgcatatacgctttccaattcctcgattctcagggcgcggatcatcgacttcggcggaaccgtcgtgaatctttgggtgaaggggaaagacggggccgaggccgatgttatatgcggatttgacgatataaacggctacctcaacgcaaagggatatcagggtgccataatcgggcgtgtatgcaaccgtatcagcaagtccaaatttactcttgacggtgttgagtacagccttttcgcaaacgacggaaagaattccgctcacggcggtgagatcggcttcaacaaacgtatgtgggatgtaaaagtgtcggataacgtcgatgagccttcgctcgagcttacctatacaagtcccgatatggaggaaaacttccccggtacccttcgggtaaaggtagtttatacgttgaaaagggaaggtgcactttccattcattatattgccgacaccgataagaacacgatcgtaaacctcacgaaccatgcttatttcaatctcgcgggatatgataagggcaccatttgcgatcaggtgatgtggatcgatgccgaccgtataaacgatcaggacttcgaactcattcccacgggcgagctcgtcgatgtagagaatactccatatgacttccgtgtcgagaagcccatcggacgtgactttgattccgaaccttctatggatcgtcagggcgggggatacgataataactatattattaacggagcggattctgttaccgtgaagaagtgcgcatcgctttatgataaggattccggaagattcatggaggtatatacgaatcagccttgtgttcagatatacacttcaaatatgattgattccgaggacctcccgtttaaaaacggagttgctcagtgcaaaaactgcgcggtctgcttcgaaactcagaaaatgcccgacagcattaatcataccggatttacagatacggttctgaagcccggtgatgtatatgactttacgactgtatacgctttttccaataagtaacagctgccgatttaaattatcatacgaaatcacacctcaacatatatttacatcagacaaatatatgttgaggtgttctttaatgaataaacggaccgattacaatgcccatgcagagaaaaggcgctgcgaagaattagcggaatatattataaaaacagaatgtacggtgcgtgaggccgcaaaaaaattttccataagcaaatccacagtacataaagatgtaaccgaaagactgaaaaatataaattcggtgtattattttcgtgtgaagagaattcttgaaaaaaacaaatcggaacgtcatatccgaggaggaatggcaacaaaacgaaagtatgatgtgataaagcatgttcgtgaacgaattacggaagattatgatatatgaagtttacaaagacttgacagcgccgcttcatatatggtatcattataaaagacgtaatcgtgaaggcggggaaaatggaaagacagtattctcaagccgagcgcagatcgaggagcaattatacaaaatgcaaattttgtataattgagggaaggagaaagccggtatgttattatgcatagatatcggaaatacaagcatttcgttcggaacttttgaagtttccccgaacggacagccgaaacttattttttcttccgaaatttcgtcatgcgagcgccgcagcacagatgaatatgcggttttgttcaaagaaatcttttctctgaaatcttcggttcaaggtgccattgatccgattgatgcggtagccatatcttctgttgtaccgacgctcaccgacagaattgcttccgcggcgcagcttttctcgggatgttcatcccgtccttatattatcggaccgggcatcagaaccgggttcaaaatagcgattgacgatccggctacattaggcgcagacatagtttcggattgtgcagcagcgcttgacttatttgaaccgccgattacaatttttgatgccggcacggtaaataccgttaccgtgattgacaaagaacgtaccgtattaggaagtattttcactcccggagtgcgtatttcggcggaaagcctctctcagaatgctgaattgatcgagtcggtggcgataggcacagatgccacaccattaattggaaaaaacacagaagaagctttgaaatccggaattatcaacggtaattcggctatgcttgacggaataatccgcaatttgcgcgagatgcttatcgataaaaacagtgatgaaaagctggcattggtttctaccggagaatatgcggaaataatactgagaaactgccgaaataagtttgcctatgatcccgcgcttaccctgcgcggaatagcatcgctttatgtccgaaacagactgtaagccgaaggcgcttctatatgactatatggaggctctccgtcggtgcagtctataaaaatgtataatttcagccaaggctgttattataaataaaattacacacgctacaccgcagacattgcgggcggcagtgtcgggttaaagtcccggaggaaattatggaaaaaattaaaacttcaaaaaaagtcctgtttttgacgcaaaccgcaatattgactgcgatcattttcctgatgagctttacgcctataggatatctcaaggtcggtttcgttgaaataacatttttggtgataccggtggctgtaggagcaattttgctcggtcctgctgtcgggacttttctcggatttatgttcggcgtatcgagctttattcaatgctttaccggcagtgtcttcggtgcggcgcttttgtcaattaatcctgtttttacggcgctgttttgcgttattccgcgtacacttatgggatttttggcatctgtaatattcagaggaatgtataaatcaacaaaaaaaggcaatatctcgtgtgcggttgcctcattgtccgcgtctgtccttaacacactcctctttatcctcttcctgattcttttcttcggaagaagcgactatattagcatgatgatgcagacaacctttaataccgacagcatacttctcttttcgcttctttttgtaggttggaacggacttatagaagcgattacatgtacagttataggattcggtataagtgcagtgcttcttaaattaatgaagacaaattctcaagcttgacttggctacaatgactataaaatttcgtcgtattatgtgcatcttgacgaaatgttaaaattaatactttagacatatcaattcctcgttttatatgatataattaatatgttaaaatcgtatttcgtactttacggaggacatacaaaatggatatgaaagacattaagatgagggttctttattcctctgataaggcaaagatgaaaacttttgcgtcggctctcggcgaagctttcaaatgccttgttgatgcggttccgcccggattcccctgcgaaaaggaacgtcttgttattatcggcatgacacttaagggcgagcccaacgataaactcagactgttctgccgtgagcttaccgctcagcgtgcgtacaacgtggctcttttcatcgacggtgaaaaggactgcaaagcgcttaaaatggttaaggaaatgcttcgtgatgcaggaaccaatctaatcgacaacgattactatgtaaacggaggcggaatcttctcgaagaagatttctcttgacgagcgccgtcagattgttaattgggctcagggaatcatagattctctctgaacgattctttgaaaattgatttgggaagagcgagacgtttcggtgtctcactcttccctttttcgttgaatgcgctgtcatagctttgggaatcgtttggcgctctctcttcaaaaaaaccgcttgtttttcaagcgtttttttgaattttatctgtttgtcttgtagatcgaatcgtagatgtccaacagagacactgaagaaaatatgctccaaagaacagtcagtattacgaaaaaagatgttatcatgggatcaatgtaaagaagaatccacggatgaaatgcccaaataatacatacggcagcggtgaaaagaacgatacagataaactttcttctgatttttgacagcgcttctctttcaatcagatcatccgatacgttatgagtatcttttttcagacagttcgggaggctgaaaaacaagatgataaaagctatgaggactgcggcgttctctgcgactgaaaacatctgtatcctcgaatacaagattccggcatttgacctccaaaaggaatcatcgggaagatattcgaatgtaacgaaatattttctctgtaaagcgaggtttatcaatgaaataacgcccgatactgcagcaaacggtatcgcccacagtgccgactttatacggcttttaagaagcaccgccgcaattataagaaatattgccgagagacaattcggaagatagtttacataattgctgtacagagaattgtatgctataaatgcacctataaggcacgccgacacatatttcatttttaccgtgatcggcaaaaacgggtcgagctttaatttttcgttgaatgctttttcgagaacatccgtcattttgcggtcttttacgacttttgtgaaataagggataaagagagagagccacacaacacccaaaacaaccccgacagcgcattcaacggtaataaaaagattgttgaagtccgcgagccgtattacattcggagctacttcgccttgatttttgaaaagctgaagctctgttgtattcggaataacggcaagtatgtctctcaggatcaggaatactattgttattatcttgattctaactccgcgttcaaccgtgacctcacgtctgacacgctctccgttcgaaggatcgcggaaattttttatcttctgctttgaatcaaaaacagcatcgccgccgaagcgcataccagcatagaaaaatccttcaaaaagctcgtttacagccggaatgaaaactatcagctccactattgaaaaagtgaaagaaagaagcagcggcattgtgtttatattaagaagcagaataaaatttgccgcggttttcagaatttcaataaatgcaagcttccaaaaggcgttttgcgctttttcatgccactcgacgatcagggatgtttttgagagcccttttattataagaaagattcctataaaatcggggaaaatatcaattattccgatgtttgggttggcaaaaaatataaatcccgcaaggataaatccgagtttcatgccgctctccgtaattttattttttcttctttttgttcggctttgtctgcgcggcggacgaagaggcttcttcacctacattgcgcttttccttcggagtgaaaattcgcttttcggcttccgaccatttgtcattaagctttgaaaggcgcgaacgctgttccggcggtacgggcatttcttcaccttctataccgatccacttgcagcatgatccgagcagtattatattgagtgcaagacagataaattcaaacaacgtgaagaactgcaccgcaatgacgctcgaaaacggcacgaaatcgtatataggcttgctgaacaacgaaacaagcgaatacagtgcataatatacaatcagcagaagcatgtttcgctttgcccggaatgctattttgtcaagccctatttcctcggtaagtgatattacggcaccgaagattatgagattgagaacgagtaccgttacggcgatcagtgctttcaaaagcatagacacgatgtccggtatcgtaaattttgccagcataacggttgcatttattccggattccaagacatacagcgatgccggaattattgcggtatagaattttttctgaaatgctccgagctttgtaaaagcgtagatcattatcaatccgccgataacatcggcgaaaaaataaaacggagaaagagtaaatgcaaaggcaagcgcatagcctcccataagaattccgaatcccatttactctttctcctgttctcttatttaccgataaacggttatattattgctctacccctccgtctgccgtgttggctccacagcagtttttatatttctttccgcttccgcagggacaggggtcgtttctgccgaccttcttttcggaacgaagcggcatcggcttcgcgggtatcggctttgcaccgggctgtcccataaatccggatcttacggggcgcgcgacttcaactcgctttacctgtgtggacttcggtaccacggaaagaatcattcttactgtatcgtcgcgaatcattgttatcatctcatcaaagagatcggcgccctgtatacggtattccgcaatgggcttacgctgagcatatgcctggagcccgacactttccatgagactgtccatggcttcgagatgatccatccactttatatcgacgtttcgaagaaggatcgcacgctccacctcgcgcatctgctcctcgccgaatacgttttgctctttgtcacggtaaagcttcattgcgcggtcaagaagcgtttcttcgatttcttttctctgggcatcggcgctttcatcgttaagctcaaaatcctcttcggtgcagatgagcccgagatacttctgcctgagactttcgatatcccacatgctcttgtcgtcaccggcaagaaacgcatttacggaatcgcttaccgtggatgatatcatgtgctctatcttatctttgaggtcttttccgtcaagcacttctttgcgctgattgtagatgatcgtgcgctgctgattcattacatcgtcatactcaaggacatttttacgcctgttgaagttttcgccttcgagatgcttctgcgcattttcgattgagtttgaaagtattttagcgtcgatcggctcgtcttccttgagtccgagacggtcgacaagtccgatgatccgctcgcttccgaaaagacgcataagatcgtcctcaagagaaaggaagaaacgcgattcaccggggtctccctgacgtccgcttcgacctctgagctgattgtcaatacggcggctttcgtgcctctcggtaccgatcacgaaaagtcctccggctttgcatacctgctcggcttcgggtttgattgaatcctggaacttcttgaacagctcacggtacacttcccttgccgcaagaacatcctcgggcacatcctgaagcgagccgactgctttgcctatgatttcctcgtcatagccctgcttgcgcatctcggctttggcaaggtgctccgcatttccgccgagaagaatatcggttccacgtcccgccatattcgttgatatggtaacggcgccgagctttcctgcctgagcgactatttcggcttcaagctcatgatgctttgcattgaggacggtgtgctttattccgcacgctttaagctttccggaaagagcttcggacttctctattgataccgtaccgacaagaacgggctgtcctttttcgtggcatttctttatctgttcgattatcgctttgtcttttccgtttttcgtcttgtaaaccacatcgggatgatccacgcgaatcatcggtttgttcgtgggaacctctacaacatcgagattgtatatctcacggaattcggtttcttccgtaagtgcagtgcccgtcattccggaaagcttggtatacattctgaaatagttctggaacgtgatcgtcgctattgtacggttttccttttggatctgtacattttcctttgcctcgatggcctgatgcagaccgtcggaataacgtcttccgggcattattcgtcccgtaaacgaatcgacgatcagcacttcatcgttctttaccacatagtctatgtcgcgcttcataataccatgtgcgcggatcgcctgatatatatggtgcgatatgtcggcgttggcgggatctgacaggttgtcgattccgaaaaaacgctccgctttttccacaccggctgcggtcagagtggtactccgcgctttttcatcaacgatataatccgcatcaatatcatcattaagttccttggagtcgagctcctttatgacaaacactttcattgttcgacaaagcttttccgcctgatcgtacaattcatccgttttttcaccttgaccggaaattatgagaggggttctcgcttcatctatgagaatagagtcaacctcatcgactattgcgaagttgtgcccgcgctgtacaagattctcacggtatgttaccatgttatcacgtaggtagtcgaatccgaattcgttatttgttccgtaggttatatcgcagttgtaagcagcctgcttctgcgcgcgagactgatcgtgtacgacaagaccggtagagagtccgaggtattcatggacacgtcccatttcttcgcagccgattcttgcaagataatcattgacggtgacaatgtgcacaccctttccggtaagcgcattgagataagaaggaagaacggcaacgagggtctttccttcacctgtcttcatctccgcaatccgtccctgatgcagaagaagtccgcatatgagctgtactttgaacggacgtttgccgagaactctgtccgctgcctcgcgtacaagggcaaatgcatccggcagaatggcatccaattctttgccgtcggcgatctcttttttgaatttgagagtcctttccgccatctcagcatccgaaagcttagcatacgttgacgcaagctgttcggtcatgttgatctgctgcatctgctttttgatctgccgttcactgtatgtgccgaaaattttgctgtaaagtcccattataatatcctttcaaaaggctgtaacttttaaatttatccgcatacaaagatgtgtacgcttcgttctgccgcgctgagtcaaactgcaaccgcgcaacagcgcgcggcggtgaagccgccgaggcctacgaagtaaggcgttgcaagtattataccatttattccgaataaatggaagagttttttgttaatatttttctacttccgatgttttgcggcgataagaagtaaattattctcaaaaagcgtggatataattgcttttcggcgccgtatggtatataatatcatagcataaaattatttttcagaacggaaaaacataaaatgagtttgaacattgtgctttttcagcccgaaattcctcagaacacgggaaatattgcccgcacatgcgccgcaaccggatgttctcttcaccttatacgtcctctcggatttaagatagatgattctaagctgaagcgcgccgggcttgattattggcatctgcttgatataacatattatgacgggcttgacgatttctttgaaaagcatcccgacgccgagatattctgcttttccaccaaatctccgagatcttataccgacattgcttaccccgacggcgcatatctgtttttcggaccggagacacggggacttccggaggatttcctgagagaaaactacgaaagatgcgtaagaattcccatgcggggcggtctcagaagcctgaatctttcgaattccgtcgcggtagctgtttacgaagttttccgtcagcggggattttcgggacttgaagccgaaagtaattatttggaatgatataataaaacgaaaggctgcgctaatgcgacagccttttcatttcaggtattggttgtaaaagaattacttgtatttgcgctttcttgctgcttcagactttttctttctctttacactcggcttttcatagcattctcttttgcgaagctcggcctggatacccgatctctgacactgacgcttaaatctgcgaagcgcgctgtcgagagtctcgccatcttttactctgatctctgccatttatatccctcccttcgctaccaaacaaatgtaccgcaaaatactgtactctcatattataattgaaaaataacgaaatgtcaataccaaatcgttatttttgcgcttttctgtataatgcttcgttgacataattcgacacagcgtgtataattattgataagcggagataagcggacttttttacggaccgcattgctacttagacatgacggagtatttatgattaagcgtatttcacttgcaatcgcagcggtgattttttcattattgctgcttccctcttctgtttttgccgcacatttttcgggcgatgataaaataaccgttgttcttgatcccgggcacggcggcagcgatcccggctcaatgggaacgcagtacgagtcatattataatttgaaggttgcctcctactgtgccgaagcgcttaaaaagaacggaaattttgacgttcgcatgacccgcagtacgcagacagaacctcttctgactcttgcacagagaggagtttatgcggacagtgtaaatgccgatcttatagtcagtatccactttaacagcagtacctcctccgcaccgaatggtatcgaagtttatacatccgtactgccgagatttgatatgaaggaactcgggaacagtatcgcttcgaagctttctttggcgacggggcttcgcaacaaaggatgcttccagcagtacgatcacggcagcactctttattattggagcgacaaatgtcagtgggatatcccgggggattcttcggtcggcggtttgtcggattatttcggaataattacatgggctgcgaaattcggctttcccggaattattatagagcacgcatatctttcaaaccccaacgatcttgcaattgtggataaagaagaaaacctgcgaaaaatgggagaagcggatgcggaagcaataataaactattacaccggacacgatcactcatatgcttccgaatataccttggattatccggtatcgtgtttctcggcgggaaagcagtccatgcactgcaccgtctgtggtcaccgtaaagatgtaaggtcggccgcatcggcacccgatcccgaaaagcatttgtggctttccgaggatgttgttcctgccacatgctattccccgggaagtgcaaactattattgcagatacactcacaatcttattgacaagggctgcacacaattcgaagaacatacaaagtatagcgtgattcctcagctttcgcacagctattcggttactttctatcaggagctgactcatactcaggacggaataactacatatatctgctctaactgcggagattcctacacggaaacggttcaagcagaaggacattcgtttgaattggtatcggagcgtgatgcaagctgcacagagagcggcggagaatttttacgatgcagcaagtgcggttatgagatattcagcgaaacgtctcccgcgctcgggcatgatcttgaaaaaatatcctcaaccgaagccgattgtgaaaatgaagggataaccgaatatgagtgtacggtctgcggtgagcatatatcggaaactgcagcgccgctcggtcatgactatgaacaaatatccgtaaaagaaacttcggacggaactgaaacggaatacaggtgcaaaaactgcggcgaggaatacacagactttacctctttgaagtgcgagcatggttttcatgaggtatcgtatattgaaagcggatgtgaaaacgaaggtcttcgcgtaatcaaatgcagcaaatgcggaaaagaggaagaagaaataattgcatctctcgggcatgattggggcgaaggtgtatccgaaaaaaaagcttcgctgttcggcttcggc

SEQ ID NO: 2434 - DNA, 18229 bp, Unknown
  16S sequences of unknown bacteria
aaaacaccgtattggagaaatccggcgcttcctgtgtcagatccagggcgcagacaagcggatcccctgccattgggagcagcacagcaatcgcttgacggaacatagcggccggatcatggggatagagggggttgtcattccagtaggcgataaagccgccccggcagagcctggggcatacggaaatcagttcattgatcataacagcgtagttcctttccagcttacagccatggacaaaacgccgcgcagttggcgcggcgtttttgttggtttacttctgatttttcagcagatcgcgaatctctgccagtagcttttcttcgttggaaggctccggtgcagcttcttcctcggcttccttctgcttttccagtcgggcccgggccatattggctgccttgacgatggcaaagacgatcagggcgacgaggataaagtcgattaccgttccaagcagggtgccaaagccgatggtgatgctctcctgcacgacttccccggcgtcattcagaacctcggggcggacgagaaggttgagtgcgctcatatcccgggcgccaaccagccagctgataagcggcatcaggacatcgttcaccaaagaggttgtgattttgccaaaagccgtggcgataattacgccgatggccatatccatgacattgccacgggagataaactctttaaattccgcgatgatctttttcatgacgcggcctcctgtcactcactctttttgatcacttccaggccgcccagatagggccgcaggacctcggggacgatgacagagccatctttgcactggttttgctcgaccagggccgggaaaatgcgggacgtcgcaaggccggagccgttgagggtatgcacaaactccggcttgccggtgctctctcggcggaagcggatattaccgcgccgcgcctgatagtcccgggcgttggagacggaggagacttccttatagccgttcatggacgggatctgaatctcaatatcataggtccgggccatggaggcggagcagtccccagcggccagctttaccgtccggaaatggaagccgaggtcacggaccagcgcttctgccttgccgaccagttcgtcaaaggcttcatcggatttttccggcagggtgtactggaacatctctattttgttgaactggtggccgcgtaccatgccgcgctcgtccgcccggtgggatccggcctcccggcggaagcagggagtataggcaaagagcttatggggcagctcggattcgggcatgatctcgccgcgatgcagggaagccagtgccgtctctgcggtgggcagcatgaaatgcatccggtcgtccgtcgggttttcaattttatagacctcgtcggcaaatttcggaaattgcccggcggtctcgccgcaggtatactccagcatatgggggagcatgaccatttcatagccatcggccagatggcggtcgataaaataattcagcagggcccattccagccgcgcacccagaccgcgatagatccagaagccggaaccggccaggcgagtcccccgttcgtagtcaatcaggccgaggctcgtgcagaggtcaacatgatgctgcggggggaagtcgaagctatggggctggccgtaatagcgcagcggctcgttattctccttgccgcccggggcaaggtccgggtccggaaggttcggcaggctcagcattagggtccggtattcggcctctacggcggtcaattgcttgtcattttcggcaatttctgctttcagctggcccattttctggaaaatcggcgcgacatcctcgcccgcctttttccgttgcgggatctcgcggctgactttgttttgctctgcctttttgttctccgtcgaggcgattagtgcccggcgcagggtatctagctccaaaatgcggtcgatggattcatcgcagtcgacctgtttggcatgaaacccggctttgacagcggcggggtcttctttgatccgtttgatatctaacatcgtctattcctccgtttaagcagccagctgggcgtaaagcgccgcggcgctgtcctgcagataggactgcagcggctccagctgcgccaatgcggcgctgcaggctgcggtatcaccattgcttttggcatccattgcttgcagcagcaattcataggcctttgcggtattgtctgcgctttcctgggcggaggcggcagtctccgcatccgctttggcgctggccagttgatcctccagctctgcgacccgatcccgcagctttgcgttttcgtcggacaggtcacggttgctgtcttgcagctgctctgcattttgcaacgcggaggcgctggtctggttcagggctgtgatcgtattttgcgaggcgcgcatggagatgaccagcgagactgtcacgaccagaaaggccacggcaaagaggatggtcatatagcgcagcaatgcgttgcgagacttcggcgtcatcatctgcggcttttccgcttccggctgggccggggcctgctcgaccggcgtttcgtttggtgtactcattcggatgttcctccttcagcgggaatggcggagaggagctccagcagccgctgcaggtcctcctgtccgtaaaattccaattcaaatcggcccttccgcttgccgttgatgatttttacgccccggcccagttggcgggagagagcggcttcgcattcggcgatataatcgacctccaatggggcagctgcctccggctccgccttcggggcggcctcatgggacatttgtttacataatctttctgcctgccgtacggacaggtctagtgcggtgattttctgcgctgcgattgcctgcaggtgcgcatcttgcagctgcagcagcgcccgggcatgcccggcgcttaacgcgccgcttgctagcacatcgagaatttcttccggcagctgcaaaagccgcagcgcattggcaatggcagggcggcttttgccgacctgttgggccacctgctcctgggtcagcgcgtaatcctgcatcaggctttgatagcccaaggcttcttccaccgggttcaggtcctgtcgctggagattttcaatcagcgccagctccatagctttctgatcgtccgcctcaaggatgactgccgggacctcttccagcccggccagacggcaggcgcgccaacggcgctccccggcgatgatctgataatacccattgggcagccgccgcagcgccagcggctggattagcccattggcggtgatggaatccgccagggcctgcagctccagctcgtcaaactgtttgcggggctgcagcgggtttggttcgattttatagatggaaatacgggcgggatctgctgcattctcttccatttgcagggctgtatcgcccagaagagcgccaagaccccggcccaggcccttttttgtgctcataggccgctcctttttgcgttgatttccagggcaaggcgctggtaagcgtccgcgccccggctggacctatcgtaggcggtgacgggaagcccgtggctcggggcctccgctaggcgtacattacggggaatcaccgtggcaaagacattaccggggaagtgccgccgcacttcctgggcgacctgcatggagaaatttgtgcgcccatcaaacatcgttaacaggacgccgaatatttgcagcgtcggattcaggttacgcttcaccccgcgcatcgtcgccatcaggtcagacaggccttccaaggcgtagtattcgcattggaccgggatgaggatgctctgcgcggcgcagagactgttcagcgtcagcagctccagggagggcgggcagtcgataaaaagaaaatcatagcgcgcagccaggggctgcagggcctcttttaagacataagaacgattttccagctccgccagttccacacccgcgccggccaaagcactgccggagggcagcacgtcgccatagcgggtatgtacgacagtggacgcggcatcccggccgttgataatgacatcgtagatattggcggggcattttcccttgtggatgcccatgcccgaggttgcgttggcctgcgggtcaaagtcacagagcagcacgcgcttgcccagggcggtcagtgcggcggtaatattgacggcggtggttgtttttcccacgccgcctttttgattgacgatcgcaatgatttggcccatagatgaatccttcctgtcgcgcgtgtttcttttggcttgccaatgctgttattatatcatattttaatatgaatgcaaccaataatcttttggaagcttcccccaagaaagaaaaatcaagggcaatgtttcacgtgaaacattgcccttggtatgatttaagcaggatagtcacgctgcagtgcgcagacacgccctagaatctgcgcctcatcggcaaaaattggctgataggccgggttttcgggcatgagccaggcatgcccgtcctgccgggcaaagcgcttgaccgtggcttcctccccaagcagcgcgacgacaatctccccgggggatgcggtaggctgcggcttcacgacgacgaggtcgccgtctaaaatccccgcttgaatcatggaatcgcccttgacacgcagcgcaaagcagctctcgctgccctgccaggggatatagccggcaatgttctcaaacgcgaggattggcacgcctgccgtaacggtccccagaatggggatctgccccggctttccgccgggaacggtaatgacgcgttttttaaattctgggaaggcaatcaaaccctcccgctgcatcgcggtcaggtggtagtggactgtggcggtcgacttcaggccgacggccgcgccaatctcccgaatgctgggggagtacccgtgctctgcgatgaatgaggtcaagtagtcgtaaatttcttgcttttttgtgcttgtacgcggcataaagctcactccttggcaatcaaagctgtgcgctggctttgacttttctagcaatagtatagcacaaattttcgagaatgtaaatacacacgcttaaatttttaaattgcccggggaaaaatccgggatatacgcctcgccgacggcggaggcgtcctgggtgaagccgtcctgaatcccgcagagcgtcatccaactgacagcggcgtcgtattccaggtcggtcacgcgccggtctaggggcggcaggttggcggtcgcagcagttggtgtatactggcgcatcagcgaaaatagaacctgccccggtgtgaagtgcgcccccacccagctaatcacatcgagcgtattatccagcgcgccgggcagcagcaggtggcggatcaaaacgccagagaccagggcgccgtcctcgatttggaacgggccagtttgccggtacatctctgcaatggcggctgcggcgatttcgggataatccgccgcgcggctcagccgttgggctagggtggcatcagcgtatttgtaatctggcagatagacgtccaccaggccctctaattgccgcagcgtctcaacggactcgtaaccgccgcagttgtagacgaccggcacgggcagcttgggcgataaggcgggaaggatcgtcggcagaaaatgcgtcggtgtgacaagattgatattttgcacgccgtcgtcgatcaggcgcaggaaaatatctcgcagctgctgcgatgtcagcgcttcgccctgcccgccgtgactgatgggctcgttttggcaaaagacacaccccagggtgcagccggagaaaaagaccgcgccgctgccgaaattgccggagatcaccggctcctcccaatagtgggacgcggcgcgagcggcatagagcgtggcgggcatatggcaaaagccaagctggcccgcggtccggtcgacgttgcagcggcgggggcagagttggcaagctttgtaatccagcattcctgtgcacctccaatctattacattatctcagtataccgcggggagacaattctgacaagtccttctttacaggcggcgggggatacattataatataaagacaatacgccccacgcgcggcaatacacggcggtggcgaaacgaaaatgtttcacgtgaaacaggaaaaatgagggacggccatgctgcagctgcaagaaatatacgagacggaaatcacaggctataccagcgatggccgcggcgttgcccgcattgacggctgcgtcgtctttgtgcccaataccatcgtcggagagcactgccgcgtccgggttttgcatatcggcaagcacggtgcgatggggaagatcgagtcaatccaggaaaagtcgccccaccgaatcccccgggcttgccccaacgccaagctctgcggcggctgctgcttctggcatatggattacgcggaggaatgtcgcctgaaggcgcaacgggtgcgggatgcactgcggcgcatcggcggctacgatccgggcgaggtccggcggcgggacggcgtggcattaccgcaacaaggcccaatacccggtggccaagctgcggggacgcgcagaggctggattttttcgcgcgggaacgcatcaggtcatccccgttgagacctgcctgatccagcacccggcggcggaccaggcaaaggcggcggtgctggcctatatgcgccgctgccaggtgccgccgtatgacgaagcgacgtgcacgggactggtgcggcatatttatgtgcggcgtggttgggtcagcgggcaggtcttagtggggatcgtcgccaatgggacggcgctgccccaggaaaaaacgctggtcgcgcttctgcagcagcaggtcgagggcctgtgcggtgtggtcctatgcgtcaatacgcggccgggtaacgcaatcctaggccgggaatttcggacaatctggggcgcagacgcactggaggatacgctgtgcggcctgcaatttcgaatctcgccccgctccttctaccaggtcaatcatgaccaggcggagcgcctctatgaaaaggcgctgcagctcgccgcgctggacaagacgcagacggtactggacctctattgcggcactgggaccatcacctgcattatggcccgcagtgccgggcgtgccattggtgtggaggtgatccccgaagcggtggaggacgcgaagcaaaacgcggctcgcaatggcttggaaaatgtcacatttttgtgcgctgacgccgggcaggccgcgcagcagctggcagagcgcggtaccgcgccagatgtgattgttgtggacccgccccggaaggggctggatgagacggcggtccaggcggccgttgctatgcagccccggcgtatcgtctacgtctcctgcgaccctgcgaccctggcccgagatatcaagcgcttcgcccctttggggtatgtccccgcccacgtagaagcggtggacctattccccagaacggcgcatgtggagacggtggcattgctggtaaaacaggaggcactgtaaagatgagaaaagggaatgtaagaatggaattagagacaaaacggctgcagctccggccgtggctggcggaggacgcgagttggctgtatgaatatgcgagggacccggcggtggggcccgcggcgggttggccagcgcatcgggatatcgaagagagccgcgccctgatttgtacggtgctgaatggcccggcgtgctacgccatctgcgaaaaggtatgcggccatcccatcggcgccatcgagctcaagctgtcggagaagacggagctgacggaccgggcggcggaatgcgagctgggctactggctgggcagaccattctggggccggggctatgtgcccgaggcggcccgggtgcttttgcagtacggctttacggagcttgggatgggggccgtttggtgcgggtattatgtcggcaatgaaaagtcgaaacgggtgcaggagaagctggggtttgtgccgcatcatctgcgccgggcggcgccggtcccgctgctgggggagacaagagatgagcagatcaatgtcttgaccaaagcccgctgggcggcgctttgcgcagaataagcaaaagcagagccacggctgcagagaaatctgcagccgtggcgttacttgtttccttttagatttcagtgtggggcgtgcattgccgcaattgccggtaggtgcggatgagaaggacgatcgcgattagaaaggtcaaaatatccgacagcggcatggagtagagcacgccgtccaggccaaagaagcacggcagcagcagtgccagaccgacgccgaagacgacctcccgcatcatggagagcatcgtcgaggcggcggcttttcccatggattgcaggaagataaacgtcgccttattgacacaggccaggacgatcatgcagagataggtccggaatgcgtggatcgcaaaatctgtgtaataagtgctttcgttggcagcgccgaagatagcaatgagctgccgcgggagaaattctacaaaaacgaacccgaccgcaccgacggcggtttctgcaaggagcagctttgtcagcagctgccggacccgctgcggctgctgggcccccatattatacccgacaacgggaatgcatccggcggccatgccgacaacaacagagatcacgatttggaagaacttcatgacgatgccaaccacggccatcggaatctgcgcgtagcgcacctggccgaaagtagcatcctgcgcaccgtatttgcgcagcatattattgatggcagccattgccgcgacaagggagatttgggaaagaaagctggtcatacccagcaccagcgttcggcgtaggatcgcaccattggggtggaaatctgcacgctgcggtcgaattagtttcatacgaagcaggtaccagacggccaagcctgcggttagtacctgcccaagaacggttgcaacagccgcccccatcatgccccagcgaaagaggaaaatgaagatcggatccagaatcaaattaacgacggcgcctgcaagcgttgagatcatggcaaatttggggctcccgtcagcacggatgatcggattcattgcctgaccaaacatataaaaaggaatgccaagggtgatatagaagaaatattcctggctatattgaaatgtctctgcgttgactgtgccgccaaacattgtgagaatcggatcaacaaggcaaagataaaggattgtcaacaagaggctgacaagaatgactgttaccacagcgttcccaacgctcttttttgcgtcagcggcttgatcttgccctaaactgatgctgacaaaggcacaacagccgtcgccgatcataaccgctaaggccaaggcaatgacggtcatcgggaatacaacggtgttggccgcattgccataggaaccgagataagcggcgttggcaataaatatctgatcgacaatgttataaagcgcgccgactaaaagtgaaataatgcaggggacggcataccggcgcatcagcttgcccaccggtgcggtccccaacgggagtgcgttctgattcataaaatttcggcctttctgcataaaaatagacgtgtggcatcttgcgcaactggaattacgcaaaatgccacacgttgttgcctttattttagctgccctttgcagaaaaagcaaatgttgattttgcataaaaatcaacagagtgatgaaataaaaatattgcagactgctgtatgctgccaaagcttttgctgatatgccgcctgatcgcagtgccattgggcccgattcatgtccacattgccgttgggcaggaaggggacctgctcgcgcgccagcagagcggcttgctccggccagcccggtgctgtcgttgtcaatctccctatgggctggatacccggtgcgagcgtttacagggctatgcgcattggtatgatctcgatctgcctgagacgattgccgtgcggaaaaagctcctgccgggggacggcgcggtctcgcagattgtaatgtcggccatggacaattggggcggcaaaattacgcagcacggtgctcctgcattggttatcatcgaggggctgacgatgtacttatcggaagcggagatcaagcgcatcttcaccatgcgctccaagcggtttgcgcgggtacacgtattggtgaggtgatgaaacccatggccgtaaaacgattccaggaaaagtcaatcgagggaagccgggcaaaatttacgtggggcatcaaaggtggcgcagcccttgcagcgttgctgccggacttccggttcgtgggggcgcacagcctgaccgatggcatggcggctttcctgccggtctatcggctgctgggcaagctcccgcttgtccggtcgatctccaataaaatcattgtgctggaaaaagggtaatagatcctgtggaaagatgccgccgtaattccattcaaattacggcggcatctttggtgcgggcatggggactcgaaccccaacgcattgctgcacgagaacctaaatctcgcatgtctaccaattccatcatgcccgcatggcgtttggaagggaaatgatgcagcaattttttttattctatcatgccagcggggaatggtcaatggaatttgcaggatttgtggcagattgcacaatttccaggcagtgcgtttttgctttctaacattattgcttgacagttcttaaaaatcacagtacaataaattttggattggtatggccagcagaaagatctggggtagattctgtcggcttgacttattctcaacatacccaaattttgaaaaaaggaggtgtgcgcaggtttatgcaatggtactttattgtcctgcccctggcagggtttattcttggtgctattatctttttcctcgccggaatccgctaccgcaaaaaggttgcggagaaggagatcggcagcgcagaggatgaggccagacggctcgtgaacgatgccatcaaggccggtgaaaacaaaaagcgcgaaatgctggttgaagcgaaagaggaaatccataaatctcgtaccgaaagcgaaaaggaaaacaaggagcgccgggcggagctgcaaaagcaggagcgtcggctgcagcagaaagaggaatccctggataagaaaatggattcctttgagcggaaggaagaggatctgcggaaaaagcagcagcagatcgccgccacccaggaggaggttaatcttattaagaagagccagctggaaatgctggagaagctgtccggcctgagtcaggaggaagcgaaaaattatctgctgcagaacattgaatctgaagtgcgccacgagtcggccatgaagatcaaggagatcgaggcgcagtacaaagaggatgcggacaagctggcaagagagatcatctccatcgccatccagcgctgtgcggcggatcataccgccgaggcaacggtctctgtcgtgccgctgcccaatgatgaaatgaaaggccgcatcatcggccgcgaaggccggaatatccgcaccctggagacgatcaccggtgtcgatctgatcatcgacgatacaccagaggccatcaccgtctcctccttcgacccggttcgccgcgagattgcccgcctggcgctggaaaagctcatcacagacggacgaatccaccccacgcggattgaagacatggtcgaaaaggcgcgccgcgaggtcgatcgcgtcatcaagcaggagggagagcgggccaccttcgagacgggcatccacaatctgcatcccgagctcatcaagctcttggggcggcagaagtaccgcacgtcttacggccagaatgttctcaaccactccatcgaggtcgcgcatattgcgggcttgcttgccagtgagctgggcgtagatgtccagttggcaaagcgcgccggcctgctgcatgacctaggcaaatctgtcgaccacgagatggaaggcagccacgtccagttgggtgtggagctggcccggaaatacaaggaaagcccggctgtgatccacgccatcgaggcgcatcacggcgacgtggagccgcggaccatcgttgcctgcctggtgcaggcggccgacgccatctccgcgtctcgccccggtgcaagacgcgagaatgtggagaactacatccgccgtctggaaaagctggagacgctcaccggctcttaccccggcgtcgaaaaggcgtatgccatccaggcgggccgcgaagtccggatcatggtcaagcccgaggaggtctcggaggacaatatgatcctgcttgccagagacctggcgaagaagatcgagtccgagctggaatatcccggccagatcaaggtcaacgtgatccgcgagacaaaagccgtggaatacgcaaaataattgttagccaagaggacacgatgctgcggttgcaccagataaaaaacattgtagaagtcagtaaaatcaaatgtttttcatggtgcaaacacggtgcgaagtcgagacgatcaaatactgacaggttcaaagggcgttgatatgcaaatatcagcgctcttttcctatacgcacaagccatagggattgaaaacctatggcgtttttatacccattttgaagaaggctggcaatgaaattgtcagatgtagatttattcccatctatatgctatatttttactgagcatacaacaaataaatcttgactggagggattgcgatgaaaaaatatatacgattgtcaatcggcatgattatgtgtattcttctctctgcttgcgggtcatcggcgaaagccgaccctattgttttacccgcaacagaggatataatctccatttctgtttccgacgataacgcaacggcaacttgcacggacagagaacagataggagaaatcatgtctattctggtggatatggagtcaacttcaaaaccaagcgtaaatgattctcctaatgttgatgaatatgtaaagattgattttaattgttctgatgatactgtaacagtgatatttttctacgaggacagcggaacacaatatgtagagcagccatatcagggaatatacattccggcacctgcgctgaatataatgatttccaatttgttgagcgaagctgacagctaacatttcatgcatcggataggacaagttgaaaccaaacacccacaaggacagccgaagaaatcgactgtcctttttctatgccgacaggaaaaaatgaaagaaacggcatagccgaagcgataccgcttctctcgtgctttaaaatgttttcttaactgggcaccctgtgcggcagcgtgtcttttttaccttatgggggtcctagtgttacagggtgctacaggatctctcggggcagcgggcgggagcataggacatcgagattcccgttgcggcagcggatcgtatcgggaaacgccttgggtgggatatcattcgggaggacgatctcgtattccagcgaaaaaagcgtgcccatattggccgttttgacgcggtttaggcgccaggcgcgggtgtactgcgcgaagagatcgtcaaaaaggccatcgcaatccagattctctggaatggtgatcttccgcgtccggactgcggcgcggtcctggccaaagcccagggcggtgaacagcagtaaaaagctggtcagcagcaggcaggccaggacggcgatgccgagatagcccatgccggtggcaaggccgagggccatggcgagaaacagcacggcgatctcccgcgctgtgcccgggatcgagcggaaacggacaaggctgaacgccccggctccggcgacgcccgcgcctaggttaccgttgaccagcatgatgacgagctgcaccaccgcgggcagaactgccagcgtaaggccaaagctctggctcgtccgggcgcggaagctgctggccagtgccagaacgacgcccagcgccagggagacgccggtacagatcaaaaaggtgggcggggtcaggctctggcccaagatagaatcaaacacagcgcagcgccccctttgcaagcttctgtcggtagcaggcgccatatttggaaaacgaggcggggaaaatgccctgcgccgagagcagatggctcagccagagcgggcaggtaccggggagcttgatctccagcagaacatcgtccggcggcagcagaggtgcgccgtgatcgcctaggcgtaggtccagctctgtctgccgccagcggaggttcgtatcaaaggtgacccgcaggccggtatcctgcgcgccggagaaggcctggcggtcataggcaagaaagacccggggctgcgcccggtagcgggcctgaaattgggcgatctccgcgccgatctgccccgccgcacggaccggaaggtcctgcgccagcagcccgacagcatcctggaccgcggcagtgatccggtgcttatagacgataccggcatattttttcttgatttccagaaaaaactcggttcccatcaccggggacgccatagctgcggacccggagcttttccttatagaccggcttttccagacaggtccggatcagctgccaatcggcggtgtcataataaagattgcagagggtgtaactgctgtagcggtctggcgtgagatagggccgcatctgctgcagcaacgtctgctgctggtcggcacgcagccggtattttttttcatagcgggcaaagcttgtttgaatttgctctttcatagggcgtacctccttctgcgtgtatcctagccgatgaaatgaaaggcaacctaaaggcgggcctttagctaagctttaggttgcgctgctatgctttgcccagaaaccgcaaccaaagtgccgcggtccgaccgagagcatgggccgcgcgagtgaataaggaggtcctttcgaatgaaaaaatggaagaaatggaagaaatggaagaaatggacggcgctgctctgcgccggggcgatgctcgtctccctgaccgcctgcggcacgcagccagcgggctctgattctatggcagcttatgccgggcagagcgtaacggggcagatcaccgtcctggatggtacatccgtcacactacagataggggagctgagccggtccgatgatatgcagccctcggacgcgacgccgccggaaaagccggagagtgacgccagcggtgatacggcagcggaagatgccgggacgcagccgtccgatgcgacgctgctggaaaagccggaaggcgatgccaccggtgaaacgacagagcagaccaccggggcgcagccgtctgacgtgacgctgcccgataaaccggaaggtgacgacagcgcggccatggacggcagtgccctgccggacggccagacgccaccggatgccctgccgggtgggcaaacatttactgcggacacccagacgctgacgggggatatctccgtcgacgcgatttcctcgctgcaaggctccggcagtgcatcggcgcagttagaggcccagatcggcgcgctgcagggcggcatgatgccaggtggcccggcaggcgggccgggcgcagacggcgaacgtctcgacacacagccccccggcgggcaaggcggcgcgcctgccgcacctgcggatggtgcaccgggcgtcacaagtacttaaacttcccagcaaaagcgctgcgctttgccggccttggccggcggcgcagtgcttttttcgctttcctgccatggacagttgcatttgccagatggatatgctacactgtatcttgcactactttaggggagagaaaaaatggacgaacaacagaaaaagagaagtacattttccggcaagctcggttttgtattggcggcagcgggcgcatcggtcgggctgggcaatatatggcgattcccgtatctcgcggcaaagtatggcggcgggatctttttgctcgtttatattatcctggcgctgacctttggcttttccatgatcgtcgctgagacggccttgggccgtatgacaggcaagagccccgtcggcgcatttgccgcctttggaaagacaaaatggcgctcctgcggcgggtggatcaatgcgatcatcccgattttgattgtcccgtattattccgtcatcggcggttgggttatcaagtatctggtcggctatctcagtgggcacggcgcgcagctggcggcggacggctattttacctcgtttatctcgagcggcgtctccacggaggtctgctttgtgatttttgccctgtttacgctggggatcatctttgcgggtgtccgcaacggcatcgagcgggtctccaaaatcatgatgccgatcctggtgatcttatcgctggtaatcaccgtttattccgtgacgcggcccggcgcgtgggaaggtgtcaaatacttcttggtgccgaattttaaggatttctcctggatgactgtcgtcaccgccatggggcaggtgttctactctctgtccattgccatggggatcctgatcaccttcggctcttatatgaagaaggatgtttcgattgaaaagtccacccgtaatgtggagatcttcgatacggccatcgcgatcctggcgggcctgatgattatccccgcagtctttgccttctccggtggcagtgcagagaatctgcaggcgggcccatctttgatgtttatcacgcttccgaaggtctttgccagcatggggctggggacggcggctgggattcttttcttcgtccttgtgctgtttgccgcggtgaccagctccatcgccctgaccgagagcgccgtctcgacgttcgaggaccagttcggctggagcagaaagaaagcaacgctgatcgtcggtatgataatgattgcactgggaaccttgtcctccctggggtatggcccgttggccggtgtgaagttgattgggatgcagtttttggatttctttgatttcctgacaaactctgtcatgatgcccatcgcagccatcgcgacttgtctgctggtctcccgggtcatcggagtcggcaaaatcgagcaggaggtcctgatcggggagacggcattccgccggaagaagatcttcaattttatgatccgcttcctgtgccccatttttgctgttatcatcctgctgagctccatcgccaacgcctttggctggatttcgatgtaatgcttgaggcaatttgaaaagtgccctcgccacgcctgatttcaggcgagacgagggcgctttttagatgcacgcggcaagctgccgccggaacagcgcccgaaagagcagccggaccaaagggcagatgaagaagacctgcaagcagatttctgggcaaggtgtgtgatgcagcagaagatcagcaggaagaccagtaggtactcggcccacatttcccggatcgccagcagaaatacgggcccggacaatccgcccagcttccgcgcgatggcgtagatggtcatgcaatgtacagacgcggatagccttcatagcggtcggtgtatttttctttcatgcagcacgccggagcagtccttgacgtacttctacacgcgcgcatagtaatcatcgtagtaatttgcgggaacagaatagccggaacgggcaagacctatgactgctcattcgccgccaatggaaccgacctccggtgccttgacagcggacaccatataagcggcgctgccttgtacttcattctggacgctggatgccgccaacgcgggaacggtcagcgtcaacaggatcgcgagggtcagaatccatgcggagattcgtttgattcttctcatttgtattttcccctataaatgcggcaatcagggctgcccccaaatgggggcagccctgtgctgcaaagtgattattttgtggtcttcgccacgttttccacgaagcggtggagaatggctgcaacctgtgcgcgggtggcgtctccggtcggcatgagcttaccggcgctgccgtagaccagttcttcggcaacagcccattccagcgaagccgcggcatagccggacacgcttgcgtggtctgtaaagccgttcaggctggagcttgcggcggtatcgtacttcttgtactgcgcatagcggtacagaattgccgtcatctgctcacgggtgacgtttgcgttcgggctgaacgtggaagccgaagtgccgtagacgatgccgttgtcggctgcccacgtcacagcatcctcgtagtagctgccggacgtcacatcggagaagccgcttctgccgctcaccgaaggcttgccctccagacggtagaggactgcgacgagcatggcgcgggtcatggatgtgttcggagagaacgtt

SEQ ID NO: 2435 - DNA, 4057 bp, Unknown
  16S sequences of unknown bacteria
tgtctattttggcgcgttcatggtataatgtgactgcgaaatgggtggtgtaagtgatggaaattacgatttgcaatcaaagcggagaagagcggtgggacgagtgccgcgcggattttgaagccgtgctcagacggaccgctgagcgcacgcagatgcaggaggacgcttgtgtctccgtgatcttcgtgacgcctgaacagatccatgcgatcaaccgcgattaccgcggcatcgacaggccgacggatgtgatcagctttgcgctccatgacacgatggaggaatatgagatgccgggcggggaagaggccgagctgggcgacatcttcatcaacgtgcaggcggtcaagacgcaggcagaggagtacgggcattctcagcgccgcgaggtctgcttcttgttcacgcacggcttgctgcatctgcttggctatgatcacatggaagaggcggatgagaaggtgatgttctcgcttcaggatgagatcctcgatgaactggttaaaagagaagctgcggcataagttcggttatgcgctgagcggagtgatcagcggcatccgcagcgattccagcatcgccttgcagtgcgtgctcggcctcatcacggtgatcgtctgtctgttcctgccgctttccgcgctggaatggtgtgtgatcctcatcatgatctttctggtcatcgcgatggaatttgtcaattccgccatcgaggagaccgtgaattatatttcgacgaaacgtcatccggcagccaagcggatcaaggatctcgcggcaggcgctgtcctgctcatctcaatctgcgcgctctgcgtggcagtcatcatcataggagggaagctgtattggatcatcttcgggaaatgagagaacgggcgcagcaggcgctgtcctgtgcctatgccccttattccggctttcgggtcggggcttgtgtcaggacgaaggatgggcggctctatggcggcgccaacgtggagaacgcctcatacggactgagctgctgcgcagagcgcaacgcactgttcgccgcctatgcggatggcgtgcgcagcgaggatatcgaggcgctgatgctgatcggcacaggcgatgggctgctgatgccctgcggcgcctgccgtcaggtcatggccgagctgatgcgcccggacgccccggtgatcatggcagacggggcatcttaccggatcatgcgcgtttgcgaacttctgccatatgcatttgacaaggaggatctcaatgggatataaatcaggatttatcgcgatcatcggaaggccgaacgccggcaagagcacgctgctcaacgctttgcttcaccagaagatcgccatcatgtcgcccaagcccaatacgaccagaaataacatcatgggcatattgaccacggcggacgcgcagtatgtgttcatcgacactccgggcatccacaagccgaagcatgagctggggaagacgctgaacaaaaacgcgtataccgccatcgccgaagcggacatcaacgcgctgatcatcgacatcaccaagccttacggcagtggagattccttcttgctggagcggctgaaaaacagcgaggtcccctgctttctgctcgtcaacaagatcgacctgctgccgcgggagcaggtgatgcagcggctgctggaatggcagcagcgctttgacttcgatgagatcatcccgctctccgccctgaagcaggacaatgtggatgagctgctgcgggtgatcgatgggtatctgcaggagggcatcaaatattttccggacgatatggtcagcgaccatggggagaatttccgcatcgcggagatcatccgggaaaagatcttgtttcgcacggaggaggaagttcctcacagcatcgcggtcgtgatcgagaaccgcgaagaggatgagacgcaggtgttcctgcaggcgatggtcatcgttgagcggccaagccagaagtcgatcctgatcggcaagcagggaagcatgattcgttcgatccgcatcgctgcgcagcgcgaactgcgccagatgctgggaaagcgcgtagagctggagctctatgtgcgtgtcgaggaaaactggcgcaaccgcgagagcaagctgaagcagtttggctacaatgagcatgaatgagctggagacggaagggatcgtcatcgccagccgggaataccgcgaacgtgacttgctcgtcacgctgctgacgccttcgggcaggcatgcgctgcatgcccggggcacgctgaaggtcgacagccgcaatgccggcgcgctgcagcttggcacgcgggggatctatcagctgcacagcggccgcgcaggcggcctgttttcgttgcgtcaggccgcgattaaagacagctatcccgccatccgccgcaccctgctgggcacggccatgatgctggtgctctgtgagatcatggcatcggcgcaggatgatccgctctgcttccttctgctgaagcagaccttggatgacatggagcggaccaaggatctctatactgcgccttgcgtctgcgtcggccgcatgtgcgcgctggcagggatcgccccgatgaccgagggatgcgtgcgctgcgggcgtcaggacgagatctgcgcgctctcgctcagacagggcgggttcctgtgccggcgatgcgctgaacaagcgcatgcgcccaggctggacaaggcggcgcttcgccgcttcaggctgatcatgcatgccggtatggacagcctggatatcctgcgggcacacgcgcgctgcggcgaggaagacttcatgcgcatatttgccttttaccgcgaatacagcggcagcgtcatccgcggtgcggactttttgcagaccgcggccgcgatggaaagaaaaaagcattgagcacacaaaaatattaaccaggaagatggacaaacgggcctaaagatggtatatattatattatctatccgtctgtcctttttttatctcgtcaatggatcaggacggataagaacggtgaaaggggtgcttgatgtgagcggaaaaacatttgatacgatcgttgcacatatgaaaaattctggatttgtcttccagggatcagagatctacggaggattgtccaatacgtgggatttcggcccgctgggcgtggaattcaaggaaaatgtcaagaaggcatggtggaagcgttttattcaggaggatccgcataatgtcgggatccagagcgcgatcctgatgaacccgcaggtctgggtggccagcggtcatgtcggtgggttcagcgatccgctgatggactgcaagcagtgcaagacgcgccatcgcgccgatcagctcattgagacggcgacggagggaaaggtcaatccgagcggctggagcaatgagcagatgacggcatacatccgcgaacatcacatcgcatgcccgaactgcggcgcgcatgattttacggatatccgtcagttcaacctgatgttcaagacgttccagggcgtggtagaggatgcgaagagcacgatctatctgcgtccggagaccgcgcagggcatgttcgtcaacttcaagaacgtccagcgctccatgcgcaagaagctgcctttcggcatcggacagatcggaaagagcttccgcaatgagatcacgccgggcaacttcatcttccgtacccgcgagttcgagcagatggagctggagttcttcaccagacctggagaagatctgaagtggtatgaatactataaagaatattgcatgcggtttttgcaggaccttggcatcaatgccgatcatctgcgcctgcgtgagcattctcaggaagagctggcgcattattctaatggaacaagcgacatcgaatacaatttcggcgcgccgatcggctggggcgagctgtggggcatcgcagaccggacggactatgacctcaaggcccacatggaaacgagcaagcagagcctggagtatttcgatcaggagagcggcgagaagttcgttccttactgcatcgagccgagcgtcggcgtagagcgcatgatgctcgccttgatggctgaggcatatgaggagccg

SEQ ID NO: 2436 - DNA, 3247 bp, Unknown
  16S sequences of unknown bacteria
aatccatccctgcagctctgctgacagggcctagcttcgctacttgctcatgaacacagtcgcttcgcgcacttgaagcgggggaatgcttatctgcgttcaagaaacgaattgatataatcaaagctctcctgtacatgcaaaaacttaatcccaagcgcaaaaaaaccatgcaatgcacctttgatccggtgctgctccacttcatttccggctgccagtaaacggcgcgcatattcctctccctcatcacgcagcggatcaaactcggcggtaagaattagcgtgcgcggcaacccatgataatcttgctcctgcaacggggagaaatacggattcttccgatcctttggaccgctctcataaagcttcagatagtcctccatcttcaccgcggtcagcagatagtccgtgccattttcttttacagacggatacggcgatgcctccgtgtagcagttgttcagagccggatagatcagaatctgccgatgcaccttaaaatccccggtatctctcgcctttaagcaaacggcagcggccagattaccacccgcgctgtcgccgatgaccgtgatgtgctccggcatcgtcttcagaagatggtctgtcgtataaagctcctttgctgccgcgtagcagtcgtcaaacgccgtcggaaaacggtactccggcgccagacggtattccaccgacatgacgatctgtcccgtcgactgtgccatccgcgcgcagacccggttatacgtatccacactctctgtcacccagccgccaccatgaaaaaagagcagcaccggaagatccagaggttcctgcagtttacgctgcatcgcctcctcggtcggaaaatacagccttaccggcacctcatagtccccattatatacctttacatccagtttttttaaaaaaatccgcatcgcatcaagttttttcaggtccaccagacgcctggaggactctacctcaatgttcccataagagagtgcgtgcaaaatggtacgcatagtcttaaacaaatatctgtccctgtcccttcctatatataatatatatatctattgttccgtcctgataaaaacgtttcactaacattgttatcttaccatatctcctccttaagtacacgctttttcttttctgaatcttatgactttcttaatctcaaatctgtatcctgtcttttatcttccacaaatgcagaatactacctgactcgctgcccgcgggaataaaaataaatacccccgatgctcctctttcgcgtttattttttaacaaattccgattttttcactgtttttttattgattttatcgtctaatcatgtataatataggctggaagtcggaaggttccgcttctttcatgggagatcgcagtcgtgcgtcttctcatccacattttaaaaaaggagtaatgaaaagatggcaaagattgatttaactaagtatggcatcaccggaactacagaagttgtctacaatccgtcttatgagatgttatttgacgaagagacaaagccggaacttgaaggctatgaaaaaggtcaggtcagcgagcttggcgcagtaaacgttatgactggtatctacaccggccgttcaccgaaagataaatttatcgttgttgacgagaactccaaggacactgtatggtggacctctgacgagtacaagaacgacaaccatccggcatctcaggaagcatgggcagctgtcaaagagatcgctcagaaagagctttccaacaagaagctgtatgtcgtagatgcattctgcggagcaaatgctgatacccgtatggcaatccgtttcatcgttgaggtagcttggcaggcacacttcgttaccaacatgttcattcagccgaccgctgaggagcttgaaaactttgagccggacttcgttgtatacaacgcttccaaggctaaggttgagaactacaaggagctgggtctgaattctgagaccgcagttgtattcaacatcacaagccgcgagcaggttatcatcaacacctggtacggcggagagatgaagaagggtatgttctccatgatgaactactatctgccgctgaagggcatcgctgctatgcactgctctgcaaacacagatatgaacggtgagaacaccgcaatcttcttcggactttccggaacaggtaagaccactctttccacagacccgaagcgtctcctgatcggtgatgacgagcacggctgggatgacaacggcgtattcaacttcgagggcggctgctatgcaaaggttatcaacctcgacaaggaatctgagccggatatctacaatgcaatcaagagaaatgctcttcttgagaacgttactctggacgcagacggaaagatcgattttgctgacaagagcgttaccgagaacacccgtgtttcctacccgatcaaccacattcagaacatcgtacgtccggtatcttctgcaccggcagcaaagaacgtaatcttcctgtccgcagacgctttcggagtacttccgcctgtatctatcctgacagaggatcagactcagtactacttcctgtccggtttcacagcaaagcttgctggtaccgagcgtggaatcacagagccaaccccgaccttctccgcttgctttggccaggcattcctggagctgcatccgaccaagtatgcagaagagcttgttaagaagatggaaaagagcggtgctaaggcataccttgtaaataccggctggaacggaaccggcaagcgtatctcaatcaaggatacccgtggaatcatcgacgctatcttaagcggcgctatcaacaatgcaccgaccaagacgatcccgcacttcaacttcgaagtaccgaccgagcttccgggtgttgatccggcaatccttgacccgcgtgatacctacgctgatgcttccgagtgggagacaaaggcacaggatcttgcttccagattcgttaagaacttcgcaaaatacgaaggcaacgcagctggtaaggctctggttgctgcaggtccgcaggcttaatcgaccaacgttacgcaagacgcgtgatttttatccaaacataaagaaggctgtccgctccggattcataccgggcgggcagccttcttctctttcaagaatgcctcggcattcttgctgcgagatgcgcgtcatgcaatgcatgacatacttcttctgcgcatctctgcaatcctgccggaggctatatcagatgggggattgactcccac

SEQ ID NO: 2437 - DNA, 25474 bp, Unknown
  16S sequences of unknown bacteria
ctacaaggacggcagaggaagctgtactatccatttcattcgggatgttgttctggagatgattgtgaaggaagcggttgcgggtttggctgactttgtgcgctgctatgagtcggtattcctctatatgcagaagcagaaatgcggggaattccagaaaaaacggcagcaggaattgaagctttccatggaaagcagcagaaaacggatcgccgatctggacaagctgttcaatcggatttacgaggacaatgtgatcgggaagctgtcggacgaacgctatgcaaggatggcggcggagtatgaatccgagcagaaagaactgctggaaaaggtcagggaggaagaaaagcagctatccgaaatggagcagaaatcggtggatatgcgcctgcttttacaggggctgcgggaatttaccgacatgaaggagcttacgccgacgatcgtcaacaagctgatccgtcgcattgaggtgcacaatccggagaaaaagcacgcccgaaaatcggtgaaggtcgacatctatttcacagcggtggggctggtaagtcttccggacgagcaggagatccgaaagatgatggaacagatgcgaagcgcatcacagataccgaaacagctgactgcataaaaagaaaacggtgtaacccgtcacatatcgggttacaccatcttctctacattttactgccttatcagcaccgggcgttccgccggtgcttttgcgttatttcagcatgtctgcttttttctccaaaatctcggccacgatggcgcaggctgggcagtcgcaatacttagcccctgctgctttgatctctttggcatgggctgcaatgcccgttgctgtatcttccccaaaataggtttttccttcttcagattgtgcaaagctgatcagcgtatcgatgggcatgatgtccgcttccaactcttggatataccgccgggtttcagctgcctgtgcatcggttcccttggcggcaagccagctttgcgcggctgccttggtttcttggctgcatgtcggcgcatcgatcagagccattgttttttcttccacataggacaatacattttgatccatcatacattccccgctttcttgtaaaatctatttattttattatatcacatagccgatctgcaagccggcacatcgcagcagtgccccctgatcctctgccgtcaacaggtcttggagggaaatgctgtccaaacaatcatcgagcagggcatagagggttttccacatcggcagcgtacggcgccgttcccgtaaagggcagggaggcaccctttcctccaaacaggtactgtcgccggtgaggcacatatcacctacacgataggcatgggcgccatagtcagcttatagccgccacctttgccacgaatcccgccttttaccgacgattttaggatactttctaggcgtttttccgaagtttccttccgctgggcaatttcctttgtcggcaaatagccctcaggggcatgcgctgctaaatcgataagcatgcacagcgcataagccctttggcagaaatcatcaccgtataaaacacctcctatgtgccattctacaattaggggagggggagtcaaataaaacctattgacaaactaggaatataaacctatcataccaataaacatactaaacaagtaggcaataaagcgtggcgttctttaacgcttaaagcggctctgccgccggtggcagttgggcacggccgaatttataacaaacaagcaacagaacggaggaaacaatatgagcaaaatttataccacgatggatcagctgattgggcatacgcctttgctagagctgacgcatatagaaaacgaatgcggccttaaggcacgcgtgctggccaagctggaatattttaatcctgccggctctgtgaaggatcgcattgcaaagcgcatgatagaggatgctgaaagcaaagggacgctgcgcccgggatcggtaatcatagagccaacctccggcaatacgggcattgggctggccgctgtggccgcggcgcgcggctatcgaacaatcatcgttatgccggaaaccatgagcgtggagcgccggaaattgatgaaagcgtatggggccgagctgatcttaacggagggtgccaagggcatgaaaggtgccattgaaaaggcgcaagccttggcaaaagaaatgcccaacgcgtttgtgccggggcaattcagcaatcctgccaaccctgaagtacattatgaaacaacagggccggagatctgggcggatacggatgggcaagtggatctctttgtggcaggcgttggtacgggcggcacagtgaccggcgtcggtcggtatctaaagcagcagaatccgcaggtgaaggtcgtggccgtagagccggccgattccccaatgctaagcaagggaaccgccggcccgcacaaaatacagggcatcggtgcagggtttgtgccgcaagtgttggatactaagatctttgacgagatcatcacggtagaaaatgacgatgctttccaagccgctaggcaaatcgggcattgggagggtgttttggtaggcatttcttccggagcggctgtatgggcagcaatacagctggccagacgaccggaaaacgagggcaaaaccatcgtagcgttgttggcggataccggtgaacgctacctatctacgccgatgtttgaagcgtaaaacaatcgtaaagaaaagagccacccctatcggtagattgtttccccccttacctcataacggcgttacaggacgaatgtgttgcctgtaccgtacaatgctccctgggattcattgcaaagaaacaaagcagttaaaatgggatatacctctagaggaagcggaccatgcatgcgtccgcttccttttttctatcctttgtgtagatttttctgcactttgacaaacaataagggtacaaacataggaaagagaagaagaaaaacaacgaaagaggaggatgattgcgtatgaagggaaacgtttttgggtatatccgggtgtctagtacagaccagaacgaggatcgtcaacgcatcgctatgcagaaaaaagggatagaggcaaagaatctttatatagataagcagtccggaaaggactttcagcgtccgcgttaccggcagatggtgcggcggctaaagccgggggatctattgtatgtgctcagcatagacagattggggcgcaattatgaggaaatacaaaaccagtggcgcatactcaccaaggaaaagggtgtggatatatgcgttatcgatatgcctttgctggataccagaagggggaaagaccttatgggtacgtttattgcggatcttgtcttgcagatcctctcctttgtggcacaaaatgagcgggaaaatatccgcaaaagacaggcggagggcattgcggccgccaaagcacggggcgtaaaattcggccgcccgccacgccctcttccggaaaacttttatgaaattcatcaggcatggcggggtaaaaaaatgacgctcaaacaggcggcgcagagctgcggcatgccggtcggaacgttttacgcaaaagccgtgcgccatgaagcgggccaatgacgctcgtttgtgaaagtgtacttttcaaaaatatattgtataatcattaactatttcattatactatgaaaatcttctttttcaacaatgatcatcttctgttttcttaattttactaaattgcgtaaatccaaaaaccagtttttgcccttttttgaaaagtacaccattgcaaactaagagaaggggttgtttgtttgaaaaggaagctgttcgcactggttttatccgttgctatggcggtagggttgctgcccatatccgccctggcaaatggggatcaggtgccgcgtgacaatatagaggtgccggtagaggcgttgtattatgaagctacctcgggaggcattgccatccagggcattcgaaaggattggtttcgggagcattgtgcggacaacgggaaggaaaacccagcttacctttccatccgtattcctgcacagatcaacggctcgccggtcgtatccatcggaagcaatgctttttgtacgaataaggccaattacgacgaaaatgatagatatcaatatatccatccctcgaattataaattgacagcggttgatttttccggtgcggatcggctggaacggatagaaagccaggcctttttgagaaacgacgcgctcagcggtgtgcttacccttccgagctctttgaaaaaactgggcaaatatgcatttagcagctgtaccgctttggaagggatcgtgctgcccgcaggattggaagagatcggaaacagcagcgaaggaagcgtctttatgggctgcacgggccttacgtttgtccgcacggccggcggagatcccaacgccatgtttgagctgccggcgtctctccagtccattgggcaatacgcttttaagcaatgctttgcgccgtcggtaaaaactgcggtgcgtattccggcttcggtttcttatatcggggcagaggcgtttaagaacaattcgcttggctacctgcccatcaccaccatcattgtggagcggcaggatgcaagcgggtacatcggagacgcttttgaggcaaatggatcaaatgattacggcctgggcaagcggatgacagtattttccaatgccgcctcctttcagacatttacgcccagcggcttgtcgacctataagaattccttgacatatgaatttaccttgcagtatggcgttcccgccgtgcgtacagagcaaaagctgtataaccaaactgtacaatgcgaaaaagacccgtctaccggcacttgggacatcaatacgcagtatacattgccggatgtgcctgccgacggcgtgccggcgggctataccgggggatgggcgtaccagggcacgcttttgacgctcaatacaaaattgacccccaaagaagatatcatggtcgttgaggtggaaaatgtgctgcaaatgcctacggttgtccccatcgtggatggcaaccagcaggcgtttacggataccagctacgatatagtggtttccaatgataaagagcatcaagtcggcgtccgtgtcacgcatccgctgatggaaacagcggatgaaaatgggggtacggtgtatttcaaatatgaatggacggatgtatggcaaggtggcaagcagggccctcgtatggaggaggacggctttggctttccttcgtttccgtcccgcggcacgcctaccattcccatccgtggagcaaaggatgagcgtacccatgctggcagctattccgaagaggattatggcgacggctattacctattggagatctacggctattacagcgtgcctggcaaggcagcaaagctgttctataagtcaaagagcactgcaattgcagccgacccggaggccacggtcgatacagcctatctgttttatgtgcaaacgtccgaccctgccgtcccgcctgaggttgtgttggaagacgccgaggcggaatacggatatagcgagcagacactgtccgcatctgtcaaagagcaagcaggatgcagctattcataccagtggtatgaggctgcgcaaataggccaggcggagaacgggcaaaagatagagggcgccaatacggcaaggctttctgtacagccgggcaaatcggtgggcagctatccatattatctcgtcgttaccgccgtgaagaaggataacggggatacggcttctatctctgtgccggttacctttaccgtacaaccgaagcagattatgatttgtccgcaggcaggccagcgcaaatataccggccaaaaggatcctgtgctgtcgtatacggcggtaaacgccccagcaggggctgccatcaccggcgcattgaaacggacggagggcgaaacgccgggtacatatgcctattctttgggaagcttggcgatcgacgatgacaattatcaacttgttttaagccccgaggcccccttatttaccatagaagcgtatcgtgctgtggcaagctttaccccggaggttcccaatggccgggatggatggtatacatctgaggttacggtgacgccgccggccgggcatctgatcagcctggatggtgaacagtggctcgcagggccggttgtgctgggggaatatcagggagaattcacctattatttgaaatctatccgcgatgatgataccaaagacgccgttgcggtgaatacgacgtcgctttatatcgataccgtgccgcccttgattgctggccttgaagagggaggcgtctattgcctcaaggcatcgtttgcagtgtcggagaaaaatctggcgcaggtacttgtggatggcgtgccgcaaacgttggcacagcagagctacaccctgatgccgggcagccatactgtaaaagcagtggatcttgccggcaacagcgcgattgtgcacgtgacggtcaatgcccagcataccccgggcggtatgattgtggatgcaccgcctacgtgcacgggtcctggcagcgggcataccgactgtacagtctgcggccagacggcgcaaaccggccttatcatagcagcaccggggcacacctttggcccgtggacagtgacaaaacaggccacaaatgtgcaaagcggcagaaaggaaagggtttgtacggtttgcggctataaggagacggcggagatccctgcctttgcagaccccgcatcccccagcgcaccgggcagcgatgtaccccgaacgggcgattcgatggcggtatggctgtgggcgttaggaatgctgagcgcggcaggcggcattctaggcatagggatgtaccaaaggaagaaagacagctaaagcacaaaaaataccggctgatttcagccggtatttatatctcttacttatagcagaaaatcgcgcagcaataaatcgctgtcatggcaggcgacgaagtaaagggaggaatcgggcatacggatataggcgatggatagcttgacaccatcgctttcctgtgcattggcaatgatggtctctgcccctaaggaggaaagcccctggtaatcctctttcgatggctgcaaagcagaaggaacattgctggcatacatgtatgtgtcgcccggaatattgtagcgaagctggccctccttgaaaaaggaaatgcccttttcgggatcctctgcctctacataataagccgctgccgcaacccgatcattctcatccatcaaaaaatgcagggtggcagggatacggccttcatattggacgccgcttttatccagatgcggcgtgcccatcacataaggaacatcctctatgcaaaggcatgcgtagcccttttcagacaatatggtggaccatggttcgcttttctggcattgcggatacgcctccaaaacattttggcgggtctgcccaacaaacgaaaaaacagactccggatccgcagaatgaaccacatccagtacgcgagaggtgcgggctgtcatcgaaagaagcaccgataaaaacaagactaagagggtactccatagagataggcgttttttccttgaatacatgcgcatagctcctttgcttttaattcgctgggcgccagattcagcgttatagcggccagatccaaagcagtgccgtttttcagcggcagaaagtatttgctgcccatgcccatcagttcgttaaagcgccggaatatttcatccatcacgcaagtagcctcgaaccgatctgcccagatgcaaatacaaaatagaatgggacgcctgtctgccacaggaaatttcttcgaagaaaagagagttgttttcggctcaaggtcccaaaaacgcctttttgatatatccaaatgcgtatggctggttgaagatcgcctagggcagagccgctttctcgtcgctgcaagcgccgagatacagcatgcagagaacagaaaccaatagcaaaacatagtttcgtttcaaggatcattctcctcaaaaaagagagccttttttttcataataccaaagaacggatggttgagaaataaaaaaacagcaaaaagacggccccaatcggccgccttttttgtttatctcaaagcgtatggagcgtttccatcgcaacacgaatattgtgtagattcacatcggaaagcagcgtacagtccgcacccaggataaagccctgcttggagccaaaatcgtctacaatgcgccgtacctctgcccggatggcgtcgtccggcccttcgatcagagggccgtcatggtttttcataccgcccaggatgaccttgcccttgaatgcatcgcgcccttggcgcagcgtaagatcgtgcttgtgtacgtcccagttgaccacggcgcaggggaaatcatagaaataatccaaccgcatgccgtcgccgcacatatgtaaaaagttatacgggctcagctttgccagcccctccattacataacgatcctcttctacgatgagccggtgcgtaaattcctccgggaaccgcccaggctctgtgccgcgcgtggaaaaataaatgccctctgcgcccgctttcaggcattcttcgcagtaaccgatcagcatatcgctcagcgcgcggtaagccgctgcaacctcttccgggcgctcctcataatgggccacaaacttggcatagtcctgtttccagccgttgcggatcattttgagggtggaaaacagcgtggtaaataccatcatatcgctgcttacggcatcggcgatgcgcttgatgacgtcatactgcttttccagcagcggatcatgcaaggaaagcggcttatagtgtttccagtcgtccgccgtttgaaaatcaaagggaagctctgtctcatccatgattttgacaaagtcaatgtccccttcacggatgagtttaagatgggcctgtaccgccttttcccctgtcttttcatccggttggttgtgaaaccaaaacgaaccgggcacgcgctcggtgggcttgccgtttaagcaatccagcatcaactgacgtttgttcatacatacacccctccataccaccttttttcttatagtataccactgaaccaaaacgctgcgtgtgccgatcgataaaaaaaggagacgaacttagtcgtctccgcgcagaaggttctctgcatagtcctgtaagctcgccatggagttgacgctgccggcccttgactgaatttgttcttgaacaaaatccggcagcgattcaaaataatgccgggcggccctatcctgggataagagctcttgcatggatgcataatgcttcatctgtatcacctcgcttccagttttcgccgaagaaaagggaattatacgtggttctctctgcgaaattcacagaaaaagcgaggacagggcgtgggctgtgcttcgtatccgggcacgctgggcagggcaaggggcgcgcaggcaaacgaaacggaaaggccgtaggccgccgcatggctggacagcgtagatgggtataccgggtgataaggcagatcctcttcaccgtagggcgtagcaaaggcctggcaggataggttgtagagcgtttcgtaggccgccgcatttttggccatacaatagagccgccctccgggcgccagcaagcgagccgtttggcttagcagggcttgacgatcttcttccggatagcaggataggtcgcggcagcatacgatggcgtcaaacccaggggcaaagcggggcagcgtatcctgccaggggccgccgtaggcctgcgcaaacagcccctcggcatcgggcagataggcgcgcttggtttcggccgcgcaatggatgctttggacgcctttttggcggcatagcgtccggcagtataggggctgggtgccaaaccgggggtccagccacagcacgcggctctgcggcccttccaaacaggcggctgtgcgctgagctatctctgtatcccaatccatcgaagaccaggcgtctacgccccatttttgtcgatacaataggcggctttgtggcagcgtttgcgcctgagactgtactgttgaggccgtaaccgatccaaaatggtgtacaaacgtatcccgtgccagcatttgacggaagccggcccgccttagacgggtggatacgtcgtcgtcggcaaactccccaaagcggaaccaggggtcgtttgggcaggcgcgggccaatacggtgggcatgatgctcatacagggcagcaagcgggggcgctcctcccattgcaggggatctgaacggttaaaggcggcggcaaaggaaaccagcccgtccggatcctgccgcggatcgggataggagacagcaatgctttgcccgctgctcatcgcgttgcagagcggcacggccatgcccgtgcggctgtctgcgcggatacagcgcagcaagccctccaaatacctgggcgttgcgatgatgtcgttggcaaaatgcacataataccgcccgcgggctgccagcgcccctagcgaggtagcgggatagcccagcggctcgggcaggcacagcaccttggcctggggaatggtggcaaaataatctgctgtgccgtcgttagagccattgtctatcaacagaagctctgcgcccaaagaggcaagatccgtatgctgtaaaatgctttctaccgccagctttgtgtactccagcttgttgtaggcggtcacggcaatggtaacctcatagtcatagggccgcgatagcagcatgggcatcaatgggcgcaggcggcgcaggctttgtacctgcgtttggccacgctggcaaagcgcctggggtgtcagcgcatcgtgaagatagacctgtacatcctcttcccaatgggccagtaaaataggcaaatacggccggttttcccgacttttggaggcaagctgcgctacacaccgcccaatggccgggccataagggctgtagggagagagcagcgcggagatttctaggcatgccttaaccaggtcggcgggcagggcggaggttgccttgggcagtgcgtttcggatgtctcggatcaggcgtttacaccgcctataaagcgcatcggtggacataggataggctcctttgcggataagttctgtgtagaattctatgcattaaaaacaccgggggtgactttacactgtatgttgctttttatggtatagtaatgatataggaattcccagactccaaaccttaggctcccttgaagaaaaaatctggacactggccagaaagaatgatagatgtatgaaaatgcattgctaagtcttaccatgtgtaaaggggcaacaagaatgacgcatcatgaaaaaagagaatttctgattcaacaactgttatcagaatgtccacagtacagcaatatagaaatcccaaaaaatgaagatgagcagaaaacgcttcttcgaagtctcatgaatattcgtgcgccccgtccgatagatgaggaatttttgcatatacaggatgaatatctaagggaagaagtggcggacaaaggcgttacggacagtgcagggttgcccgtatcgcccgtaaacagccgcctggcattatggcgcggagatatcacaaccctaaagattgatgccattgtaaatgccgcaaacagcgctttaaggggttgctttatcccttgccattcctgcgtggataacatcattcacagcgttagcggcatacagcttcgattggcctgtgataaaataatgaaagagcagggccatgatgagccaacggggaaagcgaagattacgcctgcttataatttgccttgtaaatatgtgctccataccgtggggccaatcgtttcagggcgccttacggaaacgcattgtaagcaacttgcatcctgttacagatcctgcttagagcttgctgcggagaatgggctgaaaagcattgcgttctgctgcatttccacaggagagtttcattttccgcagaaaaaagcggcggaaattgcggtgcgaacagttacggattatttgcacacaaacacacgcatagaaaaggtggtttttaatgttttcaaacaagaggatcagatcatctaccagcagctcctcggataatatacatcgattctacgatctattgcagaaagtagataccgttatcatcggcgcgggcgctggcttgtctactgcggccggctttacatactcaggaaataggtttgaagaaaatttctccgatttcattgagaaatatggcttcaaagatatgtattcgggcggcttttatccatttgccagccaagaagaatattgggcctattggtccagatatgtttttatcaatcggtatacggatatggataacggcacatacaaacggctttttgagcttgtaaaagaaaaagattattttgtgttgaccaccaatgtagatcatcagtttcaaaaggcaggctttgataagcgcagattgttttatacgcagggcgattacggcttatttcagtgtagtgtgccttgtcatcaaaaaacttatgacaatgaggcggccatccgtgacatgatagaacagcaggcagatatgaaaataccaacagagctgattccctgctgccctgtctgcggaaagcctatgacgatgaatcttcgggccgatgatacttttgtgcaagatgagggatggtatcgtgcaagcgaacgatatacagactttattcgtagacacgcccatcttccagtgctttttttagagcttggcgtcggaatgaatacgccgggcatcatcaaatatcctttttggcagatgacgtataacaatccggaagcccattatgtatgcataaactttgaagaagcgtttgcgccgccagaaatccatgcaaatgccatttgtatacaagaggatataggccatgtattgcgcctatcgttaagtgggaggatctttgaaaacaaatgaatgaaaaggaaacaaaaaggaggattggcgattgaagatcgttgtgctggatggcgcagcgttggaccctggcgatcttacctggcaggggatggagcgcctgggtacgcttgtgcgctatgatagaacgccggagccgctgatcgtgccgcgtatcggggatgcggaaatcatcattaccaacaaaacgccgctgacggcgcaaaccatacagcgctgcccaaacatccgttacatcggcgcactgtctacgggctataatgtcatcgatataagcgcggccgctgaaaggggcattcccgtaacaaatgtgccggattatggaaccgatgcggtagcccagcatgtgtttgctctgctgctggaaatctgcaatcatgtggccttgcatgccgatagcgtccggcgcggagattgggtaaaaagcgcagacttttgctattggaaagcccctctgacagagctggccggtaagaccatgggcttggtgggttttggaaagatcgggcggcgtaccgcgcgccttgccgaggcatttgggatgcggacgctggcgtattcgcgccgtcctcaaacctcgtctgcgccggcgggcaccgccttcgtgccgctgcaaacgctgcttgcccaaagcgatattgtttctttgcattgcccgctgacggatcggacgcatcatctcatcaacgatgacacgctgcgtcaatgcaagcccggcgccattctgatcaacacggcacgcgggcctttggtggatcatgcagcagtagcgcatgctttgcatagcgggcagctgagctattatgccgccgatgtggcggagcatgagccgatggccgcggacgatcctctgttgggggcgccgcgctgcctgtttactccgcatatcgcttgggcggcaagggaatcgcgccaacgcctgatggatatggcggcagagaacatacaagcctttttgcggggtacgccgcaaaatgtggtcaatggagggaaaaaagattgaaaacctggatgctgatgccggattcttttaaggggaccatgagctctgcggagatctgtcaatgtatgcgcacacagatcctgcgccatgttccggatgcagaagtcatttccatccccgtagcagatggcggggagggcagtgtggattgttttctggaagctatgggcggccaaatggtagaggcggaggtctatgggccgctgggcacttggatgacagcgcactacggcattgtttctcagcataccgccatcatcgagatggcggcctgcgcaggcttaccgctggtagagggccatcaggacccggagaaaacgacgacctttggcgtagggcagctgatgctggatgcggtaaagcgcggatgcagaaaaatcatcgtagggctgggcggcagctgtaccaatgatgggggcgccggcgcggcgtcggcatgcggtgcaaagttttacgatgcggagggccgggcctttacgccggtgggcggcacactaaaccatattgcgcgcgtggatctatctggcctcaagacgcagctgaaagggatagagcttgtcgccatgtgtgatattgacaatccgctgtgcggcccacagggcgcagcggctgtattcgggccgcaaaaaggcgcggacggcgcgatggttgcccgtttggatgaggggctgtgtcatctggccgaagtggtgcagcgggatacgggctgcgacgctatgaatgtgccgggtgcaggcgctgccggcggcatgggctacggcatgctggcatgctttggcgccaagctgcaaatgggcatcgagaccgtattggataccgtttcctttgaaacgctggcacagcgcgcagacatcatcctgaccggggaagggcggatggatgggcagagcctgcgcggcaaggttgtcatgggcattgcgcgcagggccaagccgctgggcgtgccggtagtggctgtggtaggcgatatcggcgatgacattacgcctgcctatgagcagggggtcacggggattttcagcatcaaccgcgtggcgcaggattttgaaaaggtgaaagcccgcagcaagagcgatttggcgcttactatggataacctggtgcgtttctgcgtttctatggggctgtgatttggaactaaaaaaagctgcggcgtcagccacagctttttagttttattaacccatcacaggcgttttatccttgagcattacgtcgtgcgaaccgccctctacaatgctggtagaggagaccagcgtgatcttggcgttcttttgcagatcggggatattcagcacgccgcagttgcacatcgtagagcgcaccttgcttaaagaggcgtttacattgtcctttaggctgccggcatacggcacataggaatccacgccttcctcaaaggaaagcttggcgtcgccgcccatatcgtagcgctgccagttgcgggcgcggctgctgccctcgccccagtattccttcatatagctgccgttgatgttgacgcggttggtcgggctttcatcaaaacgggcaaaataacggcccagcataataaagtccgcgcccatggccagggccagcgtcatgtgataatcatggacgatgccgccatccgagcagatggggatatagatgccggtctgttcaaaataatcgtcgcgggccttggccacctcaatcagcgccgtggcttgtccacgtccgatgcctttttgctcgcgggtaatgcaaatagagccgccgccaatgccgaccttgacaaagtctgcccccgccttggccaaaaataggaacccatcacggtctaccacgttgcctgcgcctacctttacggtatcgccgtagcgttcgcggataaaatcaatggtcagtttctgccattcggtatacccttcggaggaatcgatgcacagcacatctgcgcccgcctccaccagggccggcacgcgctctgcatagtcgcgggtattgatgcctgcgcctaccatatagcgcttatggctgtccaacagctcatggacgttttccttatgcatgtcatagtccttgcggaataccatatacaccaggtgctgcttttcatccaccagcggcagggcgttgagcttatggtcccaaatgatgtcgttggcagttttaagcgtggtatcagcgctggcatagatcatgtcctcaaatttagtcataaattcggataccttggtagcggggtccatacgggaaacgcggtagtcgcggctggtgacaatgccgagcagcttaccgttgggggagccgtcttccgtaacgggcatggtagaatggccggtttgctgctttagcgttaagacgtcggctagggtctggcttggctttaggttggaatcgctggtcacaaagcccgctttatagcttttgacgcgtgccaccatcgctgcttcgttttccacagactgagagccgtaaataaacgaaagaccgccttccttggcgagcgcgatggccatcttgtcgtcggaaacggactgcatgatggcggaggtaagcgggatattcagcatgatggggctggtttcgccctttttgtattttactacgggggtccgtaagctcacgttgccgggaatgcactccgtagaggaatagccggggacgagaagatattctccaaacgtacgggagggttcattgaaataataagccataagccatacactccttatccaaatttatcgctgaaaatgaaacgtatgaaaacagagcttgcgcaatatacgcaagcttgtcttgaatttcatacattatagcatggacacgcatagattttccactgtttcaagcacatatctaaagggaaatacatagtatgtgccatattttgccatattttattgaaaaatagttgaattgttgtccaatcctatatatgataaaggcaaataaataaggggaggcttgtcaatgaaacaggcaaaacggattttgatggcggcgatggcggctatgctggtttttgtatttgctggctgcggtgggcaggacaccaacacgccggaaggggcgtttaatgcaggcattgcagccgtgaaggattgcgataccgctgcaatggataagtacctgacgggggatcctgccagcgagcttagcgatggctttgcacagctaggcacttctgccaatgcggcaaaggacgtgtataaggcgctgtactccaagctgaattgcaaagtgctcagtgtggaggaagagggcgatacggctactttgcagatagaagtgacctttttggataagacacagttccagagcaacctgatggcagctgcgctgtccgcagggttgacaaatctgtccaatgttagctctcaggaagagatgatggaaaagatgatgcctgtcatcaaggaagccattgagaagacgccgcagggcgagcctcagcagaccgaagcgacgatggtcctcgaagaaggacaatggaagatagacgatttcgatcttgacctgggtttgtaagcagcttgataaaaaaacaccgcggtttgcggtgtttttttattgcctaaaactagcaaagcaggcgaaggacgatttggaaaacatggatttcatgatagaattttaccgaaaagagacgaatgaggaggttccatagagttgaaaaaggtcaaatgcgtgatatggatcctactgtgtacgctgacagtctgcgcctgccaaagccaagaaaaacaatccccgacagatacggtggatgcatttatgaaagcgctgtcctctatggatggcgaaacgttggacagcctttatgccgccgaagaaccattggagtcgatgttggatagcgagacggacaaaaagctggtatccgctgtgtttgccaagcttcagtgggaggtcggcgcacaatccatagaagaggatttggcccgggtacatctcaaaatcaccgctgtgccatatcgtaaaatggtacaggcatatgaaacgcatgtaaaggaaaatctggaaagctaccgtgccaaatacagtgatatggacgatggaacctaccaggcagccattttggaggatcggttggctttttatcaggcatataccgagacggtaaccacagaggtggatatggatctggtatatcaggaagatcgatggatcatttcgcactgcgagggattgtcgaatgcgctgctgggagaaagcgatgtgtaatgcgtaaaaagaagggtaatctgcccttctttttttgccttgctttcaatctctggaaaagatgatatactgaaaaacggaaaacgatgtacggcctgttttcagccgtgctttaggaggaatgatcgatgagccgtaaacagaaaataggcgcgctgtgcctggcgctgtgcttggccctattttgttctgcctgcggtgcgccgcagagccaggccggggaggcccagatgtcggcatcgctgacggccgcgccgacagaggcggaggaaacgccgcagacgtctgcggtgccatcgcaagcgcaaacggcccagcccacccaaaaacaagagaagaacgaaaaggaaaatggcggagcaaaagcgacccaggcgcaaaagacacagccaaaggccacgcagcagccccagcagccgaccaagatcaaggtcacggtcaaggtggactgcgccacagcagctgccaaaaatgagggcattcgaaagcaatacggcagcggcggcgtcatagcgtccaagaccatagagctggaaaagggcgccacggtatacgatgcgttgaaaaaggtatgcccagatgccaaagagcagggcggctatgtctataaaattgggcagctcagcgaacaggatatgggaaagcttagcggctggatgtacagcatcaacggcacctatgtgcaggtaggatgcaagcagaaaacgctttcggacggcgacgtggttcggtggcgctatacctgtgatggcggcgcggacatcggcggcgcagcatgagccggcagcgctggtttgaaacgctgcatcccagcgtagtgctggtctatttggtgggcgtgatggggctggggctgtgtacgctgcacccgatctatctggggttgatgagcctttgtgccttggtggtcaacatttggctgcgcggtataggccggacggcacgcacactcatgcatgcgcttgtgctctgctgcttggtaacagcgctgaatgcgctattcaaccatagcggcgctacggagctggcggtgctgtttggcacccctctaacgatggaagcgctggtctatggccttgtcagcagcctgatgctgcttacgatgtggctatggtgtgctgtttggcaagtatggatgaccaacgagcgctttttgtacttatttggaaacctggctcctacgctgtcgctgatgctatccatggtgttttcgctgattccgcaaagcggaaaaaaactatcgcagattcgcctttgccaaagggcgcatcatgctgataggaaaaagcagcgagggctgttgatacgccagatctcttcgctgcttgtgatggatatggaggatagcatgcagacggcggatgcgatgcgctgcaagggatacggcgttggtcggcgcacggccttttccctctttcgctttaccaagcgggacgctatctggctgattgcggggcttgtgctgcttataaccgcggtaccgggggtcgttttggccaatcgaggattggttttttatccgtggctgttttggcctgccgcactgccggtttgcctggcagggttggcgttgtttgcgctgctgccgctgttggtgcagggaaaggagtggctctcatgcagatggtccaagtaaaggattggggcttttgctatccgggctgtgaagcgccggcgctttctcatgtgaattttaccatcgaggaaggggcgtttgtgctgctgtgcggtgcttccggcagcgggaaaagcacgcttttgagccatttaaagcgcgagatggcgccgcatggaacgcagatgggcgtcatcgaatggcagggaagcccgttatctgccatgagcgaaaaggacagcgcacagcgtattggctatgtagcgcagacgccggaaacgcagatcgtgacggatacggtgtggcatgagctggctttcggcctggaaaacctaggaatgccggcgcaggtgatgcggcgtagggtggcggagattgcgcattttttcgggatagagtcctggtttcggcaaaagacagatacgctttccggcgggcaaaagcagctggtcaacttagcgtctgtgctggtcatgcagccaagcctgttgattttagacgagccgaccgcccagctggatcctgtggcggcccgtcagtttttgcaggccgttcagcgcgttcataaagaattgggcattacggtactcttatgcgagcatgcgttggaggaggtgcttgggctggccacccaggtgctgtttttgcaagacggcgccctggcttttgatggcgcgccccaggcttttttgcagaggatggcagcgccatcttcggcgcattttcgatccgcgctgccggctgccagccgtctggcgctttccctcggcaagacagagcctatccccgttacggtgcagcagggacgccgcctattaagagcgcagcgtgcgcatgtatcggtgcgttcctaccagacgcaccagggcgggaaagcgtcgcctgttctttgcgccaaagagctgtggtttcgctatcaaacggagcttccgtttgtgctcagaggtttttccatgtcgctgtttgcaggggagatacatgcactggtaggcggcaacggctgcggcaaaagcacagcgctcgcggtattgtgtggcgggtataagccgcagcgcggtaaatgcaaagggaaggtgcagacagcgctgctggcccaggatacgcgcgcgatgtttgcccacgatacagtagaggcggagctaaggcaaacagcgcggatacacggccagatggaaagatgggaagaagtgacagaaaagctgcaaatcgcaccgttgctgccaaagcacccctatgacatcagcgtgggcgagcgccagcgtgccgcgctggcaaagtgcctattgacaggggcaggcgtcttgctgttggatgagccgacaaagggcatggatgccttttccaaacacaggctggccggcctgttggcaacggccaagcgtatggggcaggctgtgtgtcttgttacgcatgatctggagtttgccgccgctgtggcggatcgctgttctatgatgtttgacggaacagtgatggccacagaccaaggccgtgcgttttttttaggcaaccagttttataccaccgccgtgcaccgcatgacgcaggggatcttgccggggtgcgtcgtacaggaggatcttgtctttgatgcaacataaaatcagcgctgtgcttttgtttttgctggtgcctgccgcgatgatcgcttgcatcctcctgcaaagcctacagacggcgctgctgtctacgctggtattgttggcagcgctgacgccgttttttcttgcctttgaacgccaaaagccgcggccccgcgatttcatgcccgtcgtcgtactgacggccctttccgttaccggacggctgctatttgccgccctgccgaattttaagccggtctctgccatagtgatcttggcgggcgtctgctttgggcggcagagtgggtttttgacgggcacgttatccgcgctggtctccaatttgttttttgggcaggggccttggacgccctggcagatgtatgcatggggccttatggggtatgttgcgggcgcgctggcgtccaccaagctgtttcggcgtccctgggccgttttgctctatggctttttggccagctttggctatggctttttgatgaacagctggacgcttttttcctttgttcagcctgtaacatggcaggcagccctggccacctatggcgcggcgttggcttttgacgctacccacgcggtctctaccgtggcatttttatccgttacgttgctgccttggcaaaaggagctcaggcgcatccggcaaaaatatggggttagagaattgtaataaagcatccggatatccggatgcttttactatgctttccgctgcgctgccgcagcgaattggctgttgtatagctgggtataaaatccgttttgtgccaaaagcgtttcgtgcgtgccgcgctctattacctccccgtcgcgcataacaaggatacaatccgccttttggatggtggaaaggcggtgcgccacgataaagctggttctgccgcgcatcatctcatcaaatgcctgctggatggccagctctgtacgggtatcgatggagctggtggcttcgtctaaaatcagcatactagggtttgtcagaaggatccgcgcgatgcacaaaagctgtttttgcccctgggaaaggttgctgccgtcatctccgaccggtgcatcgtagccgccgggcagtcggcggataaatccgtcggcatgggcccgctgcgccgcgtgtataacctcctcccgcgtcgcatctggtttgccataggcaatgttttgcaatacgctgccgcaaaacagccagctgtcttgaagcaccatgccgtataggccgcgcacgctattgcgcgtcagtgtttgctggtctgcgccatcgatgaggatgcgcccgctgtccagctcataaaagcgcatcaaaagattgataagcgtggttttgccacagccggtaggccccacaatggcaatgcgtgccccgggctgtgcctccaggcaaagatcttttagcaggggacgatccttctgataggaaaagcatacatgctccagcgtcagctgcccacggctgctgtgtaccgtgcgcgcatcctcaggctccggctgttgctcctcttcctccaaaaaggcaaagacgcgccgcgccgatgccagggcattttggagctcggtgatcacgccggagatttcattaaacggtttggtgtattggttggcgtacgataaaaagctggaaagctggcctaccgtcacgccgccatgcattgccacaaaagcgccgcaaagccccacgctggcatacaccatggcgtttacaaaccgtgtacagggatttgtcagcgaggaaaaaaattgagcctttaccccacaggcatacaatttttcgttgatctcgtcaaatgatttttgcgaggcttcctcacggccaaacgcctttacgattttctgatggccaatcatttcctccaccagccctgtcatagcacctctaagggcagattgctcatgaaagaggtgatacgagcgccttgcaataaaggaggatacaaacagcgacaacggcgtgaccagcaccaccacgagcgcgatggtcgcgttgatggaaagcataaagcccaacgtgcctaggattgtcagtgcgccggtaaacagctgcgcaaagccctgcaagagcccatcggataccgtatcgatgtcggtggtcatgcgtgcaatcagatcgccgtgcgcatggttgtcgatggttttcagcggcacgcgctgcagcttttccgccatgcgtgcccgcaggctgtgtacggtgtgaaaggtgatatggttggtgcacagcgtcatggcccactgaaacagagcggccaggccgatcatggcgcccaaaagcagaagatagcgcactacgccgccaaactgtaccagcccagtgcccagcagcagatccaccgcccatccgatgacaacgggcgcccatagcgttagcaccacatacatgatgccgctgataagtgcaatcagcagagtcagccgatacggcgcaatgctctgcacaatgcggcccaggacgggtttttgtttcattgcggattttttcattgctgtcctccttgcgcttgggtttgggaggctacgatttcacggtagatggcgcattgcgccatcagcgtttcgtggctgccttggccggcgatgcgcccatcctcaaacaccaggatctggtcacactgccgtagggtgctcgctcgctgggagatcatcaacaccgtccccgggaaatcggatagagattggcgcagcgctgcgtctgtggccaggtccagggcgctggcgctgtcgtccaatatcaggatctctggctgccgtaccaaggcgcgcgcaatggtcagccgttgccgctgcccgccggatagattgcggccgccttgggcaatacgggattccagcccctctggcatggcgcgtacaaaagattctgcctgcgccatgcaaagcgcatgccatagcgtgtcgtcgtccgcgtccggccggccccattgcaggttttcccgcagcgtgccggaaaacagtacggcgttttgcggcaccaggccgatcttttgccgcagcgctgccatggattgccggcgcacatccacgccatccacccgcacggcgccttgctgcacatcgtaaaaccggggaatcagattcacaaagctggatttgcctgcgccggtgccgccaatgaggccgacggtgctgcctttggcaatggagactgtacagtccgaaaggctgggggcttgcgcgccgggatagcagaacaccacatggtcaaattcgatcttgggtacgccgcttttgggcataacgctttggggttgcacaggatcggccagagaaggctctacggccagcacgtctgcaatgcggtgcgcgctggcgtatcccttggaaaggatcacgatgaggttggccaaggcaatcagcgccaagaggatctgcgaaaggtagttgattagtgcgatgacctcgccctgtgtcaggcggccggcgtttacctccagcccgccgaaccagagtacgcacagcaccgtgccgttgatgataacataggtcagcgggttcaacagggcggagatgcgcccggcccgcacagcgctgcggcgcagctgggcgctggcatccgccatgcgctgcgcatcgtctttctgccgagcaaaggcacggattacacgcgccccctccaggctttctcttgtcactaggcccacatgatccagttttttctggatggtgcggtacagcggtacggtagcatgcaaaatgccatacagcaccgctgcagtcagccccgcggccaagagaaagaaaagcgcgagcttggcgtcgatggtaaaggccatcacgatggcgcccagcaccaaaaacggcgaacggatcacaagccggatcatcattgccacggaaagctgtgcttggttgatgtcgctggtaatgcgcgtgatgagcgaaggtgtgccaagcttatccagctcggcatgggaaaagcggttgatatgccggaaaaaggcgctgcgcagctcggtgccgaacccctgggaacagcgcgcagcacagtattggcagatcagcgcgcacatgagccctaacgcacctaagaaaaacagcaatacccccatcttcagcacatagccgccgtcctgcgtggcaatgcctacgtctatgatgcgtgccatgacaagcggcacgatcaattcaaagaccgcctctattagct

SEQ ID NO: 2438 - DNA, 23185 bp, Unknown
  16S sequences of unknown bacteria
agtctcgtgggctcggagatgtgtataagagacagggcccaaccgtcgccgccgaagcaccagatggattttttcaccaactgatccgcattgttttcaatgaccttcagcgccgcggcattcttgctatctgccttgatggcttccggcaacaaagccttaaccgcttccgccgcttcctgagaagccaaaccatcgtggcggtttgctttccagttttccaaagccgctttcaggtcgtctgcgcagccattttccagcacctcgtctaccttctgagcaacaagcgcttcacgctgtgcagcggcaacgcgcatgccgtagccaaattcggcgttgtcttcgaacaaggagtttgcccaagccgggccatgacccttctcgttcttggtatacggacaggtcggagaagaaccgccgtagatggaggagcaacccgtagcgttggctaccatcatacggtcgccaaacagctgcgtaatgagcttgatgtacggtgtttcgccgcagcccgcgcatgcgccggagaactcaaacagcggctgcaagaactggctgttcttgaccgtattgcggttgaatttgatatccggtttcggcagattctgggcaaaggtccagttttccgcctgctccatctgagaatccagcggcttcatgatcaaagccttttccttggccgggcagacgtctgcgcagttgccgcagcccgtgcaatccagcggggaaacctgcatgcggaactgatatcctgcaaagtccttaccgatcgcggcttttgcttcaaaggcagccggagcatccttgaggtcttcttctttgaccagtaccggacggataacagcgtgcgggcaaaccaacgaacattggttacactggatacatttatccatctgccattccggtaccttgatggctacgccacgtttttcaaacttggtggtgccggtgggcacaacgccatcgggggtaaaggtggaaaccggaagctcgtcgccatgcaggtaagcgatcggatacaaaacttcatcgaagtatttgtcgccggatttggcaaccatcggcgcaccttccgtggtggtcttccaggcttccggaatctcaaccttcactacgccttcgccgccagcatcgatggccgcgtagttcatgtttacgatcttttcgcccttcttgctgtaggatttataggccgcttgcttcatgtattcattggcatctgcatacggaattacatttgcaatcttgaagaatgcagactgcatgaccgtattgatacggccgcccatgcctacttcagcagcaattttcacaccgtcgatgatgtagaaattgatattcttgtttgccaaatcgtttttaaccttggccggcaagcgatgctccagctcttccggagaccactggcagttcaacaggaacgtgccgccttcacgcagaacgccggtcatgtcgtaacgggtaatataagaagcgttatggcaagccacaaagtctgccgtatcgatcagatagggagactggatgggcttttgcccaaagcgcagatggctgaccgtgataccgccagactttttggaatcgtagaagaaatagccctgagcgtacatatcggtatggtcgccgatgatcttgatggagtttttgttcgcgccaacggtaccatcggaacccaagccgtagaacatgccctggaacgttccttcgcccgccggattgatcttttccttgacctccaaggacaagcccgtcacatcgtcggtaataccgacggtaaagcgtttcttcggctctgccgccgccaggttttcatagatggcgttgatcatcgaaggcgtgaattccttgctgcccatgccgtaacggccgccgatgcatacaacatccaatttggcattgaacaaagcagtctgcacatcctgcagcagcggttcgcctgcgctgcccggctctttggtacgatccataaccgcaatgcgtttgacggtcttgggtagtgcttcgatgaacttctcttccacaaacgggcggtacaagcgaaccttcaccaggccgatcttctggccgcgttcctgaatgaggtagttcatggtctcctctacaccgtctgcgccggaacccatgatcacaatcacgttttccgcatcgggcgcgccataataatcaaacagatgatactgacggccggtcagcgctgctacctgatccatacattcctgcaccacgccaggtaccgcatcgtagaacttattggaagcctcgcggttctggaagtaggtgtccgcattctgcgcggtaccacgctgatgcggatgttccggattcatcgcgcgttcacggaacgcctggatggcgtccatatccgccagcttggccatgtcttcataatcgatgacctctaccttttggatctcgtgagaggtacggaatccatcaaagaaatgcacaaacggcacacgggttttgatggtggacagatgggaaaccagcgccaggtccataacttcctgaacggaagcagaagccagcatggcaaacccagtctgacggcaagccatcacgtctgcctgatcgccgaagatgtttagcgcctgcgtggccagagcgcgcgcgctcacatggaatacgcagggcagcaattcgccagcgatcttgtacatgttggggatcatcagcagcaagccttgggacgcagtaaaggtcgtggtcatagcgccagctaccaaagagccgtgcacagcgccagcagcacccgcctcgctttgcatctcaacgatgttcatcgtctggccatagatattcttacggccggccgctgcccattcgtcacaagattccgccatcggagaggacggcgtaatcgggtagatggcagctacatcgctgaacgcgtacgcaacgtgcgcggcagcggtattgccatcaatggtcaatgtttttgccatatggggggacctccttaaggttgtagtattgtagtattatcaatcaaatcccattcattataataaccttgtgcagaaatcgtcaagcgttatccgccctgttctacgggaagttttcccatttttttgaaaaaagtgcgcgtttttcacattttgccgaaaaaagcagcattcgttggctatgcaaccaaaagcaaatggaattttgctttgcgcaatccgccatgccaagaagaaagtgatggtatataataggtatatatgatcgcttatccaaggaggagttctccatgcagcagaccgttatcagccctttggccaaacgcctgtccccatacgtgcccggcgagcagccaaaggggaggcaaaagatcatcaagctcaacaccaacgaaaacccatatccgccttcgcctcgggtagcgccggcagtggcacaggcgatggaacatctccgcctatatcccgaccccaccagccacgcgctgcgccaagccatcgccaaagccgaagggttaagcgtggaggaggtctttgtgggcaacggctcggacgaagtgctggggctctgctttcccgccttctttgctggccaggcgcagccggtgcagtttgcagatattacctatagcttttacgaggtctatgcccagctattcggcgttgccgtgcaaaaaattccgttgaccgccgatttttgcatagacctgccggccttttgccaaggcgccgccggaggcattttgatccccaatcccaatgcgcccaccggcattgcgttaacgctgtctgagatcgagcaaattttacataccaacccacagtgcctggttttgatcgatgaagcatatgttgcctttggcgcgcaaagcgcagcttcgctcatcgggcggtatgaaaaccttttggtcgtgcgcacgctgagcaaatcgcacgcgctggcagggcttcgcgtcggctatgcgctgggaaaccggcagctgatccatgccttgaccagcgtaaaagacagctttaacagctatcccgttgaccagcttgcccaagccggcgcccaggcagccatcgaggacgctgcgtatacccaggcgcgctgcgaagaaatacaagccacccgcacttggttttgccaagaactgcgcgatcgcggctttaccgtacttccctcgcaagccaatttcgtattcgccagcccgccagacggggatggaaaggggtgctttgccaagttgagagcacgccaagtgctggtacggcactttgacaagccacgcatctccggctatcttcgcatcaccatcggtacccgcgaggaaatgcaggcgttgttggacgcgctggatgaggagggccagtaaatggatcgtttttctctgatagacgcccatgtacacacctccctgtccgacgattctcagtgcccgatggaggcatactgggcgttgctggaagatggcacggcccggggcattggttttgccgatcactggcatcctggcatcgaggcgtaccgcctccaatatcccggatatgagcgcaaagcttttgacaacaaagcctaccggcaaaaaattgaagagggccgcgccaaaggataccgcctgtaccgcggcatcgagcttacctatgaaaagcaatggcatgaggtctgcatgcagggtgtccaagcccagcggtacgactatatcattgcgagcgcccatacctttggcgggttgtggatcacgcgcgattattggaccaatctggagaccgggtttgctttttcctggatgatggagcaatattaccgagctgtgcgtcaatcgctcaacgtgccggagtttgacgccattgcacacatcggcatttaccggcgcaactatccctccgattactttttattacagtatgccaaagcgcagatcgaagatctggaagatgaaatcgccttggcggcggcgcgcagcggaaagatcatcgaagtgaatacctctgggctggcaaagccctccaaaacctgtctgcccggccccttctttcttcagcgctttaagcattacggcggggaaaagctttgtctttccagcgatgcgcatactgtcaaagacctgaacgtggggtttgagatcgctgcggatcagcttcgttcctttgggttttccgccatttactatccctgggatcctgagacgcctgtgcctcttccctcatcataaaaacggcttttgccgttttttttatgccaaatcttctcatctatgagaatggcttgcgatttttgtcgaaattatatagaattatggtgtatgcaatcctgggaagcgatggcttggccttgacttccgaagattgtttttttaatgaacaaagcttgcatgatgctccttatatttttataatgtggcaaatgcaggcttgtcaaaatttgtcgaacctgctaagcagccgggagtacccgctctttgtatgcggtgcgctgctcctaggtttagtacgactaacatatttttatcgttagaattagaaagagtaaaaggcgtgaacacacaaaaagaatttgtagattttacaaaggaaatgaaaaaggaccatgtgattttggttccagatatttttccagtgcatatgagccttttgaccgaagtgctgcgcatgtatggctaccaggtggagggattgcattacaccgggcaaaaagtgctggatgaaggcctacggcatattcataacgatatgtgttatcctgccatctgttcctgcggccagctgctgtatgcgctgaccagcggggattacgatcctcacaaggtagcgctgatgcactttcagaccggtggcggctgccgtgcctccaattacatcaagctgctaaaaaaagcgttggtggatatggggctgggctatgtacctgtgatctccttaagttttggcggtatggaaaaatacagcggatttaagataacgcctctgttgctgtataaagggtgtatttccctggtatacggagatatgctgatgcagctaaaaaaccaggttcggccctacgaggtacaccacggccaaacacagcagttggtagagacatggacggagcgtttagtctcccagtttaagcgcaatagggggctgacaggacgcagcatcacaaaaaacttaaaagccatggccgctgattttcatgccatagagaaaacctcggaaaaaaagatcaaggtgggcattgttggcgagatctatgtgaaatatgcgccctttggcaacaacgatctggaagaatttctcttttctcaaggctgtgaatatatggtgcccggcgttttggggtttgtgtattattgcgcttccggtaaactcatcgactgggagctctatggcggcagccggttttggaaatacttgggcgtgtttatggagcgcattctaaacggcctgcaaaataaattgcgcagcgtgttgtctgcgtatgacgagtttatcacgcctgcttcgtttccccatgtaaaagcattggcggaaacagtcatcagcaaaggcgttaagatgggggaaggctggctgttgcccgccgagatgtgcgaattgatcgaaaatggctaccaaaacattgtctgtgcccagccgtttggctgcctgcccaaccacatcgtcggcaagggcgtgatccgtaacataaaaaaccgctatccaaacgccaacatcgcacccattgactatgatgccggcgctaccaaggtaaaccaagaaaaccgcatcaagctgatgctggccgttgcgagggagtccctctgacggccttttgaaatggaagtgaatctaaaagtcttatgaaaagaataggattggacatcggatctaccaccatcaagtgcgtggttttgggcgaggacaataccctcttattttctacctaccggcgccatctgtcgcaaatttcccaaaagacagccgagctattgcgcgagatcgcggccaaggaaggggagggcacctatctcgtttctatctccggctctgcgggcatggggatggcgcaagatttgggcatcccttttgtacaggaggtctacgccaccaaaatcgccgttagccaatatgcgcctgaaacggacgtggtcatcgagcttggaggggaggacgccaagatcctgtttttgacagatgggctggaagtacgcatgaatggcagctgcgcaggcggcacaggcgcttttatcgaccaaatggccacgctgatgaacgtatcgacggaccggcttaacgaactatccaagggtcacgaaaaagtgtataccatcgcttcgcgctgcggggtatttgcaaaatccgacatccaaccgctcatcaatcagggagcgcggctggaagatgtggcggccagcatattttatgccgtggtcaaccagaccatcggcggattggcacaaggacgcgaaattgccggccatatcttgtatctgggcggcccgcttacctttttttctgaacttcgcgatagttttgaccatgtgctgggcacttccggcgttttgccggacaattctctactttttgttgcgctgggcgcggctttctccgatgcaggtcagtgttatgagctttccgccctggcggacaaggtttcccaatatgcgtcctctacaagctatgcccagcagcgagcctctgtttgcctcccaagaggagtaccaagcctttcaggcgcggcatgcgcatgattccgaccatatttgcacgctggaatcaccagcagaggatatgtttttgggcattgacgccggctctacgaccatcaaggccgtgctgtgcgataggaacggccacctgttccgccccttttaccgtaccaacagcggcaaccccgtgcccatcgtcaaggaatatttgcagcagctttacgccgattatcccaagatccacatcgcggcggccgcggtgacgggatatggagaagacatcatcaagcatgcgtttggtttggattacggcattgtagaaaccatcgcgcattacctggctgccaaaaagtttcagccaaatgtggattttatcatcgacgtcggcggccaggatatcaagtgttttaagatccacaacggtaccatcgacaatttattcttaaacgaggcctgttcctccggctgcggctcgtttttgcagacctttgcggaggtaatgggctattccatggaggaatttgccaagctcgggcttttggcaaaaaagccagttgatctcggtacgcgatgcacagtgtttatgaacagctccgtcaagcaggcacaaaaggacggcgcttccgtggaaaatatttctgccgggctttccatcagcgttgtaaaaaatgcgctgtataaggtcatccggtgtgctacgccggatgcgctgggccaaaacatcgtggtacagggcggcacgtttttgaacgacgctgtgctgcgcgcctttgaaaaggaaattggccgggaggtaatccgccctcatgccgccgggctgatgggggcatacggcgctgcgctgtatgcgctttcacagaccaacggccgtagcgacagccaaattgcggacgccgcatcgctcaaggcgtttacccatactgtgaaagcggtaacgtgcggcggatgcagcaaccactgccaactgaccatcaatacctttgaggacgggcgcaagtttattgccggcaaccgttgtgaaaggcctttgcatctgccccatccccccattcgccataccatctatgagtataaaaacaagctgcttatgcaataccgcgagaataagcgcgaaccaggcaagcctaccatcggcctgcccatggggctgaatatgtatgagctgctgccattttggtatacgatgttccgtgcgctgggctttaatgtcgtggtatcgcccgtgaccacccgcaagctgtttttatccggggaacataccattccttcggataccgtgtgctttcctgccaagcttttacacgggcatatcgaagcgttgctgcgcgaacaggtggacgcgattttctatccctgtatgacgtacaacctagatgagaaaaagggcgaaaaccattttaactgcccagtggttgcctactatccggaggtcatcaaagcgaatgtaaagggcctgaaaaatacggtattcatcgatgatttcgtggggctgcaccatccaaaagccttcccctcacgatttctcggcatcctgcaacggtattttgataagccttttacgctcaaacaggtaaaagccgccgccaagcaagcttacgccgcctatgatgcgcatatgaaaagcatccggcagaaaggcgccgaactgctacaactggccaaatgggaacataagccagtgatcgtgctggccggccgcccctaccacatcgatccggaagtaaaccacggcatagaccggctgatctgcgatctaggcgcaattgtgctttccgaggatagcgtttgccacgacattccgaaattcaaaactggtgtgctcaaccaatggacctaccatgccagattgtattctgcggcaaagttcgtggcacagtgcgatccaaaggacctaaacatcaacctggtacagcttgtctccttcggctgcggggtagacgctatcaccacggacgaaacgcgctctatcatcgagcaggccggcaagatctatacgcagattaaaattgacgagatcaccaataccggcacggccaaaatacgtttgcgcagcctgtttgccgtacagggcctttctgtataaaagaaaacacggacttttgtccgtgttttttatcgtttttcccagcgcatctcacattccatttcgccggtgtacgggtctatttgcgtgctttgcacccaaaatccttctcttagataaaagcgcttggcatcagcgtttttttggtacacatgcagcgtcagtgcttggcgcagacccttggccgtcgccaacagctgcttaccgatgccatgccctctgtctgctttgtctacgaaaatgccttctatatacccagcgctaagacctagaaagccgcgtatgcccagcgcattttcatacaccagcaccgtaacagcagcgcccatttgccccagcgcacgcttggtggtgtcggcatgccggcgccaatactgtgcatcaatgaaagcatgcgcctccagattgcttgccagccaaatttccatcagacgatctacatcgcccgttcttgcctctcgaatcattttctttgctcccggctgtcatacttgaatgccttatacgcggttaccaccgtatccagacaaagcgcaaagaggatcacagccaaaaaaatcaaattgatctgcccaaagaccgtactgagaaacgctgcatccccgctgaacaagccttgtatatacaagagaaactgcgggttcagaatagaactgcccagcaaaaaggcacaggacaatcccgcggaaagtaggtttgtggccgcggaaacggcagccagacgtttggtatatcggccttcgtacagctttacgctttcccgcagcacgcccagcaccgtgaacgcgacaataagaggccaagccgcctgtatttttgggacattgaagatcggcatccattgtccttgttcaaagtatacaccaattacctgcggcactgccaaaaagacaaacgcaaaaaggatgcagaatacaatgccgacgataggctccgctttgggaatacgctcctgctttttaggcaccggcggcaggtgcgcaatatcttgttctcctaggttcatgcgtacgcccttgcgctccaaaacggcaaaagccagggtgattcctccaaagctgcaaagcaacgcttgaaaagtctgcgccaagtactgtcccaatgcaagataccagggctgggcggcagcgcaggcagtgatcacagatgctaccgccagcccaaaggccactgccgccagtacaaggccaagtaaaaatttatacgccgcataatagcctggcccaatgagataagaagcgcgttccgggcggtatttggccgccaattctgccggacggcccagctccgtcagcacaacgagcacatcatgctcagtgggcggcatatcctggcagcgctcctccaacatatctgaaatgaggctatgcagttccttttccacatcctcccgcatgcgggccggcaaagttttggtaacggcataaatatagcgttcaatcatgtcctggtgcatcatcatcatcctccaatagatcatcgacgctttccgccgtccgtttccaatggcgcgttaaggcggagagcacctcatcgcccatcggcgtccggcggtaatactttctcggctttgcgcctccggtttcccagctgctctgcaaaaggccctgcccttccagcctgcgcaaaagcggatacagcgtattggcctctaccggcatatggtgcctgcctaagatcttgacaagatcatagccgtatcgcggctgtttgagctggcttaacacgcacagcacgattgtaccccgcctcagttccatcaaaaggccagccagggtttcctctttgcccatctcatcaccccatattgtttatcacattatactgtgtattacacagtattgcaacaaaaaaagaaggcccagcctccttttatctcattcttcttgttgcgcgccaaaaattcgctgccgaatacaccttcccgtaggcgttaccgccagccctccctgggcgctttctttaagggaaaacggcagcgactcccctacatgcttagctgcctgcaccgtctcgtcaaaggggatcacttcatccgccccgcaaagcgccaagtccgcgctaagctgcgcattggcagcgccgatggcattgcgttttacgcacggtacttcaaccagcccagctacgggatcgcacaccagccccatgacattttgcaacgcaatggccgcagctgtcaggcactgcgccggcgttccctttgccaattccaccagcgcagcagcagccatcgcagcggccgcgcccgtctctgcctggcagccaccctgcgcccccgaaatagaggcgtttgtcgcgatgagcgcacctatggccgaggcgcaaaacaatgccataatcagctcgtcatcctcatagccatgggtttgctgggccgcaagcagcacgcccggcagaatgccgctggcacctgccgtcggcgcagctacgatgcgccccatacaggcattgacttctaccgtagccattgccatcgctgcacccagcagcatatttttcccggaaaaggaaggcgtctgcgctgcagaatatagccttgctgcctcccctcctaccaagccgcccaaagaacgctgcggctgatccagcccacgcttgatcgccaggcgcatggtggtcagctgttgctgcatatccgccaacagcacctgcttgctcttgccctgtaactccgtctctctttccagcatcatggcgccaatggtctgtttcttttccttacagatccgaagcacctcgctgccccgcagcagttctatcatccttgttctctccttataccatggtcacctgttcgatggccttgtgcgcatctttgacattgctcagcactgccgtattcacccgatcatcggtttcgatgaccatataggccttgccgccgcgttctttacggaacacccgcataaacgcgatattgatgctgcattcccccaaaacacgggtaacgctgcccaccacgccgggttcgtcggtatggtccacgatcatcgtcgggtattctccggtaatctctacctctacaccgttgatgtttgtgattacaagattccccccgccgatggactcccccacgacggaggagctctttccgcctcggttgctcgtttcaatgcgcacggtgttggggtgtggcttagtttcctccgacaatatccagcggatctctagtcccgcctgctgggcgatggcaaaggaatccggcaagcgttcgtcatccggttccatgcccaagatgccggccaccagcgccttatccgtaccatggcctttgtatgtctgtgcaaaagagccatagagcgtaaatacgaccgaacggacctccggcccgccgatacggcccgcaatcttcgccagccgcgcagccccagccgtgtgagagctgctggggcccatcatccttggcccaataatatcgaaagcgcttaatgttttcatacgcctccccctccccttggcactctgtgtttagcatatccaatttttccattttatacaagcaaaaaaggacctgaatcaggtccttttcccgccttgctttattcatgaatcaaaacagccttgatacggcgcactccggaagaggagctctcctcctttttgatcttaaaccgccccaattcgctggtgcgtccggcatgcggaccgccacagatctccttgctgacatcgccgatggtgtataccttgacgcgctcgccgtatttatcattgaagatgcccagcgccccctgcgccctggcctcgtccaccgtcatttcttcacaggttatgggtagatcgcggcgaatggcatcgttgaccatttcctcgatttgatccagctcttctcttgtcaccttgcggccaaagttaaagtcaaagcgcaaacgctccgtcgtaatgttactgccgcgctgatagatatcgtctcccagcagcttgcgcagagaggccagcagcagatgggttgccgtatgcagctgtgccgaagcctccgtcgtatccgcaaggccgcccttaaagcgctgggtagagccggcctgcgattttttcttgtgctctgcaaacttctcttcaaagcctttttcatctacggcatagcccttttccgccgccatttctacggtcagctcaatggggaatccaaaggtatcatatagatggaacgcctgcgcgccatcgatctgcgttgtcttgccttccagttggcgtaccagtttttcaaattccttggtaccctgctttagcgtcttggcaaatttggcctcttcgcggttgagctctgtaagcacaaaagcctggttgcgcacgagttccggatacgcatccttgtatttttcaatgacggatttggccacctcttccagagcgtgctccggcatgccgatctgcatgccgaatcgcacggcacggcgaatcaaacggcgcaacacatagccttggtccacattgctgggcgccatgcctttgtcatcgcccatgataaaggtagcgcagcggatatgatcggcgatgatgcgaatggcccgctgcacttcgccgccttcttcatatttgcgaccggacaacgcctcgattttggcaatgatcgggcggaaaacatccgattcatacacacaaggcgcgccttgcagcacggcaatggtgcgatccaggcccatgccagtatccacgtttttctgctccaacggcaggtagctgccatccgcctgtttattgtattccataaatacatcgttccaaatttccaaatagcgcccacagtcgcaagccggcgaacaatccgggccgcagggctctttatcggtaatcaggaacatctcggtatccgggccgcaggggcctgtgataccggccggcccccaccagttattctctttcggcaggaagaagatacggtcatccggcaggcccatccggcgccaatgctcataggattcctcatcacgcggcgcatgctcatcgcctgcaaaaaccgaaacagccagatgctccgggtccaatcccaaataatccgggctggtcaaaaattcccaagaccattcaatggcttcctttttaaagtaatctcccagcgaccagttgccgagcatctcaaaaaaggtgcagtgcgaattgtcgcccacttcgtcgatatccccggtgcgtacacacttttgcacgtccgtcagcctggtgcccatggggtgcttggcccccagcaggtatggcaccagcgggtgcatgccggcagtggtgaaaagcaccgtcgggtcgttctccgggatcaggctagcgcccggaatcagagcatgccctttgcttttgaaaaattctagatacatggtgcgcagttgttcactggtcagctgtttcatcgtatttccctctctatccccactgaaattcagtttttttcgtaataatgattatactcagccgacatatagcctgtcaatgcaccgaggttggtatccgcggccatttcatggtataataatacggttttgaaaggccgcgcggcgtaaagcgaccagggaaaggaaggcagcttgcaatgaactcttccatggtgatccgtcccgtgtgccaggacgactatgagcccctggcctcgctgtatggttactatgcattgaatacagtatatacctattatagtaaggcccctacgccagaatatatggagcgcttatttaccggcaaggggcacctttcggcggtaggaaccctggggccgtatgtcatcggttatgtgcatatttcgccggccttttcactggtgcgtcgtttttgcaccatcgcagtgtacttgctgccccagcataccggcaggggatacggccggcagctgatcctacatggagaggaaatggcgcgcgcctacggctatcccaagatacgcgccaccatctgcacggaaaacaaaacgtcgcaggctgcgtttactgcgctggggtacatctacgcaggccaaaaaacctttgacgcaacaaaatttggccgagatctggatacattgtattttgataagcgtttatagcatcaatttttgtcttaaatgtggacaaaccataagaaattatgtatgatataccaatccagtttattatgtttcttgcggcattgccgtaaaaatttacgtgaggtgagtattttgacagattacgtaattgtaatcggttgtgcagtgctggcgctgattctggcgctcggcctatacctgcgcaacgcatccatcaaagtgaccaacccgcggatggaagagatcgctggctatatcagcgaaggcgcgatggcgtatctgcgccgtcagtacagcattttggctgtgttcatcgttgtgatgttcgccgttcttctcatcgcagggcttggctgggaaacggccgtatgttttgtcgtcggcgctctgttttccatcgcagccggtttctttgggatgaaatccgcgaccaagagcaacgtgcgtaccgcacaaagcgcttccaagggcctaaaggctgcgttggatgtagcgttttccggcggcgctgtgttgggcttggcggttgtcggcctgggcgctttgggcctgacggcgctatacatgattttccaggatacggatatcatcatgggattctctttcggcgctagttccatcgcgctgttctgccgtgttggcggcggtatttacaccaaagccgctgacgtgggggccgatttggtcggtaaggtagaagctggcattccggaagatgatccgcgcaacccggccgtaattgcagacaacgtcggtgataacgtcggcgacgtagccggcatgggcgctgacctgtttgaaagctatgtaggcgctatcatttctgcgatgatgctggggtatattgccatcaaatctatcggcatttcgctgacgcttctgctggtggccgctggtatcgccagctccatcatcggcattctgtttgtaaagcttgttggcggcaccaacccgcagcgttcgctgaacatgggcacgtatctgtccagtgcgctgatgatcgttgcttcgtttttcctgtgccagaatgtagacctgaatctgttctatgccattatctccggcgtcgtgtccggtttggtcatcggcgttgcaacggaatattacacctccgcggattataaacctgtcaaacgcattggcgagcagagcgaaaccggcccggctacgacgatcctgtccggctatgccattggtttgaaatccgttgtggttccagttttgatcattgccatcgccgtttatgtttccagtgagtttgccggcttgtacggcgtagcgctggcggctgtcggcatgctctctaccgtcggcatcaccattgccgtcgacgcctacggcccggttgcggacaatgcaggcggtattgcggaaatgagcgagttgccggatgagatccgcgaaattaccgaccacctcgattccgtaggcaacaccaccgctgccatcggcaagggcttctccattgggtctgctgctttgacggcgctggctttgttctccagctatgcaaccacaactgggttgtctgtggtagactttttggatccgaccgtgatcgtgggcctgttcgtgggcggtatgctaagcttcctgtttgctgcgctcaccatcgattccgtcagcaaggctgccaacaagatgatcgaggaggttcgccgccagttccgtgaaaagcccggcatcatggagggaaccgataaaccggattacagcgcttgtgtagatatttctacccgtgccgcactccgtgagatgatcctccccggcgccattgccatcattgctccgattctgttgggcgttctgcttgggcctgcctctctggccggtttgctggtcggttcgacgctgactggcgtattggttgccattcagatggccaatgcgggcggcgcttgggacaatgccaagaaatacattgaatccggtgcgcatggcggcaagggctctgaagcacacaaggcggctgtcatcggcgataccgtcggcgatccgttcaaggatacttccggcccggctatgaacatcctcatcaagttgatgagcatcgtagcgttggtgttcgccccgctgttcatgtaaaatacaataaaaaggagaggaaatcctctccttttttgttttcttatgatacaatacttaccatcacaataaaaaggattgagctgatttggagcaatcgtatgaacatccgctggatatgcgtgggctgaagtttatctattacggcatgttgttggggctggccgctttcttatttaccggcacgataaacctcatcatttcctttgggaaattcattgttatgatttatgggctatatcatctctgtaaaacggatctatgctatcgtgctccctggaactggtgctgggcttgcatggccttttcgttgatcgatcttggcatcaccctttggtttatctttacccagcatatgtacccatggtggttgcttgtcatcatgagcatcggcggcacagtgctgtatgtgctgtacatccgggcgctatgcaagtccaccgccatcatttcgcggcaaaccggccaaaatgcccaggtagagccgatcatatggtcacgctggcgttggctttggatcagccaaacggtttatatcatagcctatatcgtttatgccatcggtatccggttttcattgttcaacatcgcaatgattgtccagctgatgagcgtagtcaccttatttgtgatgacctgggtcatcgccatgttcaacgcttgctttcttgtattgaacaatcagtaccggatttatcccgagtatggcacgccatctctgacagatgggaagaaaaggaaatgaaagtcttacaatccttagcccttctgttctttttgtgctggatcggggatgtagtctctacgtatctgccgatcccaattccgggcagcgtcatcagcatggccctgttgcttttgttgctgctattgggcgtattaaagcagcggcaggtacagcctgtgggcgattatttgctggaaaacatgggcattctctttttgcccagccttgtcatggtaatggatgtatggcctttgttgcaaatgtatctctttgagatcgttttcatcgggattgttgtgaccatcgtcacctttaccgtaactgcgctgagcctaaaagctctgatggcctggcagcgcaaaagaaaggaggctcgccatgatagcccttcttgacacgccattgtttggcatctttctctccctggctgcttatgcctttggcgtattcattcataaaaaaaccggcctattgattttgcatcctttgcttattgcgctatgctgcgtcatcggctttttgtcgctaactggtgttcctctttcctattatgaacaagggggcaatatcatctccatgtttttgccggcagctacagcctctttggccctttccatttaccggcaacgggaggtactgaaaaagaattggcttcccgttcttttgggaacaggtatcggcgcgcttacctccatgctcatgaccctccttttatgccatctgtttggcctggatcagcaagtaacggtttcgcttatgccaaaatccgtgacaacgcccatcgccgtggccttgtgtgaacaggccggcggcatcactgccattacggtagtcattgtgatgatgacaggcgtacccggtgccatcttagctccttatcttatcaagtggctgaaaatcgaggatcccgtcgcgcaagggattgccattggaacgtccagccacgcagtcggcacttccaaggccctggaaattggagaggtacagggagccatgagcggtctttccattggcatcgccggcgcttggacggtgctgttcgcgttgtttttaatgtaaaaaagaccctttcgggtcttttttagtccctatttcgtgtaatcagcagcaatcttaaaaattgcagcagtgccaaaaatgtggaagccaaataggtcatagcggcagcgctgagcatctggctgacgccattttgctcctcctgcgtataaccgcccatttgataaatcagctccttggcccgtctggatgcgttgagctccaccggcagcgtaatgatctgaaacacaatgacggatgcatataagatcagcgctgccgtaaccaggccgccgagctccatcacaaagcccagtatcagcagcgggatggataagctggatgctaggtttaccgccggcacaatggcattgcgcatggaaagcggtacatagcgctgcgcatgctggatggcatgtccgacttcatgcgcggcaatgccgatggatgcggccgtggctcgcgaggcgacctcttgcgacaatcgcagcacccggctgcgcggatcataatgatcggacattctaccgccgatcacttcgatgggaacgtcgtgaaggccagcgttatccaaaaggcgccgggcaatctgcgcgcccgtctctcctttttgcgtatacagtgcctggtttttcttatagacatggctgacacgccattgggcccagcccacgattgccatccccaccagaactaagagaatggttctatcaaaataataggggaaaaacattaaacagttgcctccttgatttcagagtattgtagcacaggcgccctttgtccgcaacctcagtccgtctcgatgttggccatgcgtccctgttcaaaggtgcagcggaaatcatggagaacaaaggcgtcctcaaatagtttggccgctaagagcaaaactatttgctcttcttttcgtacttgcgtctcatacacaaaatcaaaagggcctaaaaatgcagccgcttcatccaaggagagctctgatgcccattctggaaccaagcaccaccgcatttcttcttgattgcggtacaaaactgcctgtgcaaacgcctccgccattttatccgggggcagcaatgctctctctgcaagaggcaccggcaaaatctcttcgctctggcgttgccagctatcattctggtattggtatgtcgtgcgccgctcatgtcctaacgcatccaaaagcgcctggtataccgtcaggcttttgccatccagctcggcacgcgcatattcatccaacaagacgcagtaccgaccctgctgataggcacagaacaaaaatctaggcccctttgcgccttgcccctgaatgaacagatccgcttgtgaaaacacggagacgatttgtatttcggcctgtgccagatcctcgacttggtagataaagctcagctcgccggtatcctgggcaccgatggcaaggtatgtttcccgctcttcggacagcgtcgcttcataggcaattccgtccaaaaaaaaggattggctagcaagcaaatgcggatatttgtggatggcctccgcgccaatagaagccagttgccaatggatgtggatcgtctccccctgcaaaaagcactggccacccaggggcgcttcgatgggctgtccctgcattagttgcagctttaccgcctttggcaaatatccctctgataaaggctgtgccgttaggtaaatggcgccgcttggcgaaacggggcagacgatttcctgcgtcgtatcgcctatgatttgcccgtttaggcttatgatctgtggaataggctgttttgggatatgaatcatcggcaatagcaacgtcgtccctcccctttcatttcctttcctcattgtatgaacaaaacgcatgcgaatagcacaacttctttgattgggaaaatgccaaaaagggctgaatctcgacttttttatacatagccccttatgatggggcataaggtatagtacacaaaagtgaaaagagcttgcttttcgcttttcttttttcctaggctcacgcataaatcactattttttgtccatactaaactcatcaaagaacagggggcgtcgatatgacagcaaagccgtccggcaaaacaggctggacacagcacgaacaagacattctatttgagcaggcaaaaaaagcccgagatctagggctgccgctcaaggcggcgttcgaccagactgcacgcctgaccggacgccagcccaacagcatccgtaacttttattatgcaaagattaaggaagaggggctggaagcgcccatgggggccagtgcatttattccctttaccgatgaggagatccgccatctgttagagcaggtgcttacgctgcaagcccaagggatgagcgtacgcagtatcacgctgaagctgggccagggcgatcgcaaggctatgctgcggtatcaaaataaataccgtagccttttgaaaaacaaccggcctttggtagaacaaaccatccaggcgctgcgcgccgctggcaaaccagcttacgacccctaccacgaaccccgcatcagcaaggcgggtcgcaaaccgcaaaaccagcgcgcacaggaattggatcaggcgctggtggagctgggcgccagcctgcaaaaggtttccgggttggatacatttcagtttttacagcaattgaccgcgctggcgtccaaggccgccagataaacaaaaaggcgctataagcgcctttttcctttatacctgtttgcttttttgccggttgtctgctttactaggaggtggaaagaggggattgtcatgcattgcaaaaaaatcttgtgcgtcttctgctgcttatttgcgctatgcttgtgcgcctgtacagcggcaaagccttcctatatcacctttacacagccccaagcagggtttaccatgcaggtgccggcagactggagccaacagacaactgtgctttccgatgaaatcattcaggcgtacccaaacggctttgatgcagcgtatgtcaacagctgtgaagaagccgcttatgtagctgcctggaatatcccaggccaaagcgccaacttttccgtacttttaatccggccctctgcttttgatttcgatctgttcgatgcggaagcgatgattgcgtatctagggttggatccttcgctatatgaaatttctttggccgatgaagaaactttgtcccaggaaaaagaagaaatccgtacgctgccctttgcaggtacgctgacgccgaaagaccccaaggctggagatcgctgcgcagcttggcgtgtgattaccagccagcgcggcgcttatatttttaccgctgactggacttacggcgatacacaggcgccggaaatctttgaaactatgctccgcagtttttctgttttatgacctcattcttgacagaatgcttcccttcccattatactaagccttacaaacctgctggtttgcgaagggagcacgatttttttcgatggacgacgctgatacaggcgacaccaccccaaaaaatgattcaaaattccatatttgttgcacgcaaggcatagcctgcttttccaaggaaaggtcggggctatgtctttttgtgtatgcatagcatggctaaagccaaaactatatactatgaaagacctgctaataaaagtcaagtagaaatttcagatttttagggaggcgaaaa

SEQ ID NO: 2439 - DNA, 32759 bp, Unknown
  16S sequences of unknown bacteria
ggacagatatcacaaaataaatgtatatatgtatgagcattttaccgagagcataacggtaaatgaccttgccgacgagcttaatctgactccgggctatgtgtctgaatatctgcggaaaatctcggtaggctttcgaaatatgctttcctacaggagagccaatatgtcggagccgctgctgcttggcactgacagcactatagtgcagatatccgaggagtgcggattttcagatgtaaaatatttttacagcgcctttaaaaaatggtacaactgtacgccggcgcagtttcgaaacaaatacggcggaagcagcacacgggcaagcagaattttgtattattcactggagaatatacgaggagagcttgacagcagtcttgttaatcactatctggagatgtttttaaagtagtttaaaaacctttaagaaacaactgaaaaaaataaggtttacaaatgaaacgataaaactcatttaagtataagctttttacagccgaggactatttaatatgatagaaatatttttaaaggcaaaaaacaaaaaagtacttaaaacagatataatacttcttgccgctatgattttagcatactccccgaaggtgaattgctgtattcaaacagtaacccgacagtagaatacagagtaaacatttacatttgtcgcaacagtttaagtgcagatgccgtaagggcagaaacagaaaacacagagaatggaaaacgtcgaaatatctactggtatcaagaataattataaaattacaggcttatttattaggcctgtatttttttatattaaaataataaaaatataaaaaaaggaaaaattatcttgacaaaatatgtaatcgagaatataatgacgatacccaattaattggatgtgaaaggtgtataaagaaaaatgtgtaaaaaacaaaaattgtgtgaaaggaatttaaaatgggagaaaaaattaataaagggaaaattacaataaaaaagtatgggcaggagcataaatttgagaataatgcgctgcttttaagacggggagagcctcttcagggtgccggatttgaaataacggcggcagaagatatcagaaactgctgcggcaatatcgtctgcaatgagggcgaccttgcagcccacacccttataacagacgaaaacggtattgtacagacagatgaactggcatacggcagatataatatttatgaaacagatgcaggtgaaggctacaagatacacgaaaagcacgtaacacaggttgaactcaaagaaaaaaatcttttcgtaaatgtggacagcgatttaatactggggacactaaaggtacttaaccattcgcagtatattatgactttcagcatatacaacgacaaaagaaagcttatacttaacagcatagcggatgacggctgcgcgataagctttgatgaaatgcttcctgtaggtacatattactacaaggatatcaataataatctggcgaaatttaaaatcgaaaacgatacggatttagtgcagattgaagcaggcaaaagcagcacagaggtaaaaacactccctaaaaaccgcagtgaaaacgagttcgcattgtacaaggttgatgattcaggcaagcctttaatgggtgcagtattcggtcttattgatatatacggcagtaaaatatgcttctcctgctctgacagggacggcaaggtaacgtttaaaaacctcaaaaaaggcacttatcttgtcagagaaatcgatgctccggagggatataaagaatctgaaatgaacgttatatttacagttgacgacgactgggtaaaccagagcgagcgaattaaccgcggagcaaaatttgaagatgtgtatatagtcgtttccgatgagctgtatacagagaatgagaatatattcgatacaaatgatatgtgcagcagggatgaggaaatcaccacagcggcagaggaaatcacaaacgtggcaggtattgtactctcggcagaaataagatagcaggtggtcagaatggaaaaatacttaaacaaggaatttctgatgcagcataagaaaaaaatcatgcagataggtgcagttgtactgatacttattgttgccattgcgatttatgccgcaggtcacagtgataaaaacgacgatattgatattgcccagaataataacgaagctccggccgctgttcagaatgaggagacagaggaggttatcatcgatatatgcggcgctgtaaatgacagtaaggttgtcacacttccggcaggagccagagttgaggacgcaataaaggcggcgggcggcattacagacgaggcggacctctcaggcatcaacagagctgcggtgcttacagacggtgagaagatatacatacctacggcagatgaagttgagcggggaattgagcttccctccacagaaagtaatatatcctctgacgacagcataaacataaatgaagcgacagcagaggagcttgaaactttaaacggcatcggacctgtaaccgcagagaagataatacagtatcgcaccgaatacggtaaattcgagaagaaagaagatttaatggaggtaaacggcataggagaaaagacatatgcacagataaaagacaaaataagggtatagacaataaaaattatggcaacactacctttaagaggtggtgcttatgttcaacagaaaaaagagaatatacgaaaaaaaaggcttttacattctgattatgtcagttctccttatagccttaggaatatttgcaattccatggggaggcggagaaaatgccgatgccagcaatacagcggcccagacccctgtgcctgatgaggaagataactggtgggaggacgatgaagacgacgaggaatacacagatgatgataacgctgataatactgagaatacagacgaaaataggcagcaaaacaaactcgatgatatagataaaagccagcttccgtattatatggtactggaggaaaacggccttataagcgtatactattacgataaaaacggaaacatttccaaatacaaggacacagaaatcacttacagccttctaaacgaagcagatcagatgtctttttcagagggtataatggttaagacaaaggatgctcttatggagcttcttcaggactttgaaagttaggagatatgtaaatgataaaatcctctaaaagaactgtaatattccttgcagttcttgcttttatacttaccgggatatccgcctgcggcatgcattccttccggcagaacagtcaggcggttaatcttgtatcagagaaaacacttattcccggaggcgagtcaataggtgtcagaatggacgttgcaggcgtacttattgtagaccttgagggggcggcagaatattcgggactgaaaaaaggcgataaaatcattgcagtagacggaattgaagtatcaaatgcgcaggaggttcagaaacttgtaaaccgtatcagaagcagcatagagcttacagttgaaagaaacggcggcagcagaaaatatacgatagttccgcaaaaaagcggcagtgataatacttaccggcttggtatatggattaaagacaaaacggcaggtatagggactctgacctattatgataccgacaatatgactttcggggcactgggtcacccgatattagacagcgaaacgggcacaacgcttgatatcgaaaaaggagagctgctttcgtctgaaataatcggaatagaaaaaggcacaagcggtattccgggggaaatacagggagtatttaaaactcctgacagaccgctgggggaacttattaaaaacactgactacggaatatttggtacaacagtcgatatgacttcccaaaaggaagctgttcccatagcataccagagtcaggtaaaagaggaaagcgcatatattcttacgacattagaagataatacagtgagaaaatatgatgtcgaaatcgagaaaaaagaaaaacagacttgtgctgacacaaagagtatggtaatacacgttactgacaaaagacttatcgaaaaatgcggaggtatagttcagggaatgagcggaagccctataattcaaaacggcagactcatcggcgcaataactcacgtatttgtcgatgaccccacaagaggctatgcagtatatattgaatggatgctggagcaaagcgacggcattatataatcccgaatgataaatttcactaaacacattaatattattacagcaaaaacagcttttcgaaacgagaagctgttttttgtcgaaatttgtgaaaaaataacttacaaaatatgtggcacaatagtgagaaatatcttacaattttattgtagtttttgatgtttattaaaaattattcgattattttgaagaaaggaggtgaagaaatgaaaaaaatatcagtgggagttgcagatgataacagggactattgtgacctgatatcagactatttttccagcaataaggaaatagagatatcttttgtagcaaatgatggaataaaaacgatagacagcataaaaaagtacaatccggaagttttaattttggatatggtaatgcctcgtcttgacggcgtaggcgtgcttgaagaaatgaacagtatcgaaatggattcatatcctaaaataattgtactttcagcggtaggacaggaagcttttacaaagaaagctataagtctgggagcagattactatctggtcaagccgcttgatatgaaactactggaaaagcgaataagacaggtttctggcaaggagcagtcagtaaatgataacaataatctcaatatgtcaaagggaataataaatcctgacagaaataatgccacagatctggaggtagaaataacaaatataatacatgaggtaggtgtgccggcacatataaaaggctatcagtaccttagagatgcaatatcaatagttgtaaatgatatggaaatgctgggcgccgtaacaaaagagttgtatcctgccatagcagaaatgaactcaacaacaccaagtagagttgagcgtgcaatcagacacgccatagaagttgcatggaacagaggaaaacttgaaactatagataaattgttcggatacacagttcataatgataagggtaaacctacaaacagcgaatttattgcaataatagcagacaaattaagattggagcgtaaggtaagctgatccgtaacaataaggatcaaaacaggacttataatatattgatagtaaaaaataatgaacatatatagaacattttaaacttctcttgtttatatcatagacaagagaagtttttttatgacctaaccccatttgtaaagcaaatttatgattaatttgcttgaattttcactgaaaatgtaatttattgtaatttgtctgcctgtatgatataattaacatatatttaagaaatgtgttagaatagatagaattaatatacagaggagttaataatggaaaacagaattaccaaggatcttgtagatagaataaacgtacttgcaaggaagagcaaggcagaggggcttacaaatgaggagaaagttgagcagaagctgctcagagagcgttacctcaaggctttcagagagaatttcagagcccagcttgaaaacatcgaaatcgtggatgatgtagaaaaaaccaattaaatgcagacaaaagacgaagcaatattcacatattgcttcctttttattttacaatatctcttacagggggtaggggattatgaaaaaaaggtatcttgtgttaactgtggtaattcttatagatgcatgtatactgcttacaggctttaacaatgccggaagcgatgcagagtatctgcttgagcagaggacaaacctgtttaaactgctgcaatacggcgagcttacacagaatacagccataaagcggctctatgaaatagaaacagggcagcagcttgaggccgatattggatatgtggagagcttttctaatacggaaatatgcagagtagaggagatgtacataaaaaagcttgagcgtacagtcagtaaatcaggctatgaggtttacagcgcggttatagactggcgcttcgaaaaagggctgtatgagagcatcagatacacagtggttatcaaaaaaacaggtgaaaaatgtaagattgccggaatatctgtacggcaataaaaaaattaatgatatttatgcgtatttttaataaaaatattaacaaaaactgtttaaattctgcgggaatttgttataataaagattagtgtataagatagaaaaaggagtatttaatgaaaaacgtttatttagattattcagcaacaacaccggttaaagaagaagtattaaaagaaatgctgccttatttctctgatatgtatggaaacccttccagtttatatacaatgggtcttgaatcaaaagacgctataaccaaagcaagagaacagctggcagcacttatcggagctgcacctgcggaaatcatattcacaggcagcggtaccgaggcagacaactgggctctcaaaggcattgccgaagccaaggcttcaaagggcaatcatataatcacatcaagaattgaacatcacgctatactgcattcatgcgaatggcttgaaaagcacggatatgatgttacctaccttgatgttgacagcgaaggatttgtagacattgagcagttaaaggcatctattacagataaaacaatcttaatcagcataatgctggttaacaacgaagtaggtacaattgagcctatcaaggaaatcgcggcaattgcaaaggaacatggcatcataatgcacacagatgcagttcagggccttggaaacgtacctattgatgtcaaggatctcggtgtggatcttatgtcgatgtcaggacacaaaatatacggacctaaaggaataggcgcgctgtatatcagaaaaggtgtcagacttccaagcttcattcacggcggagctcaggaaaacaaaaaaagagcaggcacagagaacctgccgggcatagtaggcttcggtaaggcagcagagcttgctgacaagaatctggctgagcatatcgaaagagtaagcagccttagaaactatttcatagacgaagtcaaaaagaacataccaaacgtctttgtaaacggcagtatggagcacagacatccaggcaatgcaaacattacattcgaatatatagagggcgaagctatgcttctttaccttgatgcgcagggcataagcgtatcgacaggatcagcatgctcatcaaaatcactggagccgtcacacgtactttcagcactgggagtaccggttgaaaaaatccacggttcactgagatttacagtaggcgaatttactacaaaagaagaccttgactatgtagtagaaaaacttgctgcaacagtagcaaaattaagagaaatatcttcagtatcagaaaagaaaggttggtaacagatttatgggattatataacgataaagtaatggatcattttatgaatcctcataatgtcggagaaatagaaaacgcagacggtacaggtacatacggaagccctgtatgcggagatatgatgcagataacactcaaaatcgaagatgatgttatcaaagatgctaaattcaaaactttcggctgcggttcggcaatcgcatcatcaagcgttgcaaccgatatgattatcggcaagacaatagatgaagcccttgcaattacaaacaagcagattatagacgaactcggcggacttccggctgttaaagttcactgctcagttctggcagatcacgcaatcaaatcagcaatttatgactatgcccagaaaaacggcaagacatatgcgggacttgagggctttgatcctgatgcagacgatgacgacgaacacggctgtacagaggaagaataatttttaaggaaaacaaagatgaattacgatttagataagaaaaaagtagttcttggtttaagcggcggggtggacagtactatcgccgctttattattaaaagaacagggatatgaggttacaggtctctactttgacatatcagagggaaacgaggcaggcaaagcggcagctgagaaagttgcatcagaagccggcatagactttgtgtacaaaaatgttcacgaggaattttacggaacggttgtcgataacttctgcaccgaatatatatccggcaggacgccaaacccatgcatcgtatgcaaccccaacgttaaatttaaaacactgacagaatatgcagaccatataggggcatactacatagcgacaggacattatggctcatcctgctatgacgaaaaaacaaactcatggtatatcagaagaggcaaaaatctcaaaaaagaccagacatatatgctatacagacttccgcaggaagttatatcaagatttctgatgcctcttgaaaaccttgaaacaaaagacgaaaccagaagaatagcagatgatgcgggcatgagcaacgcgcaccaaaaagatagtcaggaaatatgcttcatacctgatgacaggacatatcttgacctgttaaatgagatgggatacagggcagaacccggaaacttcatcgaccttgacggcaatgtgataggggagcatcagggaattgtcaactttacggtaggacagcgcaagggtcttggcatgacatttggaaaaccgatgtttgtacttgggcttgacaataataataatacggtaacacttggagataacaaagaccttttcagcaataccgtatattcaaaaaacaatttctttacagccacaggaaacggtactatgcccgaatactttgacggtacggaagtcgaggcaaagataagatacgccgcaagacctgccaaagcagtaatcaggcagaccggtgaggatacggtagaggctgtatttacagagcctcagagagctgcaactccgggacagtccattgtattttattacaaagacatggtaatcggcggaggcttcatagaatagcaaaaaacagcgcagcaggtaatatctgatgcgctgtaaacatatctagaacataataattgcccgaacgggacatttaggggcgcagtatccgcaggtcagacatatgctgtggttcacttccgcaagtccgtctgaatttctgaatatagcgtgatttggacatctttcaatgcatgcgccgcagccctcacagtcgccctgatcaattcttatcttcttcttagaaacatcaggctggaaatccggcttcataacaccgtctatataatcgcaaatctgatcaatctcgtgagttttgccaaagcctatcatcatagaatcaattcccggcagattttttacataatcaagagcctgctgataggtacctgtaagattaccgcccccaaaaaccttcattgcaaaaacgcctttgcctttttcagagcacagctttatagcctctgccatagactccctggtaccggggccgtcgccgcatctgataccgaggctctggtaattgataagaggaaacagtatgtcacactccggaatatcaacaactttgtgagccacatctgtgtgatgagtcgaaacgccgatagctttgataatggcttttgccttgtaatcgttaagacattcccacgcgccggctctgagctctaaatccggatcatttctgacctcgtgcatcagaaatatatctataatatctctgtcaagctcctttcgggcctcctcaatggcaaactccatatctctgtatgtgtaatcaagacatttagaggctattacaggctcaaacctgccgcctttcagagcctctcgtatatacggataggtctgataatactgggctgtatccagaaaattgatgcctttttcaaaagcatatctcagtacggcagcgccctctgcaaccggcagattaagctgtgagccgcctacggtgagaacgccgaagcctatcctgcttaccttaattcctgttttacctaattcactgtatttcataatattactcctcccggttcaaaaaattatatcatatttagcgcagatgtggaaaccataatattaaaagtaattgaacaggagggatattatggccagtgcagcaaaatgtattttaggattgggaatagcaggagctattgcaggaacaatgctatatgcgtcaatgcctgaaaaaaagagaagacatttaaaaaacaatgtatgcgatatcgctgatgacaccaacaaaatgatacacgatatgatgtaaaccttaaacttctgggagttactctcagaagtttttacaatatgtccgaaaactgatgactttacgcctctcttgtggtagaataaataagttataaagcaaattttacggaggagagtaatggaaaaactaggtttaaatgaaatcagagaattattccagaatttttatataagcaaaggacattataagaggcagagcttttcacttatacccgaaaacgacaagagcctccttataatcaactcaggtatggcgcctttgaagccatattttgcaggccttgaaacaccgccgagcaaaagaatgacaacctgtcagaaatgtatcagaacaggcgacatagacaacgtgggacatacctcaagacatggtacattctttgaaatgctgggaagcttttcgttcggtgactacttcaaaaaagagtcgctcacatggggctgggaattcataaccgaagttctcaaaatgcctgaggacaaggtatgggcgacagtttacgaagatgacgaacaggccgttgaaatatggaaaagcataggcatgcctgccgaaagaatagtcagactgggcaaggacgataacttctgggaaatcggtacaggcccgtgcggtccgtgctcggaaatatactatgacagaggcgaggaatacggctgcggcagtcctgactgcaaaccgggctgtgaatgtgacagatacatcgaattctggaaccacgtatttactcaattctccaaagacgacgagggcaactacagcgaccttgcacaccctaatatcgacacaggtatgggacttgaaagacttgcatgtattatgcagggcgtagactccatatttgatatagacactatcaaatacatacttgacggtgttgttgaaaaatcaggtatcgaatacggcaacggcgcaaaggacacagatgtaagcatccgaattataactgaccacatcagatcactgacatttatgattgccgatggaattatgccaagcaacgagggcaggggatatgtactaagaagactgctcagaagagcggcaagacatggcagaattctcggaattacaggatcattcctgccggagcttgcagacagagtaataaaggtttcaggcaaggcatatcctgaattagaagaaaaagcagactacatcaaaaaaatactttcaatcgaagaagaaaaattcaattccacaatagatcagggtacagctatccttgatgaatatatgcaggaaatgaaagcagcaggtacagacagacttgagggcgaaaaagcattcaagctgtatgacacttacggcttccctatagagcttacaaaggaaatccttgaagaacagggatatacaacagatatagaagaatttgaaagctacatggaaaagcaaaaggaaactgcaagagctgcaatcaaagacaaggacagcgtaggctggaaagaagcaggcgcagagcttgactttgacaagacacagtttacaggctacgaaacaaagacatgcactgccaagatacttgctatactcaaagacaacgcacagattgcagagtcagatgctgcggcaggtgaagtatctgttatacttgacagcacaccgttttatgcagaaagcggcggacaggttgcagatacaggtataatcagtacagacagcgctgaagctgcagtaacagatgttcagaaaacaaacggaatatttgtgcataaagtaactgtaaacaagggaactctaaaagcaggtgacgaggttaaggcagcagttgatctcgcagtaagaaacaatattgcgagaaaccatactgcaacacatcttctgcacaaggctcttaaggaagtcctcggaaaccacgtaaaccaggcaggctccaaggttacaagggaaaacctgagatttgacttcagccattatgaagctgtaagcaaggaagaccttgcaaaagtcgaagctcttgtaaatgcaaaaatcaatgaatttacagatgttgaaacagaaatcaaatcagcagaggaagcaattgcagacggagctaccgcactgtttggcgaaaaatacggcgatacagtaagagtcgtaaaaatcggtgatttcagtaaggaactctgcggaggaactcacgtttcggatatcggtgaaataggcgcatttaaaataacaagcgaaagcggtgttgcagcaggcgtaagaagaatagaagcggcaacaggttacggtatttatgaaaaatataatcagaatacagccgtaatcaatgagactgctgaaattctcaagacaaaccctgcaggcatagccgaaaaagctgcagcgcttgctgaggaagtaaaagcactgaaaaaggaaatagaggagcttaaaaaacaggcaatgggcgaccagatgggtgatattctggcagaagctaaggatataaacggtgttaagctgattacaaagcagtttgatgacctgactataaacgacctgagaactctgtcagatgatattaaggcttcaaacaaatcagttataatggtatttgcggcagtaaacggcggcaaggtaacatttatggtttcaattactgatgatttacttgataaatatcacgcaggaaatatgattaaaaagattgcagcagcggcaggcggcggcggcggcggtaaggctgatatggctcaggccggcgcaaaggattcaggcaaggttgcagatgcatttaaggttgcagaaactctaatataagtaaaaatacttattgtttatttcttccgaagcaagtataatataggtaatatataggaggtaagctatggataagagaaacactattatgtataacgctgacaagcttgaaaaaagatcaactgcagacatacttacagatgtttataatgcgcttgacgaaagaggatataacgctattgatcagatggtcggctatatcctgtcaggagatccttcatatattacaagccacaacaatgctcgtaatattatatgcaggctggaaagagatgatattgtagaagaaatgctcagagcatttctgaacaaataaatgacattgaagcaaacggtattcggtcaatctgcctgataccgtttcttttgtaatattaaaaagaatgaggacattatgagaaaaataggtttagacgtaggagataagacgattggtgttgcagtaagtgatgcattaaatatcacagcacaaggtataactactattgaaagggtagggattagaaaagacgcgggtaaggtaatggattacatcaaggaatatgactgcgataccgttgttataggactgcccagaagtatggacgggcgtgacagccagcagactgaaaaggtatatgaattcaagacaatgctcgaaaacaagatgaaaagcagcggtatgggaaatattaaaatagatttctatgatgaaaggcttacaaccatgatggctgaacgtgttcttatagaagctgatatgcgcagaaacaaaagaaaacagataatcgacaaacaggctgcggttataattctgcagagctatctggacagtaagtgctaaattaaatacttattaatgacataaatgttccttgtttatgtcattttttattacctgttctactctttcagttcgttttgattgacaaaatataaactgaaagggtaaaattgttattgtaaatattaactatgaaaattttatataagttttgcaaggaaacaaatattatgattattagtgcaagcagaagaacagacatacctgcatactatgcagactggtttataaacagaataaaagacggaaaaatacaggtaaagaacccaatgaatacacatcagataagtgagataaatctatctcctgatgtagttgactgtatagttttctggagtaaaaatcctttaggtataattaacctgttagatgaactaaaacgctataattactattttcagtttactttaaatgggtatggcagagatattgagcttaatcttcctgacagagataccttaataaagctgtttaaagacctatcaggtaagattggaaagaataaagtaatatggagatatgaccctatacttattaattctaaatatacaaaggaatatcatatacagaactttaatggaatagcaaatagccttaaaggatatacagaaagagcagtcataagttttgtagatatgtatgccaaaacaaagcgtaatatgaaaaatctctcaatagaagagcttccagaaaatgatatgcatgaaatagcgagagaattatccataatagcaaaagacaataatatggatatatattcctgtgcggaagcaattgacttatcatcagacggaatagagcatggctgctgtatagataaaagcctgataggggaaatcattggaatgaatttgaaatgcagtaaagataaaaaccagagagagatttgcggctgtattgaaagtattgatataggagcttataatacatgcaaaaacggttgcagatattgttatgcaaactatgatgactatgcagtaggtgagaatataaagctatataatcctgatagtttgttgctttgcagtgaaatgaagccggcagataaaatatatacaaaaaagatgaaatctcttaaagatgataccggtgaattaataggacagttatcgataggaatataaattaataataaaaaacaaataaccaccgttagtgtcaattgcggttattgtggctccaaagactttcaatagtaattggagtattgggattagttttgttaaccctagtatagcatagctataagacaaacacaagagagagggggcatcttatcaggtgcttccttaattgtgattttaaataactattcctaaaatcacaattttgggaatagttatgataagattgataaccttgagcatgttctttgccaatatacccaaggctaccggtttgttttagagtttaaggattattataatatgttaatgataaatattataatctgtatataatttaacctcttttgagaatttgtctgaattatcgaggctctattttgcgttttaagcgattttaatatgtatgacggtgtcctattaccttgaaaaaacttgttaaataaggcttatgcgtattcaggtatcagtattgtctgtcccggctgaagctggctgtctatctcattgacattctttataatatgaactgctttgcgtatatccatatctgacggcatatattgttcggctatggtccataatgtatctccggagtttatgttgacttcgatgtattcctgctttgtcaggccaagcgcatcatttaaaccaagcattgtattaaataagcctgtaactgcaaataacataataagtacaaatgctgtaaatctaactcttgattttacctttaaagtctttttcataacactcacctctctaaacatttgttcttgaacatattataaacgaatgtttgttcatagtcaagaggtaaattaaacaaatgttctaaaaggtgaaaaatatcctgtgctttgagatacaggataaaagtatactctaatattccggttattgcaatttctaattgatttctaataaatatgcagagccgtaatgactctgcacagatatcagtatttcagatgactgagcttgtcatataccctgtcgctccagtcaagtattttctgcttgtttttcagacacagcagcgtaagtattataactgctatgacgagaactaccacaagcgcgtagttttctgtctttgtaaatgtaccaataagtatgcttcccatcattgcaggtattcttgctattgaggatattataatgaacggtccccatttcagatttgaaagccctgcgatgtagtttacaaagtcttttggaaatcccggtatgaagtacagtacaaacagcagtatatatccgcgtttggagctgaatttctcaaggtattcaacaactttcatctcgccgaagcaaagatacataaaatctctgcccagaagcttagcaaggaagaatgtaatagttgcccccaaagcaatacctattgtcgaaaacagcaacgactgccacggaccgaatacatatccggccgcaaactgaaacggctgtccgggtataacacaaattataatctgtattatctgagcaccgatataggtgagaacacctgtgcttttgtgctctgtaaggtaattttcaatatcactgacacttgtaaactgcgttataaagtcacgctggaagaaataaaagtacagcggtattccgacgagaataaccagcagaataaatgctttgaaatatatatttattctttttcttttctgttcagtaataatcatatctaatctccgatccttgtcccaaaaccctataagcttataagctgttcatcgtaaagcttctgaagagcctttataactccgaactttgaatgttcgtaggttataccgccctggaaatacacattgtatggctctctgatcggcgcgtcggcagaaagctctattgacgagccctgaacaaacgctccggcagccattactacaggatcctcatatccgggcatatcccaaggctcaggactcacataggaatctattggagcagcagcctgtatgcccttgcagaaagcaaccacagcttccggagaaccaagccttatagcttctatgatatcgcttctttcatcctccggcttagggcagacatcatatcccagcttttcaaacaccttgccgcatagtattgctcccttaactgcgccgtttactgttcttggcgcaaggaacagtccctgaagcatagttcttgtctgtccgaatgtaagtccgcattctccgcctattcccgggcatgtcattctgtaggaaatcctctcaacaagatctgctctgccggttacatatccgcctgtaagcgcaagtccgccaccgggatttttaataagagagcccgcaattatatcagcgcccacctgtgtaggctcatatgtatgcagaaactcaccgtagcagttatctaccattcgtataatatcaggatttatttcgtgaacaaattcagcccattccttaatctggtcgattgttatggcctttctccagccgtagcctgtggccctctggactgtaaccattttagttttgtccgaaattgcgttttttaatgcttctaaatcgatatttccctccggtgtaagctccacctgcttgaaagtaacaccgtattcttttagagaacccttgccctctcctcttgttccgattacctcctcaagagtgtcataaggcttgcctgtgcagtagataagctcatcacccggcatcagaagtcccatcagtatcagtgaaagcgcgtgtgtaccgtttacgattatagggcgcaccagtgaactttcggtaccgaatatatcagaccatactctttcaatggcatctcttccgggatcgtcatagccgtagcctgtgttccacgcaaaatgtctgtcgcttattctgttcttttgaaaagcatcaagcaccttgtactggttataggtcattatgtcatcaaactcgtcaaaaattccgatgacttcctgctctgcctcattaaccagattaagcaccttttcattaattccgaattccctgtttaagagattaaaagtgttatttttcattatttccttctttcctttccagttcccattccatatctgtaacaagatttctttttacattctttttgtgagcagcgtaaagctgtgttgttgtaacctgttcgtgatctaaaagcgccgccacgtcatatattgaattgcctctgcctataaggctggttgctgccgtggcacgaagcttgtggggggaatatcctccatctcttgaggttttcatgccgattgaggtgtatttcctgacaagctctcttatctgtctttcggtcattctcctgccctgaagcgacaggaaaagagcgtccctgtgttcctctgtcagtgtattctccgaggctctttcaagctctatgtattccgtaatcacctcgtatactgatttattcatcggcattacggactccttacctcgttttctgtatatcttaaattcacctctgttaaagttaaacgatgaaatattaagctgctgcagctccgaaagacgaagcccgtatgtaacaaacagtatcagtatggccttatctctccgttttgttttctgccagtattcctgttcttttttggtaagaccgtttcccgttgtgacggcatcaagcataagcataacctcatcgtcctgcaaagccttgatttcacgctctccggcctttggcactctgatggggtcaaagccgtcggtgatgtttttgtcaagaagaccgtctctgtaaagctgcttgaacattacggaaaccgaggatttcttgcgcgcaagggttttattgccgttttcatacactatgactgccttgtctgtttcaacctgatactgcctgcagtagtctataaacaggttgacatccacagccgttatttccttaaaatcttctaattttatatcctttatatcactgcaatgtgtcagatctgtgtcatttacaagataattgaaaaaaaagcgtatatcctgcaggtatgcaagccttgtcataggaagcacgtttcccttgaggtagttaaaaaatcctcttaaaaacgacggaagctgcgcctctatctcctgacagtgctgtaggatttcgtgctccttcatcactatgttgtcaggcttatcgctcttgttatgaatttttatctgtttgcgtttgtcctcagccatttaagaatatctcccatagccatagctttgtcctcgtaggaggacagattaaaccatttgatattgtcatagcgcctcagccaggtaagctgccttttggcgtagtgacgtgtattttttttgataagctctattgcttcatcaatcgtgtattttccctcaagtgagcctattatctccttgtagcctatgcctttcatggaaatatcatcatatccaagtcccatttgcataagagaggaaacctcatctacaaggcccctttcaatcaggatatcgactctgcggttgatgcgttcataaagctctgctctgtcccttgtgagtcctgccagcagcacgtcgtaatctgctgcgggaatctgcgcattgttaaagtctttaattttattgccgttttgggctgcctctatggcccttatcacctttttgacgttgtttgggtgtattctggcagcggcatcggggtcaagctctgcaagttttgaatgaagataatctctccccttttttaaggcagtatcttcaagctcttttctgaaagcttcgtcagagggcggagctgcaaagtccatttcatacatcagtgaattgatataaaggcctgtaccgcctgaaattacaggcactctgcccttatcaaatatctctctgattgcagctttggcaagcttctgatactgcgccaccgagaatttttctctcggatctatctcatctacaagatagtgttttacctgcgacagctcctccgctgtgggctttgcgctgcctatatccatatatttataaagctgcatagagtctgccgatactatttcgccgtttattgcttttgctgtttctattgcatattcagttttgccgactgcagtaggtcctgcaataattattatctgtttcttcataatacaaaatatttaataactccaaaggcttcgcggacatagtagttaggaataagtcctgaatctgtgcgggcaggtattcccgatatatgggtaaagcctgtctgctctgcaattctcagggctctgtacatatgaaagtctgatgtgactaccacaatgcttttgtccgtatctccgattatatcctttgaaaattcaaggttttctcctgtatctgcggccctgctttcaaggattattctgtcctcggctacgccttttgaaaccagatagtttctcatggactcggcttctgatatgttttcgtcggtgcctttgccgcctgtaactattatttgggcggtatcattacttcctgtatattctattgccgcattgagcctctgtcttaaaactcttgaaggcttggtgccgtttaccttggctccgaggactatgacataatctgcatttctgtccggctctgaaaccgcgcccttgattatagggatttcaagcacagcgcatgcgcaaagggatactatcataagtcctgcgagtatttttttgagaaccgattttttcatacggccgaatattatcaggaatatgcctcctgcaagccatatatatgaaaacatctgcccaaagcctataaacagggaaattccaaaccagtagaggataaggagtattccaaggcctgtgaatatttttttagacacgtttgaacatcctttctatctgatatctgcccagtttgataaacgtaggtctgccgtgagggcaggaaaacggattttcgcaggctgcaaggtctttaataagctgcgctatttccgcatcgttcagattgtcgttgcctttgacagcgcttttgcaggcctttgaggctattttgtcgagggttttctgtgatttaaggtctgtttcctcgtctattgaggaaatgaaatccttaacaaaatcttctgcctctgagagctccataaacattggaatttcagtaattctgtatgtacgctcgccgaaaggctctattgtatatcccatattaaacagcacgttaatccactgctcgcctgttaccgtaacaggcagagtgaatatggcgggcatcagcaccggctgatgcagtttttcttctgattcaaactgttttatcagcttttcgtaaaatattctctcgtgagctgcgtgctggtctatcagatacatatcggcctcgtcctctgcaattatgtaggttgcaaaaaccgagcctttgattatgagggtgctgaattcaaagggtcttgaaacggcaggtttgataatgccggtgttttctctgatttctgactcctcgcgcattgttgacaataattcttttatgttaagttgactgcttttttccggtttttctgttactattaccttttcgggctcaggtcttggctcctgctctgtcctctgtactgcgacaggcgtttctgccggcttctccgctgcaggagctttgcttacaggtttttcgggctttatttctgctatatttacggtcggtgccgcttctttggtcgcaagagcctgtttaatcgccgctgtgacaaacagctctactgatttttcatcatcaaaacgtatttcttttttgttggggtgaatgttgacatcaagggtatcgggtttgacctcaagaaacagaaacgctataggaaatcttcccataaacagtctttctttgtatgcgtttttaactgcggtatccattaccttgcttgatacaactctgccgtttacaaaaaatatctggtttttgcggctgtttctgctttcgcccacattggaaacataacctgaaagcttcatttcgccgttttcgtattccacaggcacaagacttttgcctatatctttgctgtatatggtaagtatgctgctatatctatcccctctcccctgagtcaaaaactgtacagcctcgttgtttatgagtttaaatctgatatacgggtatgccagggccatttgtgatacaaattcggttatgagtccggcttccgcgctgtctgatttcataaatttgtatctggcaggcacgttgtagaataaatctctgacgattactgtagtgccgccgtcgcagcctatggctgaaattcccgcagtttcgccaccctccacagtaatgcttgtacctgttttggcatctgccgttttggttataagctctgttcttgaaacggcggctatgcttgcaagagcctcgcctctaaagcccagagtctgtatgctgtcaaggtcctccgcctctgttattttgctggtggcatggcgtttaaacgctgtggttacctcgtctgcattgatgccgcagccggtgtcgcttactctgatatatgtcttgccgcccttttttatttcgacaacaactgcatctgctcccgcatctattgaattttcaacaagctcctttacgacagataatggtctgtcaacaacctctcctgccgctatcttgtctgcaacttttttttcgagtaattttatcatttcttatacctagattatgtcgtgatttacaggcttgtaaaaaagctttctcatttcactgtggtcgtctgtcatttccgatatccacatcagcttggtaaggcatgcctccatagtcatatcgtaggcctcaaggacctcgtatttttctttaattctgactcctaccttgtatatgctcatatcgcttccctcgtggggaacctgtgttgtaagggcaagtattctgccgctttcgataaaatccgcaagagcgtctatgaagctgtctatttcatagcagggaattccccctacgccgaagctttcgattatgagagcgtcatagtttgccttgatatatgatataacgccggggtccataccgggagtaagcttgagcacgaatatattcttgttaaggctgtcataaaatttaacctctgaagcgtccggcttcggctctctgatatatcttactatctgctcgtttctgattaccgctatatcgggaaagtcaatactttcaaatgcattgaagcttttggtgcgtatttttcttgctcttgtgcctgctataacatggccgtcaaagacaatacttatattatgtgactcgtcatcacatgcataaagaaagctgtcgtatatattgtgcttggcgtctgttatctccatgctgacaggcctctgagatcccgttataactacgggctttgcgctgttttgaattaagtatgacaaagccgcgcctgtgtaggacattgtatctgtaccgtgaagtatcacaaagccgtcatagctttcgtaattatcctttatcgcctttgccattcccagccagtgacgtggctccatattggtgctgtctatgctgtaaagcggaagaaaatccacatcacataatttgtagacagacggaatatatttgagagccgcatcaggtcccattgtaggagtaagcccgccctcatcggtggagcagaccgtaccgcctgttgttatcattaaaatctttttcattattttagaattccctttaattcctcaagtattttgaatgcctgtgacggtgttgtttccattaaatctatgtttctgagtttttcggttacagggtcaggcgccagtgaaaacagtgaaagctgctctccctctctgagttctgcaggctgcggagcctctggcgcgctttccggctgatttttttcgagagcaaacaatctttcctctgcgtttttgagaagctcctttggaactcctgcaagctttgcaacgtgtattccgtagcttctgctggccgaacccggcactattttgtgaaggaatacaatattgccgttttcctctgcaacatctacattaagatttgccactccgtctatctgctcagaaagtgcggtaagctcgtgataatgtgttgcaaacagagtccttgctctgaaatcctctctgcacagatattccactgttgcccatgcaattgaaagaccgtcataggtgctggtgcctctgcctatttcatcaagaattataaggcttctgtctgtagcgctgtttagtatgtatgccatttcgctcatttcaacgaagaatgtgctctgtccgtgagccagattgtcagaggctcctatccttgtgaaaatcctgtcggcaatgccgattacagcggactcacaaggcacgaaacagcccgcctgagccattaaaactataattgcggtctgacgcatatatgttgatttaccggacatattaggccctgttataaggagcattgacgagtctgtcctgttgaggtaggtatcgtttgacacgaaaattccgtctgctatggtctgctctataacagggtgtctgcccttgtgtatttctatttcatcaccgctgttgatctcaggcctgatatatccgttgctgctgctgacggaagcaaaagccgtcagaacgtcaagcgatgcaacagcatctgaggtttcctgtattgtctttatatgcttttcaatttcacctctcagctgtgagaaaaggtcatattccattttgtttatctttgcctctgcattgagaacgagtccctccatttctttaagttcgggggttatgtatctttccgcattggcaagggtctgttttctgatatagttttcgggaaccatttcgtaatacgatctggtgacctcaaggtaatatccgaataccttgttgtagcctactttgaggtttttaatccctgtacgctctctttcgcttccctcaagattggctatccactgctgcgcgtcatatatggagtccttgagctcatcaagctcctccgaatagccttttttgattataccgccctctttaattgtaaacggagggtcctcacaaacggctctgtctataagctcgaatacctctgtgagagggtctagcctgtggttaagctcatcaagaagccctgcttcaaggtcagaaagagagtccttgatatcgggaagcactgatatagaatttagcagggcaatcatatccttgccgttggcattgcctgaggcaattcttcccgacagtctgtgaaagtcatagactcttttgagggagtccctgatgttgtttcgtagcagtatattgtccacaaggctttcaactgcatcaagtcttgcgcttatttcgtcaactctgttgagaggttctttgagccactgcttcattttgcgggagcccatagctgtatgagtcttgtcaagaacgcccagcagagagccccttacctgcttgtcgtacaggctttcggttatttcaaggtttctgatagttgccttgtcaagagccatggaattgcctatgtcataaagtctgatgcctgtaatctgtccaagactctgcttctgggtttccagaagatatgaaagcagagcacccagtgacagcacgcactgggttttgtcctcaagcccaagtcccgtaagcgcgcctgtattaaactgtcttaatattgttttttgcgctgtttcgtagctgtaataattctcgtttaatacattgagaaacacatccgaggttttgagcgcctcccagatagcatctgtctctctgtttataatcacctctctggcattggtcttgaccagctcgtttacgaggctgtcctctgtcatgccgcctgtaagctgtgaggcatacatctcccctgtggatatgtcgcagtaggaaattcccgctcccgtatcgtcaatatatatcgatgccagatagttgttttcgttttccttgagcattgactggcttgtcagcgtgcccggagttactatccttataacctctcttttaactatgccctttgctgccgcaggatcctctgtctgctcgcatattgccaccttatagcccttttcgataaggcgcgatatatatgtgtctgcggagtgaaaaggtactccgcacataggagccttttcttcttttccgcagcttttgcctgtaagggtcagctccagctcgcgagatgctgtaatggcatcatcaaaaaacatttcgtaaaaatcacccagcctgaaaaacagtatacattccttatactgctctttgatatcgagatactgctgcatcataggtgagattttttcttttgccattattacctccgggtttgtataatttatctgtttttgtaggcttcaaggccctttgctataagctgagcgcctcttaccatatcctcactgttgagaacatatgcgattctgaattcgtccttgccaagtcccggcgtgccgtaaaagccctgagccggcgcaaacattactgtttcgttgttatctctgaagtctttaagcaggaacatcaggaaatcctcaatatcttctaccggcagcttgaccatcatataaaatgagccgcccggttcctgacacaccgctccgggtattttcattatttcatcgtataccgcatttcttctgttttcatattcggctctgatttcatcatagtatgatttatccagtctgtacagtgctgcagctcctatctggtctaccgtagctgcgcagagtctgccctgagccagcttcataagaccgtctgaaagctctctgttctttgtaacggcgcagcctactcttgctccgcaggccgaaaatctcttggatacagagtcaactataactattctgtctgcatatttctcaaacattccaaaagacgtgatttttctgccgtcataggcaaattctctgtacacctcgtctgcaattacccacaggtcgtattctttagctatatcaagtataagctgcatttcatctctagtgagaattgtgcctgtaggattgcccggatttacgcatgctattgctttggttctgtccgtaatgcagtctgttattctgtctctgtccgcatagtgatagccctcctctgcaatggtggtaatcggcaccacgctgccgcccgctgcagttataaaggtatggtaatttgtataaaaaggctcaggcatcagtacctcgtcaccctcatcaagaatacttgtaaaaatcatattaagcgcctctgaaccgcctgttgttatgattatatcgtctctgtcataggtcatatcgtatgatttgaaatagtcgattatagcgtcctgaaggtctgtgataccgcctgattcggcataggctataaccttgttgtcataatttctaattgcctccataaagcactcgggtgtttctatgtcaggctgtcctatgttaagtctgtatactttagtgccctgagcctcagcctcacctgcatagacattaaatcgtctgatgggtgaaaactgcatagcctgcactctttttgataatttcatatattaaaatctccttttgtaagtatatatatctagattaattctctgtgggagctgtctgcaattctgtttatatcgtcatctgtgaccttgccgtctgtatcctcttttttcatatacagcaggtactctatattccccttggctccctttacaggggaataggtaagtccgtacgaataaagacctgaatcaataccgtactgcaccacatttcgtataacttccttgtgaacattgatatcctttacgataccgcccttgcccacctgctgcctgcctgcctcaaactggggcttgacaaggcatacaaggcttcccgtatccgcaagcattttcgctgccacaggaaacacaagcttaagtgaaataaatgaaacgtcaattgatataaagtcaatatctctgtctaccgtatcaaaatcaaggtatctgatattgcatttttccatattgatgactctgtcgtcgtttctgagcttccagtcaagctggccgtagcccacatctattgcaaagaccttgctggcgcccttttgaagcatacagtctgtgaagcctccggtagaagctccgatatccgcgcatactgcgttttcaagggaaaatccgtaaagctctaaggctttttcaagcttgagtccgcccctgctcacatacgggcatatattatcctttacaagtatttcggcagtttcctccaccggagttcctgccttatctattttgctgtcgtttacaaaaacaatacctgccataatggcggcctttgctttttctcttgactgaaaatatcctttttcaacaagtaaaacgtcaagtctttcttttttagctttcaattatatcaacaatcctttctgctatggtctctgcatcaagtccgtattttttaaacagctgctcgctgctgccgtgttcgataaacctgtcaggccagccaaatgagtaaaccttagtatcactgcctgaaagcgctgccgcaatctgcgttccgaagcctcccgcaagcacattgtcctcaagggtgactataagctttgttcttgctgccgattcaagaagcgtttctttatcaagaggttttacaaatctggcgtttacaacaccgcacttaatacctctgccgtcaagtatactgaacacttcaacagccgtcgccgtcattttgccgcaggcccatatttcaacatcgccgccggtaaagaatacctgcgcctgcgctgttttgacaggctgcgccaaaagctcagccggaaattcaaattgtctgcctctcggatatctgattgcgcacgggctgtcaagcgatacagcgtactccatcataagctccagttcctcgtaatccttaggagccagcaccgtcatattcggtatctgcgatagatacgaaaggtcaaatgtaccatggtgagtttcgccgtctgcacctacattgccgcttctgtccactgcaaatattacaggcaggttctgaagcgccacgtccatcataatctgatcataggctctctgcaaaaatgttgaatatattgcaaccacaggtttaagaccgcttttggcaagacctgccgcaaaggatacggcgtgttcctccgctattcctgcatcaaaggttctctccgggaaggtttccgaaaagatactgagtcctgttccctctgtcatagctgcgcataccgctgtaattctgtcatcttcgagagccatattcacaagctttttgccgaatactgatgagaagctttcaccgcctgaaactgcaactcccgtacctgcatcaaaaggccctatgccgtggaatttgttaggcatttcctctgcctgcctgtagcccttgccttttttagtaatggcatgaataagcaccggttctgcagagtcccttgcaatttcaagggtttcaattaccttttctatattgtttccgtctatgggacctatgtaggtaaacccgaattcctcaaagatggcgccgccgtcaacaatagcgtatttgagggagtttttcagatgagaaacaccctgcgcaagtcctcttccgattacgggaactttgtttaaagctttcttgacgctttccttggcactcaggtagtttgaggaaaccctcagcttgtttaagtgcattgagatgctgcctgtatttttggaaatagacatgccgttgtcgtttaggacgactatggattttgatttcatatatccaagattgttaagtccctcgtatgccatgccgccggttaaagctccgtcgccgattacggcgattacattgtagtcctctcctctgatgtctctggcagccgcaaggcctgccgcaagggaaaccgaattgcttccgtgtcctgtatcaaatatatcgtgaggactttcggctgccttgggaaatccgcttatgccgccggtctgcctgagccctgaaaatttatcggctctgcctgtaaggattttgtgaacataggactgatgcccaacgtcccagactattttgtcacgaggactgtcaaacaccttgtggagtcctatggtaagctctacaattcccagatttgaggctagatgaccgcctgtttttgatacggagtctattaaaaattttctgatatcacagcttagggtctgaagctcatctgctgtcatctgctttaaatcacccggaaagctgtaatttaataaatctgtcattatttcgtcctcgttaatacatcgtcgattatgtcgttgaatacctcggcattgtcgtaatagcaggctatggatttctttgcgtcctctgcaagatcctgcgccatctgctttgctttttcaatgccgtagagagaaacataggtaaccttgtttttggcaacgtcaacacctgtttttttgcccatttcatcttcgtcgccgcaggcgtcgagtatatcatcggtaatctggaaaagcagtcccagctgttcgccgtaggttgtcagatctaccagtgtttttgcatctgccccgccaaggtatgctcccgctctgattgttgagaccagcagcgccgcagtcttgtttatatgaatatattccagcagttcttttgagcagtgagttccctcaccctctatgtccgccacctgtcctgcaaccatacctctgcagcctgcaccctttgcaagctcataggaggctcttactctcctgtttaaaagctcaggcgtgtcaagataaagcagcatgtccttgttcatagcttcaaaggcgcttgtgagaagtccgtcgcctgcaagaattgctatggcatcaccgtagaccttgtggcttgtaggcataccccttcttaaatcgtcgttgtccatagcaggaaggtcgtcgtgtatcagtgaatatgtgtgaatatattctgccgcgcaggcgtaaggcagcgccgaatttatatctcctcccgcaaagtcacaggctgcaagcatcagaacaggtcttatgcgcttgcctcctgagcttaagctgtatttcatcgcttcataaagagtgatgctcttgtgatctatttcaggaaggaaatccagaagatgttcttctataagatctttgtagttgtagtacataatgtttttcatttaaaatcacttccttttgtaaatctgtattttttgttttgcttcgcttagtatttcactgcactgctcataatatttcataccctcctcgtaggccttgagtgcctcgtcgagagtattgccttcttttttgagatcctgcgcgcttttttcaagaccttttaatgcttcttcaaattttgccatcaactgttcctcctcacagatattactgccgcctcagcgcttccgtctgctgcggtaattgtaattctgtcatctttgttaaagtcctttgcagacgatagaagcctgccgtttttatctgaaaccgcaaagtagcccattgccattattctctgcgggttaaggttttcgagagtttctctcagcttgccgatatggtttatattctcgcttataactgtatcggcacagcccgtcatttcggtataaaggctgtcaagcctcatggaataaagctgtattaaattctctatccacagcgtaagagagcttttgtccatgctgtcaagatacatctgcttcattctgatatatccgtcaatccctgtatcaagcatatccgcagtatcattgcagtaagttataagctgcgctgtatcgggaactgccattaccgccgccgcggtaggagtttctgctctcctgtctgctgcaaagtctgctattgtgaaatctgtttcgtgacctacggccgatattaccggtatctttgaattgtatatgctccttgcaacgatttcctcgttaaaggcccagagctcctctgccgagcctccgcctctgcctgtgattatgaggtcaagctgcggcattgtttcgttaagctcatcaatcattgatgatatatccggcgcggcatttggcccctgcaccagtacagggcatatatacacgttaacgatattgtttctcgcctttataatcttgactatatctctgaccgcagctcctgtatcagatgtaaccaccgcaatgttttcggggaaaaacggaagcggttttttgtgcgcctcatcaaacagcccctctgaaagcagcttggctttgaggttttcaaaggctgtgctcagcgcgcctgcgcctgaaacctcaatatctctgacgtttatggaatagctgccgcctctctcgtaaagatatatatatccgtttacgattatctccataccctccgaaagctcatagcgtatgtgccttgcattgtctgccgcaaggaagcagtttatcctgcttgtttcgtccttgagtgaaaaatacacgtgcccgctgctatgatgcttgaggtttgatatctctcccgtaaccgaaatgttacccagcagagggtctgcctgcaagactctttttatataactgttaagctgtgaaacctttatgggttttgctgccataaccttgctcctcccagcagagccgtacctaccgcgttgtccgaggaaagctccgctgcaccgaattcatatgaaatgttcctgtcaatatatctgccgatttctctgcgcacatatccgctggaagaaacgcctccggcaaacagcacattgcctgttccgcaggctgctgccgtctgatttacggcctgggccagacatattgtaattctgtcaaatatgttttttatcagcaaactgtaatccgaatttttatccatgccggaaatattccttaatacctgtgtttctattcccgacagattaaagtgacaatctcttaccttgattggagtgagtatatcagccttatccaacgtgttaagggctgcttcatcaagcgctttgccgcacggaaaatcaagtccgagagc

SEQ ID NO: 2440 - DNA, 6136 bp, Unknown
  16S sequences of unknown bacteria
ctttccagcttgctccggtaattatctatcggtactgtatcttcacgcagatactgaatattctgtctgccgtttaatatgagaagaagtatgcgtgccacaggggccgcttccgcgatacattctgctaccgactgcgatatcatcgttactcccgcttttctgtccgccccatgaaaggcatataacttgtccattttcaaaattcacctttctgcactatcatcaagctgcgtgcaccatctcttacaaaggcacttattgcattatactcgtcaagtgtggctactatctcgatatgatttgcggctctgctgctcatctttctgtccagtatattctgttgccttgaaattccgtccgccgaagtaacttcctgttcgttatcatccttgacaaatgccaccctgaaagttccgagatatacatcacctgtatcgctgtatatttgcacaatatcccccgatcgcagcgaactgcttctcatatccatccacgaaggctttatgacaaatatactctttccctcttctatcagttcttccgtattttcaaaaaaatccgctacaatctgactgttagccttaatattctgcctgcatatcctgcctttgagtttgctggcctcctccatactgagcgctccgtcaacaaggcattccggcggaacgcgcatttttttaaacatagcctcgtttatttcttcaccctccgctatatcaaaagctgccgacgccacttcctctgtagtccagcgtatacgtccctcattctcccagtagaacagccccacaagtgctgtaactatgagtatgcagccgattataggtttaataaatttcatatcgccctccaattttcatttatatgttattatttacaattgattacagtaataatttaccatatatcttcttgattgtcaaccataaaattacatatttttaaaaaaataaaaagagcatcgttttttcaatgctctttacaatctttttccttcctgcattatctatcggcaaattgcaattgtctgcccgcagttagaacaatataaattttaatcatatactttatattataatttacagtctgtacatatgattaagaggtcctgatccctttccgaggtcgagcatagctccaagcgcacctgtgagatactcctttgcatttcttatgctgtcctcaagcgaataccccgcggcaagattgcaggcaatcgccgacgagagtgtgcagcctgttccgtgtgtattcggattgtctattcgttccgatgaaaaccagcttatttttccattctcgtagagcaaatcagtggcgtcgttcacgagatggccgcctttcacgagaatcgcgcctttaaagcttttcgctatcttttccgccgcgcgcaccataccgtcttcatcctttatttcgaatccgcacagcacttccgcctccggaatattcggcgtaatcactgtcgctataggaataagcttgcttataagcgtatcacatgcttcatccgaaatgagcttgctgccgctggtcgccaccattacgggatcaacgacaatcttctccgcactatgctccctgagcttttcgacaatggtctcgataatcgcgctgctcgacaccatcccgatttttacgctgtccggccttatatcattaaaaatacagtctatctgctgcgcaacaaactgcggagacacctctgaaattccgtaaacccccgtcgtattctgagctgtcaatgctgttatcgcgctcatcgcatacatcttgtgcgctgttatcgtctttatatccgcctgtatacccgcgcctccgctcgaatccgagcctgcaatagtcagaacctttttcatttttccttctccttctcaaatataattactcgcttatcattttttccgaaagctgcttcagtctgcggcactcgctctctatatcctctgctgcaaatatggccgatacgagtgcgactccgtcaataccacagccagcaagttctgaaatattttctttagtgataccgcctattgcaacaaccggcacggatacagccctgcaaacagctctcaccgtgtcctttgcaacatgccccgcgtcaagcttggtcgcagtcgaaaaaaccgcacctattccgagataatccgctccgctgtctactgctgcaagagcctcttccacattgtgcaccgacacaccgataatcatatcatcaccgacaatgcttctgacattgcctgcttccatatcgctctgtcccacatgcacaccgtctgcaccgcacttcactgcgatttctacgttgtcatttatgataaacggcacgccatactccctgcacagcttctttactgcaaacgcctccgcaagaaagctctcttcatccaaatttttttcgcgcagctgcacgcaggttgctccgcctttcagcgcgctttccacctgctctgcaagcgtcttttcgccgagccacgctctgtccgtcaccgcataaagcaacatcgctttcttatcgcatctcataatcagcacctcttttcaaatcttctgccgtcagccgataaacagcatctataatataatttctataagtagcatttccgtcgagtcttccgagcctgtcaaacgcagtttccccgcatacgcccatagcaattacagcagcagctgctgcctccatcacacattttctatttgctgtaataaaagccgccgtcatcgcggaaagctggcagcccgtccccgtaatactgctcatcatcggatgcccgtttcttatacagcaagcttccgtaccgcacgctacaatatctattgctccggtaacggcaataaccgctcccgtttttctcgaaaattgctcggcaaaagcgactgcttctttgagattttcttctgtcaccttatcggatatatcggcatcaacgccctttgtgtgccctgcgcctgcaccggatgcaagcgtttttatttctgaaatattgcctcttataacatcaaattttatttcatcgatcagtctgagtgcagtttcggtgcgcagctttgacgcacctgctcccacaggatctaacactgtcatgcgcccgagctcatttgccttttttcctgccgccagcatagattgcaccgaattatgattgagagttcctatatttatattaagtcctccgcacagagctgtaatttcctcaacctcatctatatcatcagccataatcggtgaagcaccgcacgcgagaaggatattcgcgcagtcattcaccgtcacatagttagtgatattatgtataagaggctttgtctctctgactctgtgcaaaattgtatcaaaatctattgtttttttgatattatcattcattttttaatcatctgtccttcatatttccttttgcctatatccacttcggctttgcgtcaatttctgccgttaagcatatttgtaattctgtcaagcgtcttcgtctttttgagcgacagcacgataaccgctgccaatattgtaccgcctgcagttgatattaagaatggaattacatatgcgtaaaatgctacgctcgccgcgggagttcccataagaagcactgctaccggataagctgcaagtcctccaagtatcgaagttcctgccacttcaccgataaatgcaagcgtaagttttcccgtctttttataagcaattcccgaaataaaagctccgaacatgcttcccgggaacgccatcagactgccaagtccgagaatatttcttataaggctcgccgtaaacgcaactgtaaccccataactaggtcccagtatcaccgcgcacaaaacatttaccatatgctgaacaggcgcgcacctgcttccgaacacaggaaacgaaaataaacttccgactaccgcaagagcgcaaaacaaacctgcaatcgcaagcttttgaatatttgtctttttcatcttaattctcctttaaaacaatatcgagaaacggcaaacagctcgcatctcttctcgaagtttgcagaatacctctgcacagaaaagtcggtcgaagctcactggcttcctctcacgccggaacacggcttcccatcgctgtttattcaaagcgcagggcgctccccctccacttgccgcggctctcccgcgaataccgttttcacatcctttcttaaagaagattttataaaaacagagacacccgatttggtgtctccgaaaaaatcaaactatgacttcctacggcggcattatccgcatcaggttaagggtcgaagccgaatagcttcctctcagcttgcataccgcatgctcccctgctttatcaccattattctaacaagaaaaagcactcttgtcaagccgcgatattcctttgcagctccgtctacattttggtctcatttatatatataagtacttttaaacctttaacctctcaaatatctgttatttttgacatttatatatgctttatgatatgttttatataatataagatttaggaaggagataaaaattatgaaaaaaccttttatctacattcactgtctcacgagccttgacggcaaacttatgggaaactatatgaagcttcccgaagaatcgaatgccgcgcctttcttcaaggaaatcggcttcggcggcgaaatatatcctatgcgcgctatgctaaacggcacaaatacttgcgcgtccgactatacatacggcaaagcccctatactcgacaaatccgcggctcctgttcccgatggcgactacattgccgacaaaagcgccgagcgctatctcgttgcactcgaccgcacgggcaagcttggctggaacaaaaattacgtcgaatacgccggcgccaggcagcatatcatttctgtcctcaccaatcaggtcagtaatgaatacaaggcgtttctgcgcagccttggcatttcctatgtcatctgcggcgaagattccataaattttgaccttctatttgataagctcgctgtacttttcgatatagaatgcctgaaaataggcggaggcggtacaataaactgggcactgctgcgaggaggatacgtcgacgaagtaagcatcgtaatagtgccatgcgctgatggttctgtaaaaacacctcagctctttatggcagcatacggcacgagcgaagatattcctgttgcctttgaatttatggagcataaggtcgaccaaaactctggcggtatatggctgcgctataaggtaaaaaaagtatgggataaaggcgaatacaaaaataccttcggcgaaggaccgaaggactttattgcagttgacaacagcagcaaatagatttttacaaagtgacatgcaattacagcgtcaatttatagtttttggcaaaattaagtgcataaaataaaagcccctaaaccgctgctaatcagcaatccaaggacttttttaatggtgcccagactcggaattgaaccaaggacacggggattttcagtcccctgctctacctactgagctatctgggcatactatgcttgtcttttttgtcaatcgttccataagtgttgcgctcttcttcggtcacatccaaaataagctctcttcagcacttgcattttctcgcgtctaacaaaaaatcctgcatatatctgttttcataattcaaaatatcttttttgctgttgcatacgcaccagccgtatcttcgatatatggtgggccatcagggacttgaaccccggacctgccggttatgagccggacgctctgaccaactgagctaatggcccctgtcataaatggtcggggtggcaggatttgaacccgcggcccactggtcccaaaccagttgcgctaccaaactgcgctacaccccgatatattcgtgcttggcaggggcagtaggattcgaacccacggcacgtggttttggagaccactgctctaccaactgagctatacccctatatatggcggagaagatgggattcgaacccatgcggccctaaacgaaccctaacggtttagcaaaccgtcctcttcagcctacttgagtacttctccgtgatattttcactataaaggttcttgtggcggagagggtgggattcgaacccacggcccctttcggagtcaccggttttcaagaccggct

SEQ ID NO: 2441 - DNA, 23495 bp, Unknown
  16S sequences of unknown bacteria
gagattcgccttagtctcgtgggctcggagatgtgtataagagacagatgctatacagagcaaataggcctgccattgaatagcctgcaatgccccgagcgtcaacggaaaaggatagctgggcttccatagcaggtaagatatgatgggagagcaatgaaagaaaggcggacgcctttccaccaaaatcttgagaggatgcgaaaagccggggcgccggccagggggaaagatcgtcattccagttcataccggttacgcatgccagcacacacttttgctgtaacaaagcaaagacattctctccttgggatttttggcagggaagccaaataacaggaaaggacccttcggcttcaggaacgtatagacatacttggcaatgcgcaatatcgaattcgtatttcatgaatgatctcctagtaaggatagagaaaaagccgcaaatatgttgcggctttttactatcggcgcggcctgcgcgcggaacgagaacgttcatactcgctgggaggccttaattgtttacgctgatttttgcgtccggtttgcctggcggcttggcgggcacgttttgaatcagagccataaagcctgcggctgttgcgcatttggcgcttgcgcctaggctttgttaagatgcggagaataactaccagcaggaagaaaataccgatgcacagcaagatgatgatgacagggcgaaatgcatcagattctaccggcgtttccgtcaccacgacgggctttttggtaacttgtgtacgatatagctctgtcccgtttagggaatacacagcctggcctaccgtggccccatcaggcacaggggcggtaaggccgggatccaattcatagctgactgtcagctgagcgccttctgcgttgaaggcatttgccaaatcactggttgcctggtaatagatttcgccgtccggcaaaatgggcgtgagtacagatggctcgctatcaccgggcaagattgtttgcagcggtgtgtctttaattttctgcgtaagatcgagcacagtgatggtaaagccgtaatccagaagcgcgcgcgcatccacccaacgctggttttggccgctggtatggtctcccaacacgatggcgatgatctcgcgatccccaacctttgcagacgcggccaaacacccgcctgctgcgctggtagatcctgtcttgatgccagtggcagcatcatagtgatagggctggttggattccttggtggaaataaaacggttgctgatatagatcgtacgcgcatcatggcggttggtcgcggccattgtgtactcgggcgtggatacaacggtacgaaaggtttcattcttcatacattcccgcgccaaaagggccaagtcataggcggtggtatagtgattttcatttgttagcccgtgggggttggcaaagtgcgtattggtcatgcccaattcttgggcgcgctggttcatcttttcgacaaacgcgctgatatcccctccgcccaaatcatacgcgatggcggctgcggcgtcattgccggataccagcatcagcccatatagcaaatccttataactaagctcctcaccatcatataggccaaccaacgaagaatcgctttcaaaagaggtgactgtgctgggacaaaccatcgtttgctccaaatccttgccagattccaacaaaagcaaagccgtcatcattttggtaaggctggccggattgctgcgcgtatccttttccttttcggcaagaacttcgcctgtcgcttcatccatcagcacataattggcacaggtcgtagtaggcggcccagaggatgcggggtcgttttccgcttgtgctgacgctacagaaggaaaaaccgtagaaaaaagcagaaagaatacgaaaaatatagagaaatatggagaaaatacttgctttttcataaaaaaaagtataacaaagaagaggaaaagtgacaatagttttacgggaataaggcggcggaaatgaaaagagaaaacagctttgttggtcggggaaagaaaagggaagagttgagaaaatggacgatcctcctccttttgtttgcaggcttagccgtattgggatactgtctggatcgctttgcgccatcgccggatgacgtccttgggccggcagtgcaaaccacaacgccctctgcaacggatgcctatcggaaaaccatccaggtaaaaattgaaggaaatatttccaagcccggcatttatacgctccgggaaggcgctagggttaaggatttggtggaaaaggcagggggcctgccggagggctatgataaaacacagctgccgatctccctgctatctgaactatttgatggtcagcttgttgtgattccatagcgcttatgggaaaaatatggtatactgctcacagtaaagaagctacaaaaaatcggatttgggaggaacgatcatggcttttcgcatcctggcagtggatgatgaaccattgattttaaaaggtctgcgcttttctttagagcaggacggatatatcgtagaagaggcgttggatggccaatcggcgctagatatgattcaaagtacgcaatatgacttgattttgttggatgttatgcttcccgttgtaagtggtacggatgtgctgcgtcaaatgcgggagtttaccgatacgccggtcattatgctgacagccaagggcgatgatatggaccgcattttaggactggaatacggcgcggacgattatatggtaaagcctttcaatatcttggaggtcaaggccagaatcaaaagcgttttgcggcggacacaaataaaaacgccagcttccaatgtcattcagtataagaatctaatcatagatcccacagcaagaagctgcgctagggacggcatagaaatcaatcttacggtgaaggaatttaatttattgatgactttggcgcaagagccaagcaaggtgttttctagagaacagctgcatcaagcgctttggaaaaatgaaaaggcggacgggaagtatgatttgcgcaccgtagacgtacatattcggcgtctgcgtgaaaagattgaggaggacccggcacgcccgtcttttatcatgacaaaatggggagttggctattactttgcagatcggtaaaaaattaaaacccatcaagcgtttttcaaccatacagggccgtatcgttgtcctgtatggtttattgtttttgattgcttttattttcatcaatctggcggttagccagctgaccggcagctttttgaccacctcacgcatcgatagccaaagccaggaagtagagtccattgcaacacatctggcagcggccacggccaacggcgatgcggaagaactgtatgcgcagatgctgtcttccagcaagcagatcggcggtcgtgtgctggtgttagataccgatggcatagtcttgatggattcgtacgcaatgctcaacgggcggcttttgcagcataaggaaatcgaggatatccgcaacaacagccgtactgtatcctacggatttcatgaggtagatggagaaaaaggctctctgtttgacaacggaaaattttgggcggtgtactataccacgccaattgtataccaatcccgcaatgtaggcatattgctcgtcagcgtatccatccaggacgttatggatatggtaacgcaaacccagcaggattttgcgctggtatccatcctgattctgttggcaatgatcatgatcgggatcttgattgcccgatggatctcaaagcccatagcgcagatgacaaacgccatccagaaaatgtcgcatggcgatttcagcggaaaggtaaaaattacgggtgccagcgagattgtggaaatgggcaaaacattcaatcgaatgagcgaacggctggacaatgtagagaaccaaaggagagactttatctccaatgcctctcacgaactgaaaacgccgctatcctccatcaagattctggcggaatctttgctgtatcaggaaaatgtgccggaagaaatgtataaggagtttttgacggatatcaacgctgagatagatcggctgaattccctgcttacagatcttttgaccttggcgcaggccgataaccctgccatggtaatgcgtatgacttgggaaaacttggatgagatcatcgcggaatgcatccattcgttgcagccgctggcccaggaaaaaaatatcaaaattaaccatatctggaatggcgtaagtatgcgctgcgataggctgaaaatgtccacagcgctgatcaacttgatttcaaacggcattaagtatacgccgccggagggcagtgtgaccgtagaggtggaggagcaaagccagtttatcatcattacggtttcggataccggcattgggattccgcaagaagaacaggcacacgtgtttgaaagattttatcgcgtggaccgcgccagggccagagacaccggcggtacggggctgggccttgcgattgtgcagcaggtcgtgcgtttgcatggcggggagatcatgctgacgagcacggaaaaaagcggcagcacctttaccattactatgcctcaagggaggccggaagcatgaaaaagagaaaatgggcggcagcgctgatgagcatggcgctggcgacagccatgatatccggatgctctgtcatcaaagaagaaacttcccaatcaatttaccagccgcagatcaatccgctggcagggcagaatatttccgagacaattacatccaacttttattatgtggtagagggagagaaccagctggccagcgtttcccagaccatagatgttgccagcggggaaacaagggaagaggctgtgctgcgcacgctgctgcaaggaccgccgcaaaacatgggccttgcctcggcattgccggaaggtacagaggtggtgtccgtatccctggatgggcaaaccttaaacgtaacgatgaacaaccgctttttaacgagcacgcctgtggttatgtcggatggtacggtcagtgaatctgcagcagagcaaacggcgatgaaaaaccgtctggcgctgtatgcggtggtcaattccttggcagagttggatccttttattcaggtgcagattttggtggataaggacaagacgggaaaaggaacaaggcctacccggttagaggtagggctgacgggtacgggagaaaactccgttttagagccgttggggaaaaacaatgatttattgttgacgccaaaaaccgctgttgagattgtaatggatggagcgatgagcaacgataagcagagggcttcccgcctgctttctggcagctttgacctaaccaacgccgaagccctgcaggccaaggcagagcaggccaagggcagcgtggattcttatcagattgtagatgtttcaatctctgaagatgggcagagcgctgtggtatatgtagatgtaacgcagacgatgaaggatgggcagtcccaaaaactgtataatcaggctatctccgtaaagcgggatactggtatctggaaagtagaggtggaaagcattgaacctatcctgttcccgtaaaatagcccggctgttggctgtgctgatttgctgtgcgctgctggcaggctgtaagggcaatgagcaggaggacgtgtttccggatatcgcacattatacggtgccggagcagaactccatgcgtgtaacgctatactttcccacggaagagccctctgcgtttagttcagaagtgcggcaggtggatctgccttccgggaaaaggccgagcgaggctgtgatagagcagcttatgcgcggcccgcaaggcaatttgctgcccgcctgcccggcgcattacagcctaaatcatgtatggatcatcgacaacgtagcttatatcgatctgcataacaacggagaagaggaggatgatctttctcagttccgtgcagtggcagttcgcacgctaaacccaatttttaataccgattacgtattgttgacggtggatggcaatgtgccgattggcgttcaaaacggattggagcgctctagtgaggaaaaagaaacaaataaaatccatcttttgacgtattatccggacaaggcaggagaatatctggtaccaaagccccgatcttctgacaagcagatgtcgctttgggtcagcgctttttcactcttggttgccggcaatgagccggagggaaccaaggcctgttttgatgatcagatcaaggtgatcagcggccgtatcgaggcggatacgctttatgtggatctctttgtgccagaatctcatacttcttctcctctatgctacgctgcttatgcacaaacgcttctgcacaatgctagcggcttaaagcgcgtgattctaagcgccaacggcacgcctttgcaggggatggaggggatgtcgcagaatcctggggaatttaccaaggaatcgttatcggatcttttgggggcgcacattacggcttactatgccaatgaagacgggcttcttaccgctgtgcgcagggctgtgccgatggaaaaagccagcaatgcacttacgcctctttatgaaatgttgaaagcccctgaacaaggagaaaccttggcatctgttttcccatctggtatacaagagaaagatattttagacatcaactacgaccataatactgcaatcttaaatctgtccgatcatttttatgaagccgtgggcgcattatctgatacggcggagacacagctggtgtatgggatggtcaatgcgttgacagatcacggaggcatcagcagggtggtgttgctgcaaaatggacagaccagagatttgatgaatcaaaccgttgtcattgccaaacccttgctgcggaatcccgggatgatttcaaagcaataaataaaatagcgatgggctgcctacaatgagtagaaaggaggatataaacatgcgtatggtggatctaatcgtgaaaaaacgccaaggacaggcgcttagcgcagcagagattgcctggatgatacaggcgtataccgaaggggcgctgcccgattaccagatgtctgcgatgatgatggcaatctgctttgccggaatgaatgctgaagagacagcggcgttgacggatgccatgacacacagcggaacggtgctggatgtatcttcggtaggggcgcaggtagcggataagcattcaaccggtggggttgcggatacaacgacgttggccgtggttcccattgtagcaagctgcggagttacgatggggaaaatgtctggacgcggcttagggcatacagggggtacgctggataagctggaagcgatctcaggttttagtgtagacgtagcgccgcagcggtttttagcattgctccgagaaaacggcttggccatcgtagggcaaaatgaggcgttggcgccggcggataaaaaattgtatgcgctgcgggacgtaacaggcacggtggattcgttgcccttaatcgcttcttctatcatgagcaaaaaactggctgctggggcggatatcatcgtgctggatgttaaagtgggcagcggcgcatttatgaaaacgccggaagatgcggcggcgctggccaaaacgatggtggagatcggcgttcatttgggcaaaaagacggcagcactgattacggatatgaaccagcccctaggcagctgtatcggcaatgcgctggatgtacgggaggccattgaaattttacaaggtaagcatcaggacagcgatttgtttgcgatctgcaaacgcttatctgctcagcttattcgcttgggtggcaaggctgaggaggaaagggaagcagaaagcatggtgttggatgcgattgcttccggcagggcattgcaaaaattggcaacgatgatacaggcacagggaggagatgcccgcgtatgccaagatacatcgaggctgcctagcgcagaaagaatcattcctgtattgtctcagcaggctgggtatatagccaaaatggatactcaaagcattggtacctgtgcgcagctgcttggggctggcagagaaaagctgggcgataagatcgaccctgctgtgggcattgtgatgaaaaaaagagtgggcgactttgtgcgcactggggatgtgctcgctgagtttcatgtaaatgaacaaaacatgcttcaggaagccatgcggcgcttttcggcggcgtttgcctattcgaaaaaaccagttgatcctcctaagcttgtttatggactggtagatgagcaaggcttgcacgatgaataaataaagggggtatgcaaaagatggacgtgatagcatatggcattccagtgatggatttgctcatcaatatcgatcatggtttggcgccaaacgaatcgatagacatcaaccagacttcttggcaatacgggggcaaagtatccaccggtttggtggcaaccaagctgctctgcgattgtgaatgcagcatggcaggcaccacgggcggcatgtttggtcgcttgattcgccgtgaatttgagcggcacggcattgacatttctcatctgcgccatgaggaggatacggattcacaattttgcgtatgcctttccgttttatcggatagcacgcgcaacattatggtgaggcgatctaccgtgcccaattacacaccagaggaaatacgggcacagtcggcgtttattcaatccgcttcctatgtatttttggcagattccaagccatacagcatcgaggtaggaaaagtgacccatgagggctacggtaaggtggtatacgatgccgaccgctattatgatgaggggatgccggaaatgctggcggagtgcgactatctcattgccagcgaatttgtgtaccgccatctttttggacaaagccaggattgggagaaaaacttaaggcagatgcgcaccatgtgccggcccggggccgttgtggttgtgacgctgggagaaaacggcttggtagggctggatgaaaccggatttttcaagctgcccgcttttcgagtagaagttgtggataccacgggtgccggggacgtattccatggggcttttttggcggggctgattcagggcatgaatgtgcgggaagcttgtaaatatgccagcgctgcagccgcaatcaagtgtaccagaatcggcggacgggccgggattccgagtgaacaggtctgtaaggcgtttatggaaacgggaaaaattgattatactgagatcgataaacgcgtggcatattaccgagatccgccgatgggagaaggcaaataaaaaagaggagcaatgctcctcttttttatgaaatgtgtaggccgaaaaaatcaagaatccaaatccatctttgcgcattgcggacacaagccgtctaaaatcagccgatgcgccgttaccttacaacccatattgcgggcggtttggtccacatgctccatgtagggaacgggcagatccaccacggcgccgcatcgtgtgcagcataggtgatagtgtggctgtggattgcggtcaaacgcctccgggccgtccatacggccgaccttggccagcttgccgagtttgcacaaaatatccagattgcggtataccgtgcccaaactgatattgggatcttctttgcgcaacgtatcaaaaatatattctgccgtagggtgggtaccgctgttttgtacagcctccagaacacggctgcgctgctttgaatttcgataatgcgtagtagacaatgtaaaaccttcttctatcaggaattgttcttattaattatactatactgaaaaattcttcatttagcaagaaataatctttgtaaaatctgggaaaaattcaaaacagaggcaaaggaaactttttacaatacgcaatttatggtatattatggacaggattcgatataaaaccaaagaggtgtaatagatacatgagaaaaaaaacaaagatcatttgtaccattggcccggccagtgaatcgcctgctgtattgaaaaagctggtaaagggcggcgcaaacgtatttcgtctgaatttttcccatggggatcatgcggagcatgcaaagaggattcaggatatccagacgcttcgaaaggaaatgaatatgccaattggcatcatgctggatacaaaggggccggagatccgcattaaaaccttccagcaaacgcctgtggagctggcggagggggatacctttacgctgacaacacgggatgtagagggcaccaaggaaatcgtttccatcacttacgaaggattgccgcaggatgtgcagcccggtacggtgattttgattgacgacggtttggtcgcaatggaggtgctggaggtcaaggacggtacggacattgtctgtaaagtaaaaaatggtggacagctcagcaaccgtaagggcgtaaacgtacccggcgtggatgtaaagctgccctccattacggaaaaggatattgatgatattctgttcggtatccagcaggggatcgattttatcgctgcttcttttatccgcaaagcacaggatgtgctggagatccgccagctattacaggaaaatggtggagaaggcatccagatcatcagcaagatcgaatgccatcaagccattgtaaacattgaggaaatcgcaaaggcatcggatgccgttatggtggcgcgcggcgatttgggcgttgaagtaccgttacagcaggtgccgattttccaaaaggagattatccagctatgtaaatccatcggccgcccggtgatcaccgcaacgcagatgttggatagtatgatccgcaacccgcggcctaccagggctgaggttaacgatgtggcctcttcggtgtacgatggctgcgatgctgtgatgctgtcaggggaaacggcagccggaaagtaccccgtagaagcactgagcacgatggcatccatctgtcagcatgtggaaaaccatgcgcgcattctgccttcttcgtcgatggaaaaagaagaatacaatatcacggacgctgtatcccatgcttgttgcgaatgtgcaagggatgtaagcgccaaggccatcgtgacatccacctccagcggttatacggcgaaaatgattgctaagttccgcccggaatgccggattattgctacaaccccttccgagtcggtgtacaataagctatcgctgacttggggcgtaacgccgattgtggcgccgcaaagcacttcaacggatgaaatgctcaagcagtctgtagagacggcaaaattgaccggcctggtgcatgatggggatgttgtggtgatttctgccggtgtaccgctgggtgtatcgggtaccaccaacctgctgaaggtttctatggtcggcgatgtgttggtgcgtggccgcggcattggcaatggaacggtacgcgggcatgtgtgcgtggcaaaaaccttggaggattgcgcgtcgatgtcctcccgcgatattctggttgtaaaagaaacggacgatagatacctgccgtatatgaaaatggcgcgcgccattgtatgtgaaaactccaacgttagcagccatacggccgtatatgccatcaagcagggcaagccggccatcattggcgctttgggtattacggagcagttgaaaaccggggattccgtttctctggatatcagccgtggccgtgttttcagacgttcataaaattgaatagaaaagcggaaaacatgtacaaaagggtggaaacacccttttgtaatctcaagatgagaggagcaagcagatgaaaattcgtaaggcgatcattccggcggcagggctgggcactcggtttctgccagcgaccaaggcgcagccaaaagagatgctgccaattgtggataagccgtcgatccagtatatcatcgaggaagcggtggaggccggcattgaggatattttgatcattacggggcgtagcaaacgcgccatagaggatcattttgactactccccggaactggaacgcgagttggaaaaaaaaggaaagctggatgttttggaaaaccttcggaagatctccgatatggtaaatattcagtatatccgccagaaagagccgcgcggcctgggccacgcggtatactgcgcccattctttcatcaatgacgagccgtttgcagtgctcttgggcgacgatgtagcggtgtgcaaacagccggccattggccagcttatggatgtatacgatgcctatcatgcatcggtgctgggcgtatccacagtgccggaagaattggtcagtagttacggcattgtagcgccggacccggattttaaaagcgatatgaaaggcctgtctaaggtgtgcggtctggtagaaaagccgccgttagacaaggcgccttccagaaccgcgattttcggaagatacatcattacgccagggatctttgaggtgctggcccgcacaaaaccgggcgcaggcggggagattcagctgacggacgcgttgaaagaactcatgcagacagaggatatgtatgccttggattttgaagggaagcgttatgacattggctctaaaatcggctttttaaaagcaacggtagactttgccttgcagcgtgatgacctaaaggagccgtttatggaatttctaaaggaaaaagtgaaggcatgaagattataaaaaacatttggttgcttcccatgcgggaagaagaggacgttatcaaggatgccgaactgcatattaaaggggataccatcgtgtatgcagggccggccagccacgctcctagggcacaggcgtgtgatgaggtcattgacggcggcgcacgcattgccatgccgggctttgttaacgcacatgcacacaatgccatggtactgtttcgcggcgcggcggatgatttgccgcttcataggtggctgacagaacgcattttcccgatggaagatgagctggatgaaaatgcagcctattggggcaacatgctgggcatcgcggaaatgattcgaggcggcacggcctgctataacgatatgtacttctttaccgagcaggagatttctgccgtagagcaaacgggtatcaaaagcgtgttgacgcgctgcacagtttgcccggagatggatcagagcaccatagagcaaaagctcagcgtttatgatgatctcatggcttatcagggcacagcggacggacgcatttcggttacggtgtctccgcatgcggaatatacatgcagcgcgcctttcttaagggcttgcggacaaaaggccaaggcgctgggaataccgttgcatatccatatttccgaaacagcttctgagcatgacgagtgtattcagcgccatggaaagacgccgatggcactgctggaatccctgggtgtattggaaaatgaggtatatgcggcgcactgtgtgtataccagccaagcagatcatgaaattatgaaggaatacggggtaacggcgctacactgcccggattctaacctaaaactggcaagcggtattgcaccggtggcccaaatgtcaaaagacggtgtaaagctggcgcttggcacggatggggctgccagcaacaacaacctgaatatgatggaagaaatgcagcgaatggtgttgctgcaaaaggggattacgcaggatgcagcatgcatgacggcaaagcaagccgtgcacattgcaacccgggcaggggcagaggcgctgcatacaggaggcggcgtattggcagagggctataaggccgatattatcctggtggatacccaagtaccgcatatgcagccaatgcacaacgcgctgcacaatctcgtctatgcggcgcaagcgggcgatgtttggatgaatatggtcaatggccgggtgttgtatcaagcgggtgaatacaagactttggatattgaaaaggtcatggctgaagctgccaaggcggcagaaaagtggatgtaaatagcaaaaaagagctgctttgcagctcttttttgtttattcttgggcaggcgtactcgcctttacgatatttgcattgtgttcagcatcttgaatgggcaggccttccgccgtgctgccggtaaagtataaacaaaattggccacccagcgtattgtccgcaactgtagctgttccatgcggcatcccgcagaaggaagcggcaaaataacgatcgcctacctgcacgatgcaggcccgcttttcatagctggtttgcccaccaaagatttttagcagcttttgtccttcttctgcattggcaggctcgaattcaagatgatgggtgccgccgacacgcacggcattgaaatacagctggctggaaaaatctatgatgagaaactgctgattggcagcaatcatcgggctgatttccgaccatggggtggtttctccatattcccggggccgcacggtagagggcttttcttccggcgttttaacctctacgatggcattgcgctgtacgccagcagaatacagcgcctggagcgtttcttcccctatgagcccatcctgcatcaaactgttctttttttggaaagacaagatggactgctgcgtcatgctgacaaaatatcccgaagctttataacggaagtagcccaatgcccgcaaacgatcctgtacggcgcctaccgtggtgccgcgcccgccgaccatcataggcatttcatcctcccaaggagaagcctcaggcgtactgctttcaagggaagcagagggagttacggcggcagaaacgtttgaaacggaaggtgcagacgggctagcagagggctggctgccttggttacagctgcgaaacaaaagaaaacccaatacgatcatcagggccgctacgatacataaaaggattttgggaacctttcgcatgaatacctcctgtaataatgtcatcattatatcatcgatgaagtagccaggcaaatcggccaaaatagacggattgtgatatactgtttacacaggaggcgggagagatgatttgtaattgtccgatatgcggaacgctgatggggcaaaaagagcagggcattgaaagcaaatgtatctgccctgcttgccagcatacttgcgatatatgcctaggcagcggaaagatgatggaaaaaggcggccctgtgccgctggatatcctgatgaaatacgacaacgaataaaaaagcggccgtacttggccgcttttttagctttgcagacttgttttaagctgttctgccttttcttttgcctgtgtgatatcctcttgctttgcctgcttaacagggtaccatccctgcttatgcataaaatcaaagatggcatattgatcctctgcggcttccacaaaaagatcctgaagcatggtgcgaaggttggggcaggttgtttcagcaatcagtgtagaataagcgctcattcgctgtttgcaggtaatgagcaggtcgttgagcatggctttatcatctaacgttgttttttccatggggctcctcctttatttctggctggtgataaattcatctaagcaggcaaagttctgcttatggtgctggcatacgcggtccaaaagctgcttggcatcgtcgctacgcacctgttggctgtaaactttggtcttttgataggacacggcttcgtggttcatcagatccataacattgttcagatctttggcgatgacttgctgaccatcggattgttggttgctgttctgcggcatattcaaaacctcctcaatgattttgatttagtatcaacaaaacgcacagattctatgcggtaagaaatcttggtttttttgtcaagatgcgttatgatgtaaacaaacgaacaaatgaggattacgatggatcggcctgtaaaaaaacaaaaaaagaaaaagctttgcatggatgctgcgctgacgtatttgggaactcggatgcgctcggaatacgaaatgcggagctacctgcaaaaaaaacagtatcgcgaagatgagatagagcaaacgatagagcggctaaagggatatggatatatcgatgacctggcctttgccaaagagatgatacgttgtaaaacagcgatacggcctatggggaagcgcgccttacattacgcattgtataaagcgggtgtggataaggacacgattgaagagggattagccgcctatcctgacaaagcggagcaggaggcctgcgatgtgctgtgcgaaaaactgatgctgaaaaacggaacagatcggcaagggcttgtcaaaacgcagagggccttagcggccagagggtttggctatgagatggtttcaaaagcaatgcaaaagaggagtgggatcgaatgggaatgagagacaggatactggcgctgatgatgcaaaatcagatcggctatctatcgggagagcaaatcgccgctgagtgcggcatttctcgtgcggcagtctggaagcacatcgatcagctcaaaaagctgggctgtgccatagacgcaaagccgaactgcggatacaggctggtttctctgccagactcattagatccaaccattgtaaaaacttttgatttctccggactgttgaaatccgatgtcgtattgaagcattttgaaagcgtagatagcaccaatgaggtggccaaacgatttgccgccaaaggagataaggacaagaccgtttacattgccgaggagcaaaccgcgggcagaggaagactggatcggagctggacaagcaaaaagggtgccaatctgatgtttaccatcttgttacggccgacctttagaccgcaagatgcatcaaaggtgccgattattgcggcggtagcggtggcgcagtccctccgcaactttaccagactggatgcccaggtaaagtggcccaacgacgtgctgatagggaccaagaaaatctgtggtattcggtgcgagatggcggcggattttgaccgggcagaatggctgattgtagggatcggggtaaatgtgaatcagacggtgttcccaaaagagctggcggataaggcaacgtctgtacgagcggaatccaaccggaatacatctaggccgcagctgctgctttctatcctaagcgacttttttgatctgtataaaaaaacctttgaagaaggcggctttgatgatgtaatcgtggagtatacaaagatgagcgtattgttccagcagatgatcacaatacaggcaggcggacgcgaaacgcatggacgctgcatcggatttgatagggaaggctgcttgatcatgcaaaatgaacaaaacagacgggttcggatcatggcaggcgatgtgagcataaggagtgaaaagacctatgtatagcggaaatatcacagaagtacaggggattacagcggcgcatatgacggatgaaaaggcaagaacgggatgtaccgtgatcctggccaaggaaggcgccgtgggttcggtggatgtgagaggcggaggcccgggtaccagggaaacggatgcgtttgcgccaatcaatctggtgcagcaggtgcatggcgtatgcctaagcggcggcagtgcatttggattggccgtagcagacggcgtaatgcgttatttggatgagcagcagatcggatttgatactggggtggcaaaggttcccattgtgggcggcgcggtactgtttgatctggcctatgcagcgccgggaaagcggcctacggcggaaatgggataccaggctgcggcaaaagcggacggcacaccgcttgcacaggggtgttttggggccggtacgggcgctacggtggcaaagatgctgccaaacttacagccgaaaaagagtggatttggcacggcgtcgatgaagataggcaaagcgaccatcgccgctgcgtttgcagtcaatgcattggggaatatctacgattataagacaggcgacctgatttgcggatatacgttggatgagcaaacaaatgcgatgaaaaagatgtggaatggacagaataccaccattggcgtcattgctacggacgcaaaattgaccaagacgcaggcgcataggatggcaatgttggcccatgacggatatggaatggcaattcggccggttcataccatgcacgatggcgatactgcgttttcgttggcgacaggaaaggtagaggaaaatccagatctaatttttgcgtttgcagcggaggtaacggcacgggcgattgccaatgctgtatggacggccaatcaatagaatggatgatgaaatgggggccgatcagatggagctgatttatacagggaatgagattaaagagatggatcgccaagaaacaaagggaggaacagagatcctatctctggtggaaaaggcgggcgaggcaatagccgcgcagatagaacaaatgccccaagggccgatttgcattttttgtggggctggcaataatggcgcggatggtttatcagccgcgctgctgttggcgaggaccagaaaggtaagcgtgctttttttccatgagcatgccgtcaactctatgatgcgcagcttatatgaagctgtggtgcagtccggtatagagtcatgggagatagagaacgaagcacagatcccagaacaactgaccgtcgagcaaggcattgtggtggatgcgcttttgggggcgggcagtaaccgccctgtgcaggggcttttggccaaggcgatagagaagatcaatgtcctgaaaagcaaagcgatggtcataagcatagatataccaacgggagtattcccggacacgggcactgttaaagggccggcagtgtgtgcggacattacctattcactgatggggcataagcctggcgtgctgctttatccaggggcaaagcatgcggggcgggtggtattgttgcatccgtttcaaacacagtatagagcgccaaggctgcgctttgtcgtacagccggaagcgtttccaaatttaaaaagagatagattttcccacaagggaacatatggaaagcttgcgattgtggtgggttctgatggcatgtacggtgcgggtgaattatgtgcacgcgctgcactgcgcagtggtgtagggattttacgaatggcaagcccgcaagcaacagccacgggatacagaaacaatcttccttgcgcgctggttcgtacgctaccggaggaaaacggcgggtatgcgccgtgtagaaaagatctggagacgcattttgagggcgcaacggcgctggcagttggatgtggcatgggaaaaagcaagggcgtttggccggtggtatttcaggctttacaaacaaaaaaaccctgtgtagtggatgcagacgctctgaatgctttggcgcgagccggcaaacaggcctggccatacctacatgaggaagccatattaacgccgcatcctgcagagctggctcggctgttacaaacagataccagcgttgtgctgatggatgcgatgcgtgctgccgaggcgctcgcaatgagcgcgagcgcggtggtgttgtgcaaaaatgcgagcaccatcatagcgggccccaaatatacggcggtggtgacgcgtggatgcgccggtatggcaaaagggggcagcggggatgtgctggctggatgcatgggcagtttgttggcgcagggatacagcgcgtttgattctgcgtgcatggcggcctatatctgcggaagggcaggcgaattggcacaggaagcttatggcgatgtctcaatgcttccgacggatacaatagagatgctgccgcgtgtatttatggaattggaaaaataggcctactggagagacttacagtttcctttttcatagcagacaagcaccggaaccatcgaacctgcgtactatgtagtgtatctacaaaagagtaaacgcaggtgaacgagatgattcaaagaggtgaaatctatctggcaaagctctctcctgtggttggcagcgaacaggggggcataaggcccgttgtcattgtgcagaacaataagggcaacaggttttcgcctacggtgatcgtggctgcgatcacttccagcaaaaccaaaccgaacctgcccacccatattcgcataatgcctgaggagagtgggctgaaaaagccttccattatccttttggaacaaattcgaacgttggataaatccaggctgattgaaaaaatcgggtgcttggcacaggaaaaaatacaggagctggatacggcgcttacggtaagcttgggttttacggaaagcatttagcatgatataatacacgggagggcatacaagccctcctatttttgcgtcactaaatttataaaggggagtggattgataggaatgaagcaggtaatcaaaaatcttattattatcgcgattggcggcgctttgatggggtttgctatgacaatgttctttattccgaacaaaattgcgccaggaggattcagcggcttaggaacagtattttattatttgtttcattggccggcaggtacggtaatcttcctgatggatcttcctctttttctgattgcatggaaaaaatatgggacaagctttttgctatactcggtgtacgcggtagcggtttccagcatttttacagactatgtgccggcaccggtgattacaaacgatatcatgctggccagtatttttggtggtatcgtgcagggagtaggtctggggctaatcatcaaggcaggcggtaatacggggggtacggccctgctggggcagttgcttcattctgcgctgccgcaggtaaatcttgcttggatgatctttgcagtcgactgcttggtcgttattttcagcgccgtggtatttggcatagagatctccctatttgcctttatcgctttgtatgtctccagtaaaatgctggatcttgttttggaaggattatcgggcgcaaagtccatctatatcattacggaccatggacaagagattgcgaacaaggttttgtatgatatggagcgcggcgttaccaatctttcggcaaaagggatgtatagcgggaagccgaaagatgtgctgttgatagtgctgcaaagctcgaatgaggttatcaagctaaagacaattgtgagtaccattgacgaagatgcctttgtcctggtggtggatgcgcgtgaggtgttaggagagggctttgctccgcccacctcgcattgagaaaaagccatgattacgattgtatctgaaaatgagcataagactgaacgcatcgggcgctgctttgccaaaacggcgcccagccgctgtttggtatttcttaagggaaccttgggcgctggcaaaacagcatttgccagaggcgtcgcccgggggcttggcgtggaacgcaatgtatcatcccctacttttacacttgtcaatgaatatcaagggcaaagaggggatcttatccacatggatttgtaccgcttgttggatcagccggcagaggagctaggattggaagaatattttcaacgaccaggcatctgcctagtggaatggccggatgtgctggaaggatgggaatgcccggacgtcaccatttccatcgaacagactgggctggaacagagaacttttttcatcctggcagaggaagaattggaacaacagcttcaggaggcatttgcatgcgaattttagcgattgataccacagggccggcagcaagcgctgctgtttactgtgatggccaggttcatcaaacctatttggaggatgggcatacgcatagccagaagatacaagcgctgattgaacaggcaatgcaggaagcaggcctatcgcccaatatgctgacaggcattgctgtaacaaacggcccgggaagctttacgggaattcgcatcggcgtctccatggcaaaggcgatggcgcaagctttgtcgctgcccttgcttggcgtcagtacgctacaggtgctgatgcgccaggcgaaccgggcgccactgcgctgtgccgtgatggatgctaggagaaaggaagtatatggcgcggcgcaatgtggagaaaaaaccattattgccgaaagtgctatgcctttgcgagattttttgcatatcatccaggaaactggagaatctgcctgttttgctggggatgcggtgcgcgtttacgaaaaggagatcataaatgcactgggagaacgtgcgatctttctgccagagccggaacgcatccaacaggccggcacagcggcgctgattgccgccgatacgcccaagcagcattggatggacgcctttgccttaaatccaaactatctgcgcatatcgcaggccgaacgggaacgcttggccaaggagaatcaaaatgaagctaagaaggcttgaaaaagcagacgtgccgcaggtttctttcttggaacaggcttgtttttctgtgccgtggagccaggcgtcgttgtatcaggatatcgtgaacaacgatttggcgcgctatcatggtatgtttgatgataagggaaccctgattgcttatatgggatactggaaggttttggagcaggcacatgtaacaaacgtagcggtagccccggcgtggcgcaggcgcggcgtaggcaaaagactgtttggttatgtgttgcaaaaagcggcacaggagggggtagaaagcctcaccttggaagtgcgtcccagcaacgaggctgccttggctctgtatcggtcctttggtatggaggagcaagggcggcgtaggcattattattcagacaatggagaggatgcgctgatcctttggctttcttcattgccatacccacaagcgcactgacatatgttataatattgcattatagtttgaaagcaggaacacaatggtcttttctgtgggagatacagagttatattataaagtcatggggcaggggccgccggttttaatgctgcatggctggggcggctgtgcggatagctttgcgccggtatcgcttcggttggccaacctgtttacggtatatgccattgattttccagggcatgggcaatccagtatgccgcaaagaccttggaaggtacaggattatgcgggtgttgtgcgtgcattcatcaaggagatgggcctagaaggctgttatgttgtggcccattcatttggatgccgtgtgacgctgaaattggcaagcaaggaaccgcatctgttttcaaaaattatatttaccggtggcgccggtataaggcctaaacggacgtttgcgtattatcggcgcacatattcatacaagctggcaaagcgcttggcaaagcataaatggggcgttgggttgtataggctttttggggtagatgtaaaaaaacgcgttgagaatgctggtagccccgaatataaagcgttgccagagcatatgcgccgtaccttttccaacattgtcaatgaggatctaacgccatgcttggaaaagatcaaggtgccaacgctgttgatatggggaacagaggatacggaaacgcccctatggatgggcgaaatgatggaaaaaaagattccggatgcggggcttgtaaagctcgaggggggcacgcattttgcctatctggagcatctagagcagtttttggctgtggtaatttattttttgacaagtgaggagaatacatgagccttaccgcaaacttagtaggttttggctgggtatggac

SEQ ID NO: 2442 - DNA, 7821 bp, Unknown
  16S sequences of unknown bacteria
ccagtatcttgaattcacctgcgacgtttataaacgggaggacggcagaaactttgtttgctcgccgcccatgaagggtgaggaaagccgaaaagccctttggcaggcgattaaaagaggcgatattgcaacgatagcaaccgaccactgccccttccaggcctacgaaaaggattgggggaaggacgatttttcgaaaatccccaacgggtgcgcgggaatagagaatatgtatccctatatgctgtcgtcggcaaataagggtgagatcagtttcccgaaggcggtcgagctgtgcgcggcaaatcccgcaaaaatattcggatgcaaaagcaagggctcccttgcggtgggcaaggacgccgacattgtaatctacgatacgaccgtctgttttacaataacgaacgataaaatgcattccgactgcgaccacacgatttgggagggcataaagctgaagggctaccccgaaaagaccttttcgagaggccgtcttgtatttgacaaaggcgaattcacgggcgaaaagggctggggcaaattcgttaaatgctcgcttaaataatctgaagagactttgttacaagaaggtgagacaatgcttgatgtaaaatttgaggcggcaagatgccttttgtgtgccgacggcgcatgcgacagagcctgtaaaaaaggatttaagccgtcgcggatgctgcgctcggtttattttgaaaacggtcaaagggccgcagaatttgtcgacagagccgtgtgtgcggactgcggcggagactgtgaggacgcctgcgttcattatgatatgcccataagaatcagagaaacggcaaaaatgctgcccgaccgcaaaaaaaccgagccaagggatctgtccatagattttttgggagtgcattttgaaaatccgtttatactttcctcgtcgatcgttgccggcagctacgaaatgtgcgccgacgccttcagggcgggctgggcaggcgcagcctttaaaacaataggctttttaaagccaaaggaggtttctccgagatttgacgttttaaacaaggaaagcactccgtttatcggctttaaaaacttagagcagatctccgaccacgatctgaaggataacttagaggatttaaaacggcttaaaagagattttccgaataaggttatcgtggcttcgattatgggacagaacgaagaggaatggacaagccttgcacgacttgtaacagaggcgggctccgacattatagaatgtaatttcagttgtccgcaaatgtgcgaaaagggactcggctcggatgtcggacaaagtccggagcttgtggcgatgtatacggcggcggtgagaaggggcacgcatttgcccgtgcttgcgaaaatgacgcccaacatcgggcatatggaaattccggcaattgccgcagtaagggcgggcgccgacggaattgccgcaataaacaccgttaaaagcataacgggactgtcccttgactgcaaaaagccgagaatggatgtatcgggcgaaagcgccgtttcggggtattcgggaaaggccgttaagcccatcgccctgagatttataagcgacatgaagcacaacgccgagctgaaggatgtacccataagcggtatgggcggaatagagacctggcacgacgcggcggagtttatggcgctgggctgcggcagcgttcaggtgacaacggcggttatgcagtacggataccgaattatagacgatttgttgagcggtctgtcccttttcctttccgaaaacggctatgaaaggctttcggattttgtcggtacggcgcttggtgaaatagtatcggccgataagcttgaccgaaacagcattgtttatccttcgtttaacaagggcaggtgcgtcggctgcggaagatgtatgatctcctgccgcgacgcgggacatcgggctttaacgatgagcgataaaacgcttaaaccgaggcttgacccggaaaaatgcgtcggctgccagctttgcgcgcttgtatgtcctctcggatgtataggtcagtcaaagagaatagagctaaaggcaagcggatattaaaaaatatggggtgacgcaaaatggcgataaccatgcgtaagctttgcgaggatgcaaaatcgaaatacgatatggagcttgttgcgggcaaaagcggcatagaaaacaccgtcagatgggtgcatatggtggaggacagagaggttcccgattttctccacggcggcgagcttatctttacaacgggtatcggacacattgaaagcgacgaccgtatgcttgaattcacccgcaatctttacgcccacggagccgccggggtggtgtttaatataggtccctatatcaaaagaattccccccgatgtcataagctttgcaaaccaaaacggctttccggttttcaccctgccgtggaaggtgcatataattgatatttcctatgatttctgcggcaggataatcgaaaacgaaaaagcggaaatgagtcttatgcaggcctttaaaaatctcattttcgcgcccgaaagggaagaggattatctgccggcaatgcaaaaaaacggctttaacgccgcagagcattaccgtgtttttgcaattaccctttacggagccgacggcaaggttgtaacatctccgctttattcaaaaaacaagatgctgctgtggcgcattttttcgggatcggattcaccggccgcgatgtttatttataactcccgccttattgtcgtaaagcagcggtgcccggagcattgtgttgaacggatacttacggcgcttgaaaaggccttcagccaaagcaggacacgctataaaacaggcatttcggacgagggaacgggctatctttcggtgccatacctttaccgccacgcaggcgcagcgcttgttacggcaaaatatgaaaacgcggccgtggcaagatacgacgatataggcgtaaaccgtcttatccttgcgattgaggataaatccgtggcggaggcctatgcaaacgaggttctgagcgcggttatccgatatgacgaagaaaacgacaccgatttaaccgggcttttaaagctttatatcgagtgtgattgcagcgttaacgcaacggccgaaaaaagcggagttcaccgaaacaccgttaacaaccgcattaaacagataagggagctgctgggcggcgcccttaccgaaaggaaaaaggccgagcttgttttagcctttaaaatcagagatctaattaagtttatttaacggaggcagtttaaaatggatgcaaaaactattgtagagtatcacaaaaagtataatttacagtcatggtcaaagcaggcggcaataaaccccctgcccattaaggacgccgagggcatatacatgtatgactttgacggcaacagatacgccgatatgtcaagccagcttgtaaaccttaatgtgggtcataaaaaccgtcagataatcgaggccgtaaaggagcaggcggaaaaatactgttatatggctccttcctatgcctgcgagccgagaagcactctggcaaaaatgatcatcgaccttatgcccgataatatggcaaaggtgtttttcacaaacggcggcgccgacgccaacgaaaacgcggtaaagatcgcacgcatgtataccggccgtcataaaatcttttcgagatacaggagctaccacggctcaacctacggcgcgggcaatcttacgggcgagccgaggcgttatccgcttgagccgggcgccccgggctttgtaaaattctttgacccctatgtttacagagaaaaaatcaaattcgactccgaaaaggctgcggcggattattatgttgcaaagctcagagagcagatcatttacgagggtcccgacagcgtggccgcaatagttgtggaaaccattacgggctctaacggcgtaatcattcccccggaggggtatttaaagggcgtcagagccgtttgcgacgaattcggtattatgatgatctgcgacgaggttatggcaggctggggcagaacgggcaagatgtttgcctttgaaaatttcggtgttaagcccgacattgtttcattcgcaaagggcgttacctgcggctatgttcagctgggaggcgtttgcgtatcaaaggaaatagcggcgtttttcgacgatcatttgctttcctgcggacttacctacagcggacatcctcttgcctgcgccgccggcgttgcctgcttaaattattataaggacgtaaacattctcgaaaatgtcaacaaatcgggcagggcgctcggcgagtgccttgaggaaatgaagaaaacacatccgtgcgtcggcgatgtaagatatatcggacttttctcggccttagagcttgttagaagcaagcagacaagagagccacttgttccttacggaaaggatcccgacggaattatgggaaggcttataggcgagcttaaaaagcgcggctttatgacctattcccacgagaatatgattatagttgctcctccgcttattataacggtcgagcagattaaggaagagcttaaaaagcttgacgaggtgctttatattgccgacgaaattgttgataagaggtgacttatatgtcgggcggacactatgaaaacataaaaaacgcaaatttatttgactgtatcggcatttcacagatccgtctcgttccgtctaaactgagaaatgttccggtcggatattccgaggttcctcttatattccaccttaaatccgaaactgtaaaaaagctggcgtttaaggtgccgtggggcggcgttgtgtacggctttgcaaattccgcgcagcaaaccgagcagaggctcggtcttaattcccacataaccgacataaccgtttcggactgggacggcagatttatgcttatattcgaagccgaaaacgaagccgactcggtggcctttaatgtggccggggaggatgttataaaaatgttgaacgaatgccgcagaccggcagaaatgtgaaaggatgaagacctatgtataaatgcagcgaagaacgaatgaaggataaaatcgaaaccttttcaaaattcggcgatgccggacacggcggcataacaagatactccctgtccgacgcggcaattaaggctcgcaacgaatttgtaaagcgtatgaccgccataggagcagctattgagacagatgatgttgccaatgtgtacgcaacaattcccggctccgaccgtgatgccaaaaggatagttatggcgtcccatgttgactcggttaaaaacggcggtaattacgacggtatactgggcgttatgtcggctatggaggtgcttgaaacagttgttgagcacaatataccccacaggcacccccttaccgcaatgatatggacaaacgaggagggctctctttatccccccgcaatgatgtgctcgggcattgtttgctacgattatctgccggaggacattcgtcaaaagttcaaatatgaggatatgcttgcaacaaaaagcatgttggatccgacaaaaaccttcggcgaggcacttgataaatcgggctttaagggggacaaaagcaaccgcatttcccccgaaaaatatcagtatatgtttgaaacgcatatcgagcagggccccattcttgaagacaaccaaaaggatatcggggttgttgactgcgttctcggtatgtttaactaccgcgtgaaattctacggtcagaccgtccatgccggcaccttcccgatgcccaagcgccgcgacgcgctttatgcggcgtcaaaggctctgtgctatcttcacgaggaaatagacaagcttgcaattcccgagcttgtttataccacgggcgagatcgtctgccacccctgcgtgcacacctgcgttccggattatgtcgatttttcgatagatgtccgccaccaagaccccgaggcgcttgccaaggtgcttgcggtggtgaaaagctgcggcgaaagggagtgggcaggctgtaaatgcgaggtcgtaaaggcgtggaacagagatacagtttactgggataaaaggcttgtcggctatgttgaggagtcggcgaccgaaaacggcataccgcatatgtcaatccattcgggtgccggtcacgacgcgcaatttgcctcatatatgctgcccacgaccatgatattcgtgcagtctaaggacggactttcccactgcgagccggagttttcttcggttaagcactgtaccgagggagcaacggtaatgctgggcgccgtgcttaaagcggacaaagattgacttaaaaaacgcctctcccgcaaaaattgcaggaggggccgtttgatgaacgagggtgaaaaacatgtcacgggaattttttataccgaagaaaattattacgggaagccgggcgcttgacgcggtcggcgaaataattaaaaattacggcaaaaaggcgcttatagttacgggtaaaaatgtccgaaggctcgattgcttttcggctctttgcaaaacgctcgagggctgcggtctgtcatatgccgtttttgacggaataacaggcgagccggacgacaccatgattgcggcgggggcagcgaaatataaggacgagggctgtgatttgcttgttgcgataggcgggggcagtcccattgattccatgaaagccattgccgtaaacgtttcgggagaaaaggaaatatgcgattattaccaagaggcaattgatattaaattgccgatgatgacggcgatacccacaaccgcgggaaccggctccgaggccacgcagtttaccgttataaccgacacaaaaagaaatataaaaatgcttttaaagggcgcggtcttagtgcctgatgttgcggtggtagacggcagcttcggcatttccgctccgaagtccgtaacagcgtcaaccggacttgacgcgcttactcacgccatagaggcgtatacctcccgccgtgctcagccgcttaccgacagtgtttgtatatctgccgtaaaacggttatttaaatatcttcctgttgcatatgcaaacggaaacgatttgacggcgcgaaacgaaacggcaatcgccgcgcttgaagcgggtatcgccatcaacaattcctctgtaaccgttgttcacggcatgagccgccccataggtgcgctttaccatgtgccgcacggactttcaaacgcaatgctgttgtataaatgtatgtcctttgcgcttgacggagcagtgagccgctttgccgctttaggcagggcgataaatgcggccgacggaaatgccgatgaccgagccgccgcagaggcctttttggatgcaatcggcgatatttgcaaaaagcttgaagtaccgaccctttccgagtatggcatagataaggaggatttcttcggcaatatagaaaaaatggcagatgacgcacttgcaagcgggagccccgcaaatacggcgaaagaggttaccaaggcggatattataaacatttataaatcgttgttttcttaatatcggttggaattaacagcctttcaccgtagctgcgttaccatcaggttctagtcggggcaactcggtggaggttcaagtcctcttatccgcaccaaccaccttgaggttttcaggaaaacctcaaggtggttttcttttcacttttctctcttctttcttctcttttttcttaatcggttcgtttatcattgctaagccgaatttatccgccaaactttttataggtcacagaatatttgcaactatcatcatttgtcaaatcaagcgtgtggacgcagttctacaaaacgctggaaatcaaagcgcgcca

SEQ ID NO: 2443 - DNA, 11746 bp, Unknown
  16S sequences of unknown bacteria
attttttactacttgtttttaagtcggccctttttgcgcatttttattcacacttgatatctccatattttttatcatgaatgcatctgcatttataacatccagaacaaatagcaggcataaagataagcacgacaaaataacagcaaatactgactcagatctgtcatacaatgatacctctcctttaagcaaacgagtcactatttctgtacttgtaaccaaatatatttaatgcagtaattgaatccattggatcttcattacaacgatcagcattctatttcacctcccacaatgtcatctctttcaatttacaaatatcatatggttttcacacgaacaatcgaaatggcataaatggaagcataattagtatattgtgcttgcccgaagctttgtggatcctgccagcaattttctcatgagtgcgttcatgttccctttcatatcatacaaacaagcgtttaaaacgcatagccattttgggaatatgcagaaaaaggagcagatccttttcacgttgctgctgatccggacaaagacagtgaagcgatcgctctagctgcagctcaggctataatgacgaaaaaaaaggagatgatcctgatgagaaagatcatgcagctgacgataattatgctgaccgccacactacaacagatccgcttcccgcggcagaagcacagatcgaacgtcccaccgtggtcatcgatcccggtcatggcggtgtggatggcggaagcataggcaggggctatactgaaaaagacatcaccttgcagatcgcgctgcagcttggcgctgcgctggaacagcgcggctgcacggtcatctatacgcgttccaccgacacagcgctctctgagctggtcagcgaagatctgttccagcgcgtgatgatcagcaatgacgcgcaggcagacgcgtttatctccatccatctgaattcctctgaatacatagccagcggctttgaagtgtggtcgtcgttttctgacacacggtcatattcgcttgcccaggcactgaacgatacgctcagcgcattaaattataccgaagcgcgggagatgcgcgatcaggatgaatccaacctgctcgtgctggcgctgaatgaagcgccctctgtcctgctggaacttggcttcatcacctctgccgaggatatgcgcatcctcgctgacgccgcctttcagcgtgagctcactgatcagctcgcggacacgatccacgcttatgtcacgcaataacgcaggcaatcagatcgctctggtcgcctgcttcagccacgtcctctccgcatcgttcagatacggagagactttttcgtatacttccgcatgataggcgttcagccactgccgctcatccggcatcagcacgttcgggtccacgccatccaggtcgatcggcacgaacgtgatcgtctccaggtacatgaactggccatattcattctttgttcctttacgcactaccgtctcattctcgtgacggatgccatatttcccttccaggtatacgcctggctcatcgctttgcaccattccttcttccagcacgcagctgtcattgcgctccggcacgatctgccagcggaatccgttgggcgcttcatgcacattcagcacatgcccgatgccatgtccggtcccgcatttatagtccaggtcaaggtcccacagcggtccgcgcgccaggatgtccaggttcatcccccggcatccatacaggaagcgtgccttcgccagacggatcatcgaccgcaatgccgtcgtgaagtgcagcttgcattcgtcgctgagctcccccagcacgaaggtccgtgtgatatcggtcgttccttcttcatactgtccgccgctgtccaccagcagcaccccttctgctttcagctccgcatcgctttccggcgtagcgatataatgcatcaaggccgcatgttcctggtacgcagaagcagtctggatcggttcaatgaaatgttcctgttcctgccggaaagccagcagctgatcgctcgccgagatctcggtgatcttttctttgcccacatgtgtcttcagccagtacatgaagcgggtcatcgccaccgcgtctcggatatggcagcgccggatgttttccagctccaccggattcttctttgccttcatcagcacgatcggattcggtcggtcgatgatggtcacatcctgcggcagggaagccgtgatgcgatagttcgtgttggccttgtccagcaatactttgctggaagcggggatatgcttcacctcttcatagatcgcgtcatacgctgccgtgcgcacgccgatctgtgcaaaggtcgtcttcagatcatcgctcagccgcgcgtcattgagataaagcacggcatcctgctgatcgatgaggatataacataaggctacgggaaaacatgggatatcatcggcgcgcatgttgagcagccaggcgatatcatcgacacgggtgatgatatggatatctgcgccggcctcggccatggcttcgcgcacctcactgagcttttgcgccgcgctcttgcccgtataacgctgtgccagctcaaaggtctttgacgcaggcagtgccggacgatcatgccagatcgcgccgaccagatccatgtcacagctgatcgtcacttcactgagctgagcgcacaggcgctcgaccatggcggtgttcatgacccggccgtcaaagccaagcgtggcatgagcgggcaggacatcgcacagataggcttcgatcgttgggacgccctcgtcgcccatacgcatcagctcgatgccgctgccttccagctgcttcgcggcctggatgaaataacggccgtcggtccacagcttcgccgcatcggccgtgaacacacaagtgccggccgaaccggtaaagccgctcatgtactctcttgccttaaaatgatcacatacatattcggtttcgtggaaatcggatgtcggaacgatataggcatctacgccatgcgccttcatctgggcgcgcagctgctccgctctcgctttgatctcattcatcgtattcactctgctttctctcatatatcatatttaccaggccagatgtcgtgctgacgcgcagcagcttcagcctgcgcatgggtccatctgacttgaacagcgggatgcctccgcctaagatgagcggcagcgtggtgatgtgatattcatcgatcagatcggctcgcacacattgatcgatcacatcgctgccgccgcagatccagatgtccttcccctgttcctgtttcagcgtatggatcaacgccgtcaccggctgacagacaaagcggatgccctcttgcgcggaccgggcctgatgagtgagcacatagctttgcataccggcatatggccagatcgcaggcgaaagttcgtcacggatctggcagtatgtccgatggccgaggatcacggtgtcgatggtctttgcaaatgccgcatatcccgcatcttcggctggcgcttcatccagccaatccaccttgccatggggatcggcgatgcagccatccaagctttgcgcaatgtataagatgacttttctgctcatgcgcatccctcccttgtccggcgcatccgctgttcgctcactttctttacagcggacgtgcgcttgctcttgcggcaagtcaaagcagtccggcagaagttcaggtcaagctgctgtgccagcaagacgaagcgttctctatgatacccgcatatctcttccgacttcatttcttttgtttcgatcatggcaacgtcgtttcgcatgaactgaagctttccatcatgatccaaaaatccttgaacagctttcagttcatctttgatcagctgaacatgcaggcggatctcacggttgcatttgtcgatctcttcctgcgggcgctgcacctgcgctgcgggcagaggctgtgtcatatattggcgcacgctgtaccgcgcgcgcatcgcttccagaatgtccatatcatgctccttcctgaggccattatacccgtttcccgaagaaaaagcacctgcgccgggcagatgcttgtttcttacatcagttttctgaacaatgccttcaggtcttcttcgctagcgtctttcggattgccaggggcacaggcatcttcgtgcgcggaatgcgcgaggaaatccagatcctcttccttcagcgcttccagcttggtcgggatgccgacatcgatggacagctgacgcacagcgtcgacagcggccttacgatattcttcctggctcatctcatcaacgtctttcacgcccatcgctctggcgatctcgcggtattttgtaccagtgcattcagcgttatattccataacgatcggcagcatcatcgcgcaggcgacgccatgcggcgtgtcatagaccgcacccagcgtatgagccatagaatgcgcgatgccaaggccgacgttggagaagcccatgccggcgatatactggcccagcgccatgccttcgcggccttccttttcattggccacggcgccgcgcagcgaacgggagatgatctcaatggccttgaggtggaacatgtcggtcatttcccaggctgccttggtcgtatagccttcaatggcatgggtcagcgcatccatgccggtcgcggcagtgagcccctttggcatcgatgccatcatatccggatcgatgaccgcgatcaccggcatatcgtgcggatccacacagacaaatttgcgttttctctccacatcggtgatgacatagttgatggtcacttccgcggcggtgccggccgtggtcggtaccgcgatgatcggtacgctgggcttgcttgtcggggcaatgccttccaggctgcgcacatcctcgaactccgggttcgcgatgatgataccgatcgctttggccgtatccatagaagatccgccgccgatggcgatgatatagtcggcaccagccgccttgaacgcggcaacgcccttctgcacattttcgatggtcggattagccttgatgtcagaatagatctcataggcaagggaagcctgatcgaggatatcggtcacttttccggtcactccaaagcggatcaggtccggatcggagcagacaagggctttctgatatcctcttgacttcgcttccgcagcgatctcctggatcgcccctgcaccatgataagatgtctcattcagcatgattcgattggtcatattgcactctccttttcttgtaactgcttacatcttcagtttatcagcttagcgcattcagataaagtgacagaaaacctgatctgtcacttcagttctaatctgcgaaaagtcttttcaagctcagcgggcattgcgtcacaaagctgccgagccagctgcagcggagcgagctgcgcaccttccatgagccatttcacggtcatatacaccgatccctggcaatacatctccaactgaaagcgcaaggtgtcggaaagcgggcagatgcgggtgatccggtcggtataaaaagccaagatcagccggaaatcatgctcacgcaagctgttctgcgtatcacagcgaaacgcggcctgaaagaagatcagctcttctcttatataggtgaatttgttgacgagcgcttcataaacggtcttgccttctcccatatgcgcaaaagactgcatcaggatctgatcaaatacccagtggaccagatcatatttatcctgaaaatgacggtaaaatgtctgtctggtcgttccgcatgtccggacgatctgcgtcactgtgatcttctccagcggcacctttctcatgcactgtttcagcgcctcggccagcagcatcttcatctcttctttctctgtcaccacaccgcctcctcatccccatgattatatcatgaaaaaaagcgctcaccctgatcgatctttctcctgtcaagctgacagacgaaatattctaagaaatgctaaagaccgtcgcctgagcacgatcgccgacaaggctcttgcgatgacacgcaagctctctaacccatgtggggcacagccacatccctttacagattggaagatggccctaaacgaatcagaaccggcgtggtgcaacatgccggttctgaccaaaatctgtttacttccttatgggatgctgcttaagcgcaccgatcctctccgttaatgtgtccttcttctgcgattcaagcagagcacacctgcggcagatgccaggaaagcagccgccagcagtcccatgcccgtggctgcgccggtctctgtatcatccggcttgttctctccgccttcagaaggctgcggatcttccggcgcctcgctgccgcgcagcgtcagcgctgcctgtgcatccttcagcgcctgtaaagcggcgtcgacctgctcttggtccacattcgcttccagcacggccttggcatcagccagcgcctgcgcgaatgccgcccatgtgtcctctgtgtagtcctcttcctgcaatgccatcgcatcatcaatggccgcggaaagcgcagatttatccgtgtcatagacgagcagctccataagcgcgtccatacgttcattcagcgtgttcgtgctctcatcgatgacagactgtgccagcttgtgcgtcagcatcgtattctgcgcatcagccagcgcttcgttcatcgcagccagcgcttccttggcagccgttacggacgcttcggtaaactcgctgagatccaatgcttctgcctgttcgatggctgtctgcagcgcctgcttgtccggatctggaacgagcgaatcataagacagcccgtgtcccagcggatagacgatctcatctgaatatgttccggtaccggaaatatatctcgggatatcgaccggcagctttccagacgcgccgaacgtacccaggatgacttccacgccagccgtcaggttcgggctgaacgccgcattcgcgctgatggttccaccgccgaatgattccgtgatgtccagccctgcgctcgtcgtgccatagacggctacgatggcatctgcctctgagaacgcctgcacatcataaggctgattcagcgagatggccacggtatccttgcccaagccttcgcaatagttgatgaacagctgcgggcaggtcacgcggtaaccatcgatgttggatgcgctggagatctcagatgcatgcacgagcaccgtgcaccaatccagcagatcctggttcgtgccatagaagttcgtgccatccgagttgatcgcgctgttgacctgatccggcaggccggtccagttatagtgctggaggatcttgtaatccgcaccctccgggatcagtccggcttgttttgcccgttcccatgccagaacgaaacggttgttgttgcgggaatacgttgatgcaaacaatacccttgaatgctcatccagcttcagcggcaagagatcgttttcattcttgacgaccgtaacggcattggcggagatcagtctctcgctctcacgattaaccacagagccgaccacttcctcagccacggccttcttctcttccagcgtacgctcgtcttctgccagatccatgatgccgcggttgaacttcatggtcaggatgcggacgacagattcatccagctcatcctgagagagggtaatgccctgatagccgtcttcttctgtatatgcctgaacgaaagcgtcgatcagcgggatcagcttgctctccatgtctgcccatgagctcatgtcattgaacgggatgtcgaggatgtcgacgcctgccttgacggccagcaggttgcgctcattcacatcaaagtaattggctacgccgtccatcgtcatggaatcggtcacgatgacgccgtcaaagcccatctctcctctgagcaggtcggtgaggatctcgcgggacatcgtcgccggcgggctcatccattcatcctgcaggctggaatacagctgttccgtcacgatgttggggaactggatatgcgcggtcatgatcatgtccgttccggcatcgatggccgcctggaacggcaccagttcagtcgaatacagctcttccttcgtggaatcgatggaaggcagcccggtgtgggaatccgtggacacattgccatggcccgggaagtgcttggcgctcgttgcgacattttgcttctgcacgcctgcgatgtatgcggaggtaaactcagcggcgatctgcggatcactgctgaaggaacgcagtccgatgaccgggttgttcgcattattattcacatcggcgtccggcgcgaagttggcattcacgccgaccgcgctcagctcgctgccgatgatctctccggccatgacggcattgtccgtatccctgctcgctccaagcgccatattgcccggcagcgccgttccgccggtcagccggtacacgatgccgccctcctggtcagcgccgatcatcagcgggatggcgtttttgcctaagctctcatccatcgccgcccgctgcaggccatccgtcagctccacattgacggtggcatctggatcaaagttggcggcaaacaagatcacgctgccgatatcataagtgccgatgatgtcatagatctcatcattgatcgtcgtgacggcggaaacgctcgtgccgtcccgcatcgtccagccgctgcggaaagagagcatcagcttctggccgatcttctcttccagtgtcatgtccgcgacgatctctcttgccttttcctcattggtctgcgcacgaacaccggacacgctcatgccggatacagccgtgacgctcatcaacaaagcaagcatcgcggaaatcattttcctcttcttcatgttaacctatcattcctttccttacttgtggatgccgtatctgcatgaaaacgcggctgatcaatgatgatacagctccttgacgatgatacgcccgcgccgttgtccatgcatagatgccattcgcataaggcagagagcggtccttgctcatttatatacatctggatatgttcgccttcgcacaccaccttccttcctattgccacgtttcatgtcatcctcattataccactcaggggtaagcgctttcaatcaggcagtctcaatttttcattcagctgaacatcatgaaaaagcagacagagaccgggatgatcatccgttgtcccgatctctgtccgttcaggatcgctcggcccatctccagccgcactttcctgcaccttgttcaaaatgatattttacgatgcccagatcgaccttcgtatagaaacccatgccgtccttgacgctgacctgatttcccttcagcgaaaagaaaaacttttgctggttcatggccgtaggggcaagcagcgctgcctcgacgccgtcacgataccatttcgggatctcgccatctgcttgtgccacctcatggaacgccttgaccggatgcggactgccagctgtttctccatagccaagcgcgatgacgacacacagcttttcgccgcgatcgagcgtgaacgctgtcttgatcttgcggtaagtcatcgccacccagcatgtattcaggccaagctgctgcgccagcagcacgagccgctcgccataatagccgcacagctcatccagatccgcgcctttctttccgatcatggcaatatagtttcgcacgccgctgaactttccataatgggccatgaagccgtcaaaggccttcggttcatcgacgatcagctggatgtgcagcccgctttcccggttgcaggcatcgatctctgcctgcaggcgtgcgcatgcgctttgcgccaacgcgctgtcctgatactgacgcacgctgtgccgcgcacgcatcgcttctgtgatattcattcgtctacctccatcgtctgtttcactcatcattggtgcgctccggcaatacagccatgacctgcttggcatgttccagcatctggatcagactgttcatcgcttccatgtccgcatcgaaataataatagtttttcgtcccttcacggcgcaccttcagcaatccggcctgtttcaagatctgaaggtgatgagaaacggccggacgggaaaggctcgtcttttccgtgatggcgccgacccggcagccctcacactgccccatctgcatcatcgacaggatgagatgctgacgtgtctcatcgcccagcgcctgcaggatatgccggcagcctgaaaattcctgtgccagcgcctgaatgtctgcttcaagttcacgcatcgcgtttcctcctctcattctcctatattgtaataccggttcttccctatggtgatgcggcggaattccacggccgccttcgggcactggtggatgcaggccatgcaatgcgtgcaccgttttccccattgcggacgtccctgcaccatctggatattgttcagcggacacacctgggcgcatttcccgcagccgacacaccgtgaggtcacatcaaatccgcttctgccgatgatgaaccgataaaagaacggattagcggccatgctcatgaaccgatcgagcaggccgacacgaacaggatcaagcggctggcaggcattgatccggcagacgagctttcgcagctggatcctggcgcgctggttcatctgccgggcatgcgccacatccggatcttccagaaacgccacatagctccccggcatataaaaggtatgccagcccatccattccatgccgatcgatcggaaaaaccgcgccgcatagctgcctgtgttcccgctggattcgcatgcgctcaccagcagatagatctgcctgctgcccttcagctccgtatggcacagatgctcttccacgatgcgcgggatgcgccaggcatatgtcgggcaaacgaggacataaggccgcgctgattccaagggatcatgctgatcaaggcggatgcgcgcattgaggctgcacgcttcatcctccagcaatgccgccgcatgttcggcgatgaagcggctgttgccagacgcgctgaaatacaggatcatccttttcctcctcaagcggatccgttcatccgcttaaaccattatacccgtttttccacaggcagcgcattggtaaagaaaatcgagatgaatgcgcgaagacacaaaaaaacgccccgcaaggagcgtctgcaggctgaagatggccttgttcagcgcaggatgatgtagatcagatcgcacacataagtgatgaccatcaggatgccgatggggcggtcaagcttatgatgccggcagatcagccagaagatgagcgtcacagccagaagaaacgctgtgtcataaagcgccgtgatctccacctggatcggatcgagcagcgccgatacgccgaggatgcacaggatattgaataggttcgacccgatgacattgcccatcgcgatctcgttctcgcctttgcgcgccgcaacgagcgaagtgaccagctccggcagcgaggtgccgacggccacgatggtcaggccgatcagcgtctcgctcagcccgaggatgcgcgcaagcgatgtggctccatccaccgtgatctgtccgccgatgacgatggccgcgatgccgatcaccagaaacagcagcagccttcccatcggacgggtctccggcgctttctcttccgtctgctttgcgcccttcagctgcatgaacagcactgcaccaaacatcgccagcaagatgagcgcctctccgcgcgagatgcgctgatccccaaacaggaagatgcccagcacgagtgcggcaagcgcagacagcggccagtcccgcttcagcaggatgc

SEQ ID NO: 2444 - DNA, 7939 bp, Unknown
  16S sequences of unknown bacteria
actgaagttttggttgttgacaagaacgttttagcttttcatcagtaaaaaattgcaaagcaatttttttaatgctataataataaagaataggatggcgtatcattttataaagattggtcatattgaaaaatattagtttccattatgagtttaaagcaatattatatatcaagaatatatcttttataatcgaaaagttataaatagaaattgagtgaatgttattaaggagcattgttgtatggaaaaccaaaatattttaaataccgtaaaacacatacattttattggcataggcggctctggtatgtgtcccattgcagaaattttataccatagaggctatcatattacaggttcagatatttctgaatccgaaacagttcaaaaaattcgctcctatcaaattccggttatcataggacaaaaagctgaaaatatcaatggtgcagatttaattgtatatacagctgcggtaaaaaaagataatcctgaattggttgctgctttggaaagcggaattcccacattggaacgctctgaaatgcttggtgtagtcacagcacattatcaggactccattgccgtttcaggaacacatggaaaaaccactacaaccggtatgcttacacaattatttatccaagcgggaaaagatccttctgctatcattggaggaaagctcccgtttatcggaagcaatggccgtgcaggcaaatctgatattatgatttgtgaagcttgcgagtatgtagatacttttttaaaattaagtcctgctatttccattattttaaatatagatgccgaccatctggaatactttggctctctcgaaaatatcatcaaatcctttcatcaatttgccaatcaaaccagcaaagtgctaattgtaaacggtgatgatgaaaatgtgaaaaaagcaatcaaagatatccaagacgtcaaaattattacattcggtctgggtgctgataatgactattcagctgccaatatcaaagaagaaccaaatgtatttgaagattttactttaatgaaacaaggtactccccctacagacattcgtctttctgttccaggaaaacataatatcatgaatgctcttgccgctgcagctaccgctgactactttgggatttccggaaacgatattgcgaaaggattacatgattttacaggtgtacacagaagatttgaacggctgggaacctttcacgatattgtcgttgctgatgattttgcgcatcatcccacagaattaaatgcaaccttaacagcagctatgcatatgggctttaaaaatgtatgggctatcttccagcctcatacgtattccagaactttcttattgctgaacgattttgcagaagctttgtctatccctgaccacgtgatattaaccgaaatattgcctgtcagagaaacaaatacttataatatttatgctgaagatttaggtgcaaaggttccgggaagtgtatgcttaaaaacctttgatgaaattagcgactatgtcatagaacgcgcccaaccgggagacttaatcattacattaggcggcggtgatatttatcgctgtgcaaacatgattgtagaaaaatataaaaaagctgagaacaaagtatttgcaggaactaccatgtaaataagaaacacgcagttaacctatttaactgcgtgttttttatttacacttctacttattagtgccaaatgttactttggattgaataaacattctatgtttcattttcatacacttcatataactttcaccatagtcaacggctggcattaagcacacttctatatcttagacaacaaatttgctaattctgcctactctcctgcgaaaacaaataaactgattcttatcgcatctgctaactcaatataacttttccacgttatacttaatacttgatacttgaaaaagtattgtcagaatgcaaacacatatagtgtaaaaagtaaaatatcaaattacaaaggtgaactttgtcaatagaaaataaaaagagctgggttagtccccagctctttttatttatctaatgtgaaacgctcagtaaaacaataaaattattttaccatgttagcaacttcatctgcgaagttgtcttcacgtttttcgatgccttcacctttttcaaaacgaacgaagcttttaattttaatatcgccgccaagctcttttgcggttgcatctgtatattgttgtacgctcatatcaccatcttttacatatggttggtcaagcaagcaaatttctttgaagaattttttcattcttccttctacaattttctcagcaacatttgcaggtttaccggaatctacaacttgttctgttagaattttcttttcatgctctactacatctgctggaacttctgcttcagaaacatagtttggaacaattgcagcaacttgcattgcaatattttttgcatattccacaaattcaggtttggaagcaatttcaggagttgtgtcaaaagtcaccataacacccatacgtccgccgccgtgaatataagttacaacagcaccttcactgcgtgcaaaacgacgaattttaatgttttcaccgatggttaagattttttcttgaagaatatcagcaattgtttcgtcagaaccggcagctttgcaagccaacaatgcatctacatcagcaggattttgctccataacagtttgtgcacagatttttacaaagttgttgaactcatcatttttcgcaacgaagtctgtttcagcgtttacttcaattacaacaccaacattacctgcttcattggtagctgcatatgcaacaccttcagcagcaatacggcctgctttttttgcagcagcagccaaacctttttctctcaaaaagtcaattgctgcatccatatcgccgtttgcttctgtaagtgctttcttacagtccatcataccgcaaccggttctttcacgtaattgtgcaacgtcttttgctgtaaaagccatttttcattcctccgatttttatataaatatagtattatagattgtcctaagccgtattcaaaaaatatccgtcgcaaaagacggatattttaaaatgcgaatcttattcagcagcttcttctgtttcttcagctgctgtttcatcagcagtttcttgagctgctgcacccatttgaccctctctgccttcaataatagcatttgccattgtagcagaaatcaatttaacagcacgaattgcatcgtcattaccaggaattacgtaatcaatttcgtctgggtcacagtttgtatcaacaatcgcaacaattggaatacccaattttttcgcttcagctacagcaattctttctttgcgtgggtctacaataaacaaagcgcccggaagttgcttcatctctttaatgccgcccaagaatttctctaatttttcaatttcaagacgaagtttgattacttctttctttggcaacaaatcaaatgtaccgtcttcttccatagctctcagttgctgtaaacggcttactctgcggcgaatggtgctgaagttagtcatcataccaccaagccatctggcatttacatagtaagcacctgcacgctctgcttcttcttttacagaatcttgagcttgttttttagtaccaacaaatagtacaggtttgccctcaacagaaatatcacggataaagctataagcttcttccaatttctttactgttttttgcaggtcgataatgtaaataccattacgttctgtgaaaatgtaacgagccattttagggttccatcttcttgtttggtgaccaaagtgtacaccggcctccaataattgtttcatagatactactgccattttaaaatcctccttggttgtatcctccgttacagcgatatacgaatttcacttaaaaatcaagcaccagcttcgtcatactgtaacgtgtgttatattgaaccgtattattatagcatggcaaatataaaattgcaagtatattttatacttttctgccattgattatccgccaaaaaactggctccataagctctgttttcttctttggggcgatgcgtatatggtatgattgaccaaaatggtttcatctccaatcacatcaatattttcccaaggaatcataatatcgtcagttctgccaagcagaccaaataatctggacctgccatatataataatggttgttaattttgcattttccgtgtcaatttccacatcgcctacaaatcccaatcgtgtaccgtcctgcagatttattacttctttatttctcatgtctgcaatactgcatttcataatagatacacccccgtgtgtaatgatatgcagatagaatgaaaaattgacctaaaaaattgtcataccgaaagtagcggttgatgttttcttaaaaatatggtagaattgtgcggtaatatgatagaaattgaaaagaacacaaatatttggaggcatattgatcatgatgaacatatggcatgacctctctccagagagagtaaaagaaacagattttgacgcggtaattgaaattacaaaaggcggaaaagcaaaatacgagctggataaagagaccggatttttaaagttggatcgcgtactttacacatctacccactatcctgcaagctatggctttattccacgcacatatgcagaagacggagacccattggatgttttggtactatgctctgagcatattgtaccgcttgctttggtacgctgctatccaatcggtgtcatccgtatggtagacggcggtgaaaaagacgaaaaaatcattgcaattccttttaacgacccaacttacaacacttataaagatattgatgaacttccaaaacatatttttgacgaaatgtcacacttcttctcagtatacaaagaattagaacacaaagtaactgcaattgaagaagtaagcggaagagatgctgccgttgaaattatttctaactgcattaaagcttacaatgaaaaatttggtaaataatctatattaaaataagctgtctgaatagacagcttattttatttttacaccaaccagctgtgcaatatccgcagcttgcaacgcatctatttggattcctttgatttcgttaaaattttccgacactgtaattcctgcaatgttacaagtggaaacatcaattcccttcaaggaagttttgaaaaaatccactttttccaaattggtatttacaacggaaaaacgtttgaacttactttccggcatgaatgcatttgacatgtttgcattctgaatactggcatcatcccataatgtttcagtaaaattggtacagaaataggagccgttttcaatggtgatattcataaaagagctttggctaaaatcagcgccgtctcctttgcagtcaatccattgcacatgtttgaaataaccttcggaaaaattacaatttgcaaattcacaatgattcagttgggtatgataaaaagatactctctcaaaattgcagttcataaatttgcagtttgttaaaactacagattcaaactcaatgttttcaattgcaatatctgcaagtatctcgttttcatattgtttatattctattgcttcatcatgttccaatgcaaattggatgtcttgttctaatgtcatatcatgtatcactctatatcatttctgtttttcataaaaggctgtgttcatttacacagcctttatttttttaacatattacaaaatgttttttcatgctttttcaataaaaattgaacacataatccagtaaaaaatccggttacaatactgctgactaacacaattggtgcataatacaaaacactgacagtgcccaacaccagcatggccacggccaactgtcctacaatatgggcaattgcggaaaaaatacctgccagccaaataaaatcttttgatatgagctttctgcatagcatcataacaagcaaacaacaaataccaccgctgatactgtacataaatgaaatggtttgccctgtaaaaatgctgcccaatacaattctcaaaatatgaattttggcagcttctttatatcccagtaaataaattgcaaataatgtgaccacattggcaaggccgagcttaatacccggtatcggagcaattggcggaagctgtgcttcaatgatgaaaatagtcagcgcattggtaatcaacatggatgacaaaatcattttttttacattcaagttctgccaccacgccttccttttcataatttactatatttatcgcgtcatgccgtccaatgtactgttcgcagtgtcctgagtttcaatctgaatgacaatgccgtttggcaaacaggtaatgggcaatacaccatcactgattctgccttgtgaaatacaaactttatcaggacagcttgcatctgtaatggaaatacatcccggttctaccaaaaccgtattataagccccattctccccttcaattttgaaagtgtaactttcctctactgcttccaaatcaatcgaacgaattaaggttccgttttgatagatatttgctactgcattacttactttcgtttgtgtaatgaaaatccaagctacaattaaagcggcaattactgcaacaacaactgttcctgcaatgatatatttcacattctttttcataatacaccctcaaatgtgtcgtctgtaattcctgatgttttcaccacagttccatcatctgtaataaaaatcgcttctacatcatctaaagattcaatataagcataggctttttccaatcccattacatatgtagcagtagataatgcgtctgccaacatcgaattttcagtaataatggttgtactaatcagaccgttatttgccgaatagccggttttcggatctaaaatatggtgatatctcacaccgtcttctataaaatagcgttcatagtttcccgaagtaacagcagttgcattggtaagatactctgtggatacagcacgagtggtatcattcgggtctgtgattccgattccccaaggctgtccgtcatatttagctcctatggtaataatattaccgcctaagttgataataccgcatgtaatgccgtattcttctaccagcatatttttaatttcatctgctgcaaagcctttggccgttgctccaaaatccagctggatatttggatttaaaaaacgtatggtacgcttttcctcatccaattgcacctgttcataccctttatccactaataacggagtaatctcttcttcatctggtaatttggcattacctgtgccgaaagcccataaatcattgatttttcctatggtgcaatctaaagcaccgtctgtctctttacagtattgcaaactgcgctgtgctacggtaaataaggcatcggaaacttccacttcatggtcatatgcagattgattgacctgatgcagctcgcttttctcattttgagaagatagaattttctccaaatctttcgccttttgaaatgcagcgtttaccccttcctgcgcttgttctccatacaatgtaatggtaaccacggtactcatgacaagttctgttcttgatgctgattgagattggagtgatttgctgcatcctgtcaataaaacgctgcatataactgcaagcataagaaaagcgccgatatacggaatacgttttgacatagccattacctcaatttaacctcatattttaaaagattctccatttttcgatacttaccttctgcttctatatacatagcaccgcattgagagcaagaataaatatcaaactctgtctctttttcttcaaaaggattataagttataatgtatagattggttggatataaaaaagagcctttggaacaacagccttctaaagataaaaactcattcttacggaataaatggagatgatacgggctgtctt

SEQ ID NO: 2445 - DNA, 12935 bp, Unknown
  16S sequences of unknown bacteria
gtaatcatccggcttttatttcagttgggacaaaagaacaaccgtctccacgtgctttgtcatagggaagttgtcaaacgctttaatcttcttaacctcataaccgttaccctgtatgtacataaggttatctgtaagactcttaggattacaggatatgtatactatctgtttcacaccataacccagtattttgtcaagagccttaggatgtattcccactcttggcggatccacaacaatcacatcaggcttttgctccagcttctcaagcacttcaaaaacatcacctgcaatgaagctgcagttgtcaagcccgttaagctttgcattctcctttgccgcttcgactgcctcggaaaccagctccactcctgtaactgtttttgctttgagcgccagcgcctgtgtgatggttcctgtgccacagtaaaggtcaaagacatttttgtcctcaaagtcatctataaggtctatggcttctgtataaaggcgctctgccgcctctacattggtctggaagaacgaaaatgcgctcaccttgaagtcaagccccattattttttccatatagtaatctctgccccacaggactttgagttcctcgcaatataccgcatcggcaagcctgtcattgacggtcctcaaaactccggcaactctgttgtcaagttcaagagctgtaatcatctctgtgaaacctttatcatcaaattctccctgcgatgaggtgactatattcacaagcagctctcctgtgcgtacaccataacggataataaggtgtcttaacagtccttcgtggctttttttgtgataaaagctgtagcctttttcctgacagaattcaagcacagcacttaaaattctgttaaaatcctcagggacaagctgacactcatctaccgtaacaatagacataaagtgcttttttctgtgcataccaaggcacagcggtccgtctttaacagtatccccaaaggtatattccattttgttgcggtatctgtactgcgccggacttccctgtatacccaaatattcaccgacctttatttcttttttagagatgagcatggaaacatcgtttcccttctcctcaagctgctgttcatatgacttgccctgatgaatgcagccgccgcataattctttatgtttacatatatccattaaaatcttccgtactttctgtagaattcttctttgtattcaaggaatctgtcctcttcaatagcctgtctgatgtttttcatcatatttacaaggaaatgcaggttgtgatttgataaaagcatcgccgacagcatttcgtctgccttaaacaggtgtcttaaatatgctctcgaatagttcctgcatgtatagcagtcacactcgggatccagcggtgtgaaatctctttcaaatctggcattcttgatattcagcctgccatggcttgtcatagccataccgtgtcttgctattcttgtaggaagcacgcagtcaaacatatcaaccccctgctctactccctcaaagagataatccggcgtaccaacacccataatatatctcggcttgttgtcaggcagatagtccacacagccgcccagtatttcaagaaacagctcttttggctctcccacgcttaatcctccgattgcgtatcccggcagatccagatccacaatagccttggcactctgtttcctgaggtcgtgatacataccgccctgcattattccaaacagagactgcttctctgtattcttgtgatatgccttgcatctttcaagccacctgtgagttctctccatagacggcactatatattctctttctgcaggatacggcgcacactcatcaaatgccatcataatatccgagcccaaagcgttctgtatttccattgatttttccggggaaatcatatgctttgatccgtctatatgggatctgaattcagtgccctcctcggttatcttgcggagaggtccgaggctgaacacctgaaatccgccactgtctgtaagtatggctctgtcccagttcataaatttgtgaagtccgcctgcctctttgacaatttcgtgtcccggtctgagatatagatgataggtatttgagagtattatctctgctcccatttcctttacctgctcaggtctcatggccttgactgtagcctgcgtgcctacaggcataaaaacaggagtctgtatatctccgtgaggcgtatgaactatacctcgtcttgcttttgttctcttgtcttttttaagtaattcataagtaactgcgtccttactcattgtgtttcctttctatataatcagcattgcatctccataagagaagaatctgtatttttccttaactgcgatatcatatactctcagtatatcctctctgctgtaaagagctgatataagcatcagcagcgtggacttaggcagatgaaaattggttataaggctgtctataatcttgaatttatagcccggatatatgaatatacccgttgagtctgattttgcaggcacaataaacctgccaagctcatcatcaaataccgctgcactttcaactgttctggtcgaagtggtgcctaccgatataatcctgccgcctgccttaatcaccgaatttataatctccgcattctcctcatctatggaatactcctcaaaatgcatctggtgatcctctatattgtcacacttgacaggtctgaaagttcctataccgacatgcagggtaacatatgcaattttaacgcccatctctttggctttagcaagaagctcctctgtaaaatgaagtcctgccgtaggcgctgccaccgagccgttttctttagaataaacagtctgataacgctccttatcctcaagcacactttctctctctatgtatggaggaagcggcattttaccaagctcctcaagtatctcaaggaatattcccttgtacgaaaactccactattcgggtaccgtcatcaccataatcgagaacctctgctttaagcggtgcagcttcctcaatttcctgcattacaggagacttcacattgccgcccttgtggtcacactctgaaatatatctgtctgcatctgttccaaagagtatgacatcacccttttttatctttttgcctggtctgaccatggtttcccaccggtcgccgtctttgcgcttgataagcagaaactcaacccttgcgccggttgaggccttaactccgaaaatcctcgccggtatcactctggaattgttgagtaccaggcagtcgcctgctttgagatattcgaggatatcataaaaatgtctgtgctcaacactgcctgtgcttctgtccaccaccatcagtcttgaatggtctcttttgtccgccggaaactgcgctatgagttcttccggcaggttataatcaaaatcattaatatgcataaatctgtccttttaatttaaaacttacagtttatcagtttagcatatcccgggcaaaaatacaagaacggggcggaataaccgccccgctgtcagcttatttaaaggaagctttaactttagcctccgcctcctgcattatcgcctctacgtcattaccatatatatcaagattctctgcactgaaaaactgaatgtctttaatgccaaacagtccccacgcaagagttctgacataatcatatcccatattgaactcgcctatgctgccgcctgatgttgtaacatatatcagttttctgacgctgcaaagccctgcaggcactccctgttcatcatatttaaatgtaattccgcagactgaaactgcttcaagataagccttgagaactgcagggaaagacagatcccagtaaggcgccgctattactactgtatcactttcggcaaactgatgcgcatatttaaacatctcattgctgaaatcgcccttgtctgaaagctctaccctgtacataaggctttgtctgtcaagaggctttatatctgcctcagaaatatcaagctgtgtaatatcgccgtcaagacactcaagaacagcgcctgcaagcctgtaagtacgtgactcttcacgaacgcatgaattaacaaacagtatcttttccatattaatgctcccatctgatatgataatacaagtatatcagttttgcatacgctgttcaacaatatttatttcatttaaacagcctgctaattgtcttatctatctcttctatgttgagatttatggcaagtatcaggcttcaaaacaacctctttatatttatccaaagtattttttctccagttcttcaaatgcagcattggcctctaaagcttctgcgccgcctgctgcttcctgttctgactcataaattgcttcgtctgtcagtgtctgtttcttattgacaagttcagaaatctcacctgtatctctcagtgcttttatcagcattatactcagcccctttcttcagcataattgtaacataatgtgtatgccttcaaatattatccgtgcaaattgctatacaaagctgaatttttgagttctcttttatcatactaatgtttatttcaaatatatcgcatcgtttctggaaagaagatacacgcaatactggttcatactgatgccctctcttcgtgaatgctctgccagtgtcctgtgcagactgcgcggtatcctaagcttgaactgccccgaatagtccttaagactatccggctcataaatctctattccgctgtctatcgctgcctcaagccactgccttttggcatctaatgcattagccgcagcgctctccgctttttctccgcaggtaatgcatcccggcaaatccgggtatgaagccacaaagccgccttcgtctttatcttctataatttccatacgatacggcattgccatatattcatcaagcgttttcatcgttttctgcctcgctttctataatatgcctgaccagctctacataaacccttttaataggttcatctttaggtactgtaacaggagtgcagccgttttttctaaaagtaaaatgactgccgcctcttcccggagctttcatttcatatccatagcattctaaaactttacgcagttcattaaacctgatatctttcgataagttacatatacgctttataagtttatcccattttgacatttttacagctcctgttcatattatatgtgataccatatacgatgtcaacgctttgttattctctacttcaccccgtacatattcacttcacgcttgagctcaattatcttgttgagtatatcatcagtaccgtaattattctcctgcaggaaagctgtaagccggtccagatactctacactgtttccaaagtaacagtttttcagccctgtcacaaactctgtaaggttgcttccgaagctgccatcctcttttatcggtatataggcaagctttacctcctgtgtttcactgcagtaaaacacagtatcacaggtaagctccaccctgccgtaatcaagataatagctgccgctttttacaagctccctgattactctctcaacaagattaagaagctgtattatctccctgaacctgcactggcttatttttaaaaacccgtcatagctgtatatagccgtaagcctgtctgtttcccgtataaatgaagttggtataaatgagctgcatatctgatcggaaagtatgctcatttcaaactcctttaattcgttattgaaatactctttttcaaagctgtatgtaccgttttccattgctattgccctccgcatttaagacatctgctgtagccgtctgcttcagcctcatatattgtcatttctataacatatctgtcaactgtactgcattccgcactgtgatatgcctttcctgtctttttgaagcagtacactatatggccgttgccatgctcatcgggcctgcacaatttacagggtgtatagtgccttctgacctcatctgtaagtattgtctgtacaggatacactctgatatatgaacagttttcattgtgatatcgctctcccgccacaggaaatacccatactgtagttccgtcatctgcagcctgcatcatatcaaagctgaagatctgccctttattatccctgccaacaaagcctctgaataaaacccctgtttttctgtgaaaatctccccgcatttttacaggcattctgtttttaaccgtatacgccgcatcaatggatataaggccggtattattaaaatcactgtaaagatagcccagtctttttactgcaaagctttctgctgctttgtcggcttttactcttttttcaattcttggttttacccccagccccgtcttttcgatatatgcatatgccgccacatgtcttgcttcatctgcaacgccgtttattacacattcttctgcttctatcagctttatagtataacttatcgtcagaacagctattatgaacatcggcagtattatggccgcttcaactgtaatcgagccttttttagtacttttcatcatatttcatctttctgccgtttacctgcgcttcaaatttaaatcctcgataacagtcttttatataaaaatcctcactgtaggttccctgcagatttatctgtatcagatccatcattcttgtcagcctgacttcttttttcagcgctgtaaggagtattttgagatagccttcataatcatagcctctctcctcaaattctccttttcctgctgtgactttaccgtttatgtctgttttccagctggacggatccttgaatacaggtactttgcctccttcgtcgagggttttaatatcaagttctgcttccatagccgcccacgcagcaatcagcgccgcctgcgttataaccgcctcaggccccggagttatggtttctgccagaagaagcgcttccttcatcatcttggggcttgaatatatgtatatcgaattaagcagcgttctcagtttcagcagatccgccctgactgcgctcctgtttgctgcatcactttttttgccttcaattatatattctatttcatttctgaaaaagctgttttcttcatcagcaggcgacataccgcttttaaaaacgctgaatatgtatacggtagtcagatactctctgcttccgtttttccaaagctgtgaaatacctgtcagattctttatattggagacaagcgcatataccgacggtgtatctgtcataccctttgacggcagagcattaattgtcctgctgtttcttaaagttctgtcccctgtttgaacaggtccgctgtttttttctgtgccgatgagatttttacagtttacactctctgttatctgctcctcaaatatctcacagtccataagacagtaatccttcatatcaacggaaaccgctcccagcctgatatacctgtcatcagtaaccgtatatttcacatattttttaagttcattcactatactgctgttatccctgctgaaagctattatgccgtatcttgatttaagctccagatcaaattccgacagcacagacctgcctgcaaggttaaacagattcccgcaatagcttacagatgcagcagaagccgccagctgaataaatacaattacacaacttagcacagctcctgcaattattgtgagaaatactgcagtaaccccctttttattattccggtaatacatagtctgcctttcttattatatcttcctcaattactatatgattatgtcctgtttccttcattgcagcgtgccttttaagaagccctccgtaatatccggctttatgactgcttcccgtcactttctttttatctgagtccagcttcagtccttcagatgccgcaggtgatatctcaaatgtttcactcctgtagcctgcctctatacagatgccgagatgaagcctgcttttgagctctgcgttttcataaaggtttatcagtatatagaaaagtgacattacggcaagtatcacaagtggcattatcaccgccgcctccacaaaggtgctgcctctcctgcttttaaacatcgtcgttaaaaccgctgtcgttgagcttttcaaaggtttcatttacaaagtcaacaatctgatccttgaaaacaatacccagcgctatcgctatggctataaggattgcaacctgcacaatctccataccctttttactgtttctgattattttcatttctgcctcctacatttccagcattgccggtgctattgttatgattataagaatgactaaaagtattaccagcgggaatgtcattttggtttccgcaagtcttccaagctcctcggctttcttttttcttgaaaaccacagatatgcgctttcactctcaagactttctgtcagagccgttcccttacagatattatcgcttataactgcggcaactctgatgaactctcttatgcctgagtttcttgcaaaatccgaaagctgagtttcaacgggaatatttgtttccttggaattaatatatatttcattaagcctttcgtaaaaatagttcccgctctccccgtttttctgatgttcggttactattctctcaaaagcatctgtaagcacaagtcctccgttcagaagaagtatgttcttgtttataaacgagggcagttcaagaagaattgatgtctgcgcagtcttttcttccttttcgaccgtttcaaatctgcttctgtatatggcaataaaaaccgcggctacggccgccataacgacaagccatgtgtaatctctggtatacatccatttcacaggtctgccgtcatcggtatattcaggcagcagaatttcattttttgcagggttttcggataccgtatcagcaagcgccctgtagtccacgggggttttgttctccgttttttcagctgccgcaggtttctttccctctgcctctgctgtctcctcacttttaggctcgatatgcactataacgctctgcggctcttcctcgccttttacctttaccttgaactcataatcaaagactttatcctcgctccttataactgcttttgccctgccgtcctcggcaactatattcgaggcctcctcataattctgcgatattactcccaggagtgctgcaatccctgccgccgcaataatcacatatctttgcattactgccttttttctcagtattacggtttcttcaaggttgcccttttcatacagtctgctgtatcttgaaagaaactcttctcttttgcccgtaataatgtctgttattctttttatacgctctttcatttctacacctttatatccgttatctttcctgtcagattgtatgcgaacattatccctgcgagagataccgtcataataatgcggcctgcaagtgtttcatacagcggatctatatatcccgatgatgtgatattaagtcccgccagtatcacaaggggcattgccgttattatctttgcctccacctgtttctgcgatatgattgcctttatttctttttcgatggatattttgtctgtaagtatgtccgctgtctttgatatgaccttttccatatctcctccggtttcccttatagaaagatacacatctacaaagctttcgatatcctgacagccgcttcttgccgcaaaatcagacataagctccgcctcgctgcctctgttttcaaaaatgccctttgttatgctctcaagctctgttacaagaggcgtatgctcatcatatatgagcttaagaccgtcaagtccctcctttaatccctctgccatactcttgcctgtggataccgaagccgaaaggctgtaaagcaggtctttaaactgcatgagcagataacctctgcgtttttcagccttataactgcggtatttttttattagagaaataatgagcaatcctgcaatagcagaaattaacagactcttgtaaaatatatatcctatgataaaaaaacatatatatccgactgtaataaactttgctttttcacttaatgaaagctcataggttctgtaatcagtatccatactctatccctctcattttaaatttaaaagtgttctgtattctgtttcccgtagatacaagtccgtttttaatatcatattcaaacagtctgttgagccttatttcattctccgaaattcccgtaagctccgcaatttcaagcactttcctgctgttgtcaggcattctgccaaggtgaacaattaaatctattccctctgctatctgcgcccttatggcgcttacggggaaatcagccgcctgcagatacatcgactccagccttttaatcattccgtaaatggaattgccgtggcccgtactgagactcccgtcgtgccctgtattacaggcatttatcatatcagcaacctcgctgcctctgacctctccgactataattcttgagggcctcatacgcagactcgtcttgataaggtcggtcatggtaacctcacctctgccctgtatgttggagttcctgcattcaagcctgactaaattgctgtggtttttaatctgaagctcggcagagtcctctattacaaccagtctttcatcaggcggaatatagtctgcaaggcagtttaaaaatgttgtcttcccagaagatgtacccccgcttataaatatattgagccccgcttcaacgcaggcctttagaaaatccgcagctttcctgccaagagtaccgtttgccacaagcctttccatagtaagcgcctctttgggaaattttcttatggtaagcaccggaccgtttaaggctatgtttttgtatactccgttgaccctgctgccgtcgtcaagtctggcatcaagtattggattaagctcattaaactccctgtggacctttgcggcaattctccttatcagctcctccaaagcctctgcgctgtaaaagctgtcacctgtttcctctatcccggtggatttctccacaaagattttatctttgccgtttaccataatctctttaatgtcatcatcttcgatatacggctggagtatgctcagatcctttcgcagattatagaatatgctgtttattatgtgcagcgtttcttcatagcccctgaaagcaagctcctgcctggtgaaaacatatttctctataatctccataacctcatcatcatctacactggctttatttctgcttatatgttttcttatgatatctgttatctcatatatctcatttaccatatttctttttttatccattattaccagttccttttatcctcttttgtttacataataaaacagctgccgtcaattagcaactgttttatttttagttttattcattttttacattttttctcaaagatttcgtccctgtatcaagcagtttcaacaaacctttcaggaaaaaagttttttaaaagacaagccgaaaatacaatcccggcttgtcttatattaatttctatttacctgtagttttggcaactttttttgaccatccgctggttataattcccttatcagtcttggtgtatgtacgaatctgcacatagtaagtcttcttagccttcagcctggaaataacaaccgacttcttatttgctgcaacttttactgtttttgatcccttcatattctttttaagagaatatcttacttcatagcctgtagttcctgccttctgagctttaattcctacaaccagttttttggacttggcagtaatctttgaaattgaagttccctttggaacaatcttaaattccgtagttatcgcttcagttcctttgtaatcacctgagaaataaataaccagtgttgcaattcccacttccttattgtatgcgcttgcagaagtatagtcgagtcccttgcgaagtgtcttgccgtctgcatctactattgtaacctcaggttcaatacgcttccctgtatatgtaaatgttttagggaatgtaatcgtaaatgaggaaggatccttagcttctcctttgccctttacttctatttcaaaagaagttgaatattttttgtactttacagtaaccgtctgtttgcctgccttgttcatgtcatagcctgagaaaacaggttctgcagaatccgtatcctttaccagctgcctcttggtctcagaaaccttgtagtacagtctgcctgttgtcttaaacttatcaccgactttgtattcttttactgaaggttcaaaagtaatccctaaaggatcgatgattgtaatgttaaatgtagtctttagtcccttgtattcaactgttaccttttgtaagccggtttcctcaggaactgtaagctttacatcgctaaggtcagtgatttcagttttttctttgtctttgtatccgtaaagcttgtattcaggcacgattttgtcgccctttacgtatgtatagccaagaactgcagcagcagtaatcttgtcatattcggcgtcgcttccaacgcttatgtcaaatgtggttgtaaatttctgatattttactgttacggtctgctttcctgttttgtttacatcatagcctgaaagcttaacctgtgataaatctgtaatttcgacttgttttccgtcttttgttacagcataaagcttgtacttcggcgtaaagttttcgcctgctttgtattttactgtactatcaggtactgctttgatacctgtgtacttggcgccaactgtaaccttaacctgagtggatacaccgctgtatgttacagtgatggtttgttcgccttctttctggctgtcatagccttcaaaagtagcgcctgaattataggcaagaggccatgtttcgccaaaatctcctactccctgtatagtataagtctttgaaagttcttcaccaagttcataacttgtcttgaagtttgtcactttgatttttttaagcgctgccggtttataggcaactcctgtcgcatgatgagttgctccaa

SEQ ID NO: 2446 - DNA, 12753 bp, Unknown
  16S sequences of unknown bacteria
aggtatgctcacctctttcactacggagtttcagtccatgctctccacgctcgacgaggacgaatgcgccatagaacgcgaagtctcgctggcaacgggagaagcggcatacggcatgatgcgttctctgatagatgagcttgaagcgcagtgcccgaagctgaaatgccacctatacaaaatcaaaaacaatttcttcggcggtcaggtcacggtaacaggacttctcacaggcgcagacctcgcggagcagctcacgggaaagcccctcggagacacgctgtacctcgcaagaaccacgctcagagccgagggagaacttttcctttgcggaatgtcgcctgcacagctcagtgaaaagctcggcggcgtgaatatagaatttatcgaaaacgacggagcagcgcttgtggaaaacctgctcaggctgtaataaagccaaacggaaaggagacaatatgtctaaacctatagtagcgatagtgggacgcccgaatgtcggaaagtccacgctttttaataaacttatcggagaacgccgcgccatagtcgaagatactcccggaatcacgagggacagaatctacggcgagacggaatggagaggaaaaattctcgctgtaattgatacgggcggtatagagccgaagacggacgacctcatcctgaaaaaaatgcgcgagcaggctcagatagcgatagatacggctgacgttattattttcatgtgcgatatcagaacgggacttctcgccgacgaccttgacatcgcggtaatgctgaagaagagcggcaagcccgtcattcccgtaatcaacaaagccgacagaataggcgacgttcccccggaattctatgagttctatgagcttggctttgacattgaccccatcgccatctcatcccttcacggaagcggaagcggtgacgtacttgacgcagtaatagacgcgctccccgaattcgagcaggaggaagaggacgacgacaccatctccgttgcggttataggaaagccgaacgcgggcaagtcatcccttgtaaaccgtgtgctcggagacgagagatgcattgtttccgatattcccggcacgacaagagacgctatcgacacgtattttgaaaattccttcggcaaatataacttcatcgacaccgcaggaatccgccgccagtcaaaggttgacgacaaaatcgagaagataagcgtgcttcgtgcaaagatggctgtcgacagagcggacgtgtgccttatcatgatagacgcgaacaccggaatcaccgagcaggacgaaaaaattgccggaatcgctcatgaagccggaaaagcgtccataatctgcgtaaacaagtgggatttgatagacaaagacaactccacgacaaacgaattcaacaaaaagatatccgaatccctgtcgtatatgtcgtacgcgcccattatgtacatctccgcaaagacaggacagagagtggacaagctgtttgagatgataaactacgtccacaaccagacgaatatgcgcgtgtccaccggtatgctcaacgacgttctggcagacgcagtggcaagagttcagccgccgtcagacaagggcagaagactgagaatttactatatgacgcagactcaggtagcgccgccgacgttcgttatcttctgcaatatggctgagctgttccatttctcataccagagatatatcgaaaactgccttagacagaccttcggctttaagggaactccgataaagctgataatccgccaaaagggcgagaatgaggagaacctgtaatgctgcatttctttcttagatatgaaaccggtatgctcggacttatcggcgcaaacttccacgatattccgcttccggtcagcctgcttctgatgctcgtgtatatcttcatcccgtatcttctcggaagcgtcaacaccgcgataatcgtctcaggcgcaatgtaccatgacgacgtaagaaatcacggaagcggaaacgcgggattcaccaacatgatgcgcaactacggtaaaaaagccgcaataatcacgttcgtcggagatattttaaagacagttctcgccgtgctcatcggatggtgcgtgttcggctaccttaccgcgtatattgcgggacttgcgtgccttatcggtcatgtgttccccgtgttctacaattttcgcggcggcaagggagtagtatgtctcgcgactatcctgcttatgcttgactggagactgttcctcatcctgcttgcgatatttataatcctcgttctcggaacaaagtatatctcagccggaagcgtcatatgcgccatgctgttcccgctcattttaaaccgtatgaacgacactccgtttaaaatgatagagataatcgcgctcgccatagccgtgataatcgtagtaaagcacagagaaaacataaagagaatattcaacggaaccgagagcaagtttgccttcaaaaagagcaagtctgccgacggtgacaaaaaataacgatgaataatgaaaaaataaccgaattcgcgagccttgtcaaaaaaagcgcggacttcggttcactgaaaagcgtaacgttccattctcccgaaaaaggagagcggctcaaggcaaagggaaagctcataaccgtgggcggaaaaaccgttttgcagaccgaaacctcccttaccgagggcagagtttcgcaggaaaatgtaaagacggatgatatagaaaagtacacggaaaaaatgctcgagagcttcaaaaaagccgaccttgccgacgcaaacggaaacgcctccgttatgatatcgaaaaaaggcgcggtaactctcctgaaaaaaggcaaaatcggagagggcgagaaagctttcaaagccgaggagaacaacagggtaaagaaccgccttctcacgggagaggaaaaatttctgcgggagcttgacgtgtcggacgaaaacggaagggtacacgacaaaaagcagtcgaaattcagacagatatgccgctttgccgagtacatagtcgacgcggagaaaaagctgaacaaggacggcgagctgtacgtctgtgacctgtgctgcggaaagagctatctcagctttgcggcgtaccatgttctcaccgaagtctgcggaagagaagtcgtgatggactgcgtggatctgaaaaagagcgtgatggactactgcgcggatatcgccgaaaaatgcggtatgagcggaatgcacttctacgcgatgaacatttccgactttggtgccagacgcgcgcccgacctcgttatatccctccatgcctgcgatatcgctacggatattgtccttgagtttgcggtgaagaacaaggctgaggcgattctctcaaccccgtgctgccaccatcaaatgaacaacgagatggactgcccgccgcttgactttatcgcgagatattcaatgctgaagcagaagctcgccgcagcagcaacggacgcactgagacttcttatgctcgagtccgaaggctacaaaacggacgcgaccgagcttatcgaccccgaagacacaccgaaaaacataatgcttcgcggattcagaagaaaaagcttcgacccctgctccgacaaagcgcgggagaagagagaagaataccgcagagcgtacgcatatatgtacggaaaagaacccgagaaccattaatattaatatctttaataaatagaggcggaaaataatggaaacaaacgaacttatctcgcgaatttcgagagccgacataagcgcggacgaacgtcttgaagctctcggcgagatcatgaaaaaggtacgcagcggagaaatagagactccggagcgcgggatttttgtgaacaaccacatccacacttcctactccttctcgccgtacaccccgacctccgctctgttcaacgcatggagagccggactgagaaccgcgggtatcatggatcacgacagcgtaggcggaatgcgtgagttcatacgcgccggagaaatcatcggtatgccgatcacctgcggattcgaatgcagagtgaacgtcgacacaacaccgctcgtcggcaaaaaaatcaacaaccccgaccagtgctcctgcgcatatcttgcaatgcacggaatcccgcatcagagcatagacaaggctgaagctgtgctgtcagggcttagagagaagcgcaatgtacgcaaccgcaaaatgtgcgagaagattaccgctctcaccgaggaatacggaataaccctcgacttcgataaggatgtttatcctcattcaaaagcggacgagggcggaagcgtcacggaaagacacatctgctacggtcttacaaagaagataaccgcaaaatatcccgacagagaagcggcgtgcgacttcattgacaagctctgcggcaagaagatggcggagaagacgagacagaagctcatctcggctcccgaaaacttctacgaatacgatatcctcggcgtgctgaagagcagtcttgtcgagaagttctacgttcccgcaacggacgaatgcatgaacatacgacagttcaccgcatttgcaaaggagcttggcgcaatatcggcatacgcttatctcggcgacgtcggagaatcccccacgggcgacaaaaaggctcagaagtttgaggacgactacctcccgctcctgttcgatacattaaaggactgcggattcaatgccgtcacatatatgccctcgagaaacacacccgagcagcttgaccgcgtaatgaagctgtgcgaggaaaacggattcttccaaatttcgggtgaagacataaactctccccgccagtcgttcatctgcgaagccctgacaaaatatccgcatctcatgaccgcgacatatgcgcttataggtcacgaaatggcggctacggaggatataacaaaagctatgttctccgacagcacaaaggaaaaataccccgacctcaacgaaagaatgcacgcctatgcagctcacgccgaaaacggagcggaaatatgaaaggtatgacagatatgcttgaaacacttgtaaaattttcaaataagtacggcagagagcacgaatacgttcttgccggcggcggaaatacctcatgcaaaaccgaagacacactttacataaaaggaagcggaacatctctcgcgaaaatcacggctgacggatttgtcaagatggatcgcgtcgcactcgagaagatatggacaaaggcttattccgataatcaggctgaaagagaagcggaagtgctgtccgatatgatggcggcaaagctccccggagaagaagcaaaacgcccgtccgttgaaacactgctccacgacctgttcccgcagaagtacgtgctccacgttcatccctgcgcagtcaacgccctcacctgctcacagaacggcaaggctgacatggaaaagctgttcccgaacgcagtatgggtaaacgagtgcgagcccggctacatccttgcgaaaaactgccgcgaaaagctccttgaatataagaagaacactggacgcgacgccgacgtagtattcctccagaaccacggaattttctttgcagctgacacggaagaagagcttgacaaaatcgtagccgacgttatgacaaaaatcaaggcaaaaaccggcgaatatcccgactttactcccgtagacgagccggagaggaacaccgcagccgcagcagtcgctccaatgataagaatggcgtatgacggagagggaaaggcattcgtgaagtttgccgcagataaaaccgtgctttcgttcgccgaatcaaaggaagcattcgagacactgcgcgagccgctttcccccgaccacatcgtatactgcaaggctgaacctctattcatcgaggaagcgacggctgacagcataaaatccgctttcgcagagcttgaaagccgcagaggattcaaaccgaaggtagttttcgtgaagaacctcggtatgttcacagtcggaaagacgctcaaggaagccgagacagcacttgacgtatggcgcgacgctatgactataacagttctgtcaaaggcgttcggcggagtgcgtcatatggctcccgctatggtggacttcatcgtgaactgggaggttgaaagctacagagcaaaggtcagcctcgcgtccggtgcggagaagaagctgaacggcaagatagcgatagtcacgggaagcgcacagggattcggtgcaggcatagcggaatatctcgcgtccgagggtgccgctgtcgttattgctgacatgaactacgacggtgcgcgcgctacagccgaaagaattgcagaagaatacaaaactcccgctctcgcagtgtccgcaaatgtttccgacgaggacagcgtgagagagatgatagagagaaccgttctcaccttcggcggacttgacgttttcgtaaacaacgcaggtatcgtccgcgcaggctctcttgaagacatgacaaagaagaactttgagcttgtcgcatccgtaaactacaccgcgtacttcctctgcgcaaaatattcatccgccgttatgaagaagcagagagagatttctcccgaatatatggctgatataatcgagataaactccaagtccggtctgtcaggctccaacaagaactttgcatatgccggaagcaaattcggaggtataggacttacccagtcgtttgccctcgagcttgcgccctacggaatcaaggtaaacgctgtctgccccggcaacttcctcgacggtccgctgtggtctgatcccgaaaaaggactgttcgtgcagtatctcaaagccggaaaggttcccggagctaagacagtcgccgacgtccgcgcgttctatgaagctaaggttccgctcggaagaggatgcagaatagaggacgtagcgaaggctgtgctgtacataatcgaccagaaatacgagacaggtcaggctgttcctgtaaccggcggtcaggaaatgctgaaataaggaactgtataaataatcctttggtaatagtgcatataaaacaggacggcaatatcggcactatgcatgttgacatacgctcataaataatgtataattaattatgtaaaaagtattaatgatttggataaaatcttaatcaaataacgtatgtattatgaaagggaggcatggtcgtgcggagaggcgttctctcacatattcgcacggctgacactatgagaggaagaagaaaaaccgttaaaatatccgaagctgagtggagcataatgaaggttctctgggatggctgcgaaaagaacgaacgcggcatgaccctcggagaaatcgttcaggagcttaccgaaactacgggatggagcaacactaccattcgtactcttgtgataagactgtccgaaaagggtgcggtcgacattgacaagactaccggcgtttacaaatatactcccaaaacctcaaagagcgactgcgtaaagtgcgaggtcgactcgtttgttgagagagtgtttgacaactccgcgtacaaccttatggcgtcacttcttcgcgaaggcaagctcagcgcaaaggaaaagaaagatattattaatattctaaacgatatcgaaggctgaacatcgccccggagttacccatgacagaatttttgattctgcttttaatgcaggttacggtgttttcatcggttaccgcattaatcattatcgcaataaaacaaatattcaagtgcagaattccgcccggaatcggtatggttatgtgggtggttcttctcgcacgccttatctgcccaatattcccggaaagcaggatatctgtctacaatctgataccggcgggacgggagataatgtattcgctgacgaacgatatcggagacgagcttgcaagttacgaggaagagaagaccctggaggaaaacccatacgtcattatcacgaccgaagaagcggagcggacgcttgaagagagcaagagcaaaaatgaacagaacgacgctcccgtgacaatcggcgagtacatcatcaacgacatcggagacgaagccgtaagcagcgcgaaaaggttgaactcgcttattcttgcagtgtatgccgccggaacagtgctgtgcatgacgttcaataccgttatttacatctgtgtaaagaaaagagtgctcaaaaattcggagctttgcatagatgagaaaatgacccaaacctacttccttaccgccgaaaagcttggaataagcaagaaaaagctcccgtcgctcagatacggaagcagcgcaatgcttgtcggatgccttaatcccgtggtagtctgccgcgaggatatggacgaaaaggaagcgtcgtttgtctttgcgcatgagcttagccactataagcatagcgacaactttgtcataatcttctcggcatacgtcgcgtgtatgttctggtacaatccgctcatctggatagtcaaaaagatactccgcgacgacgttgaggtgctttgcgattcacgaacaatcgattgcttcggtatgtcatccgctgaatacgcgaagatgatatgccgtcactccctgtacgacgaagccgctgcagttggatgccatatgtccgcaacgggacgcagccttaaaacgagacttcgcagcatttcccacagcaagaacaacaagttcatctcaagaggtgcgtcgttcgttctgtgcgctgccattattgccgtctgcctgacgaatcccattatttcgcagaacagtgaatatgaggcttatataaagaatttttcagcggacgcgggagtcagcgaaagagttttgcagttgtcgggcaaaataaccgtgtcaagctacatcggcaatattgcaactctggtggagcaaaaactctctcccgagcttagacaaacgatgggcaacggcagccttgaaaaattcaagagaacagtgaacgagagcgatattccgtccgctgtaaaagccgaagtccgcggattcagaagcgacgagatactttcggtgagagcctgcgccgtgataaactactgtgtgacgaacctcctctcgggcggagaaacaaatgataacagtcttactattatgccggagtatatttctgtggacgacatgaaaaccgtgctgtccgagcttaccgcagcagaagccgacgcgctcatgaagtggtacaacaagggcgtagccggagcaaacgtgtccttcgagagattttacacctctgctatgatggagcttatcctgaagcgaataaacgacgactggtcaaggaagaaattctccgacttctataccgaaattgactccgcgctgttcaccgagaggtactacagtgaggaaatcgtcaatatcggcaagctcatcaagaacaaaagctcgttctacctgcttgacccggacattacgcctgtagaggaaactgcactgcggaacattctcggtgcggcacaagcgggggaaagagacgacgtgtattatctcaaagaccgcgaggacggctgtactaccgaaatagctcagcttttgttcagaagaagcggatataccgccgacaaaatactcaaaggctacgcggagataggcgagacaacatattcgagcataacaaaggaatcatgcgcagtcctcagccgtgcggagcttaacgcaatatcaaagcggcttgaaggaacgggatacaatttcgcggattactttgagcagctcaccgatgaggacggcggcaatatcggatatttcgttcttgtgaatgaggacggaatcgaggacgcgcttgcactgttgaaccgtctgaccttcacagaggtacgcgacgataatgtatctatcggacttccgatgggagagataagaagtgcagttgaagaagtgtaccgcgagggcttgattgacgacgagggcggatttattgaccctcttcagccggtaccgttcggtcagagcatagcatacgccgtaaatctttactaacaaaaaacgtcttttggcttaaaatcagtcagaaggcgttttctttattcagtttattcagagtttatccttagttcaaattcttgtggcgtatggcttcgtcgagcagcttcacatacttttgtgcgtcgtcgctaagtcctatgtcaacacggtttatcacaacaatggagtaaatgtcggaggaattcattttcaccgagataacaccgccgccgttgttcagctccgaggacatgattcccgtgccgattgtgtagctgtttgtgctgagcagcaggttcatcagcgtcgcgcggtcgtttatgcgaatctggcggcttgcacggttattttcggtaagctcctccgagaattccaccggacctgtctctccctggtcgtaggtgatgtagggataatcgtgcagatcgtccgcgctgagctgttcgcttttagcaaggggatgattttttccgaggaatacatacggagtagtctcaagaagctcgtgaaattccagtccgctgcggcgaagatatctctccatgtagaccccgcccgacgccttgagatacgcgagaataccgatgtcggagcgcatattcacaacgtccccgataacctccgctgttttcgcttccttcagtgagaggttgtagtccccgctgaatctgctcatgaattttacgaaagcttcagccgcgaagtcgtagtgctgtgatgtgacggcaaagttgcggacgctcttcttgtttccgttgtcgtagcggtcgattattacctcgtactgtgagattagctggcgtgcgtaacgaatgaattccgctccgtcgcgagttatcttgactcccttgtttgagcggtcgaagatgtgtacgccgaactcgtcttcaagctctttcagcgcggaggataagctcgcctgagatacgccgagaacctttgccgcttcgttcattgagccgcaccgagctatcgcaagagtatatttgcattgctgtatcgtcattatgttgacctgccttaataatcgtataaatcacaatatatatatatcataccacaactcgcgcggtttgtaaactaaaaacttatgctgagctatagatttaatttatgcaccataaacaaaaccgtaccctcacgcgaagatacggcttttgaaatttatgtatttttgtggttcagattacttatctgaattaaactcccactcagacgtcatttcgacgggcagaatattgccgttttcgtcgagatccatgcggtctatgcataagaatctcgcgtttccgtcttttattccgggcttgtgacggtggtacaccatgagatattgatcctcttcgggaagatagaggaatccgttgtgtccgggtccgtttgcaatcttgctgtctcccgttgagaggattgtggaagctgtagtgaaaggaccccacggcttgtcggaaatgcaggtgttgacgcggtatgagccgtcaccccaaccgcccgacgaccacatgaagtagtacttgccaccgcgtttcatcatgcacggaccttcaacatagtcgggaggtgtgatttccttgaagacctcgccgtcctcgaagggtacgaagcctgtcatctcatcgttcatcttgcagatgttgcagtgaccccagccgccgtagtagagatacattgttccgtcgtcgtccttgaagagatgcgcgtctatgggctgagcgccgttgtggaattctcctacgagaggcttgtcgagaagagccttgaacggacctgtcggactgtcggaaacggcaatttcgagtccgccgacgtcgctcttgtgcgggatatcattcgaggcgaagatgtagtaatactttccgtccttttcttcaattgtcggagcccagattgcgctttttgcccacgggaagccgctcatgtctattatgttttcgattttcttccagtgagtcagatcctccgagacaaagcatgagtggtttttctgctcatcgtagggtagggagtgcgtgacgtaaattatatattttccttcatagtatcttgcttccgggtctgcgtaccagccttcgtcaaggggattgcggatggtgaatttcatagggtaatcctttctgtgggtatattatgtggttttacgcttcaaagccggcgtattcgagaagtctcttttcggctgcggcacaccaaagctcacctgcgtccttgcagatagcgtcgagatcagcgtagagttcgccgagctttgtgcccttgttttcttccgcggctttaccgaagtcttctatagcggtcagcggaagttctacgtgagtataaataagcttctttgcgccctttatcttcggcagattcattgtagtctcagcgcaggcgttaagaccgccgacgtgtgtgatcattcccgcggggttgatagcctttgtctccatgagcttgatagcctctctcatgtcgtcagtgtttccgccggatgtgcctacgatatgagtggagaggtagtgtacgttgtagaagttgaacatagcggagaactcgggatttgtaggacctgcgaagaagttgaggcatccgtcgcgtgcgagaagagcgtcgcccatctcaacaaccggctttacgggagcgtatacgaatacgtcattgaagccttcgccgcctgtgagagaacggagatattcaacggggttttcgatgcttcccgtgttgatgaagcggaggtcaacgccgagcttctttgcttcttcggggggaaggagcttttcggctctcttgagtctcgcgtcgtcaaggtcggtaactataagcattttgggagctctgccgccgtggatagcgta

SEQ ID NO: 2447 - DNA, 3341 bp, Unknown
  16S sequences of unknown bacteria
aggtcaagtggattttgcttgattcctacttctctcagcgtaaaattgcaatacctgcgcttgggaaattggttttatatctggtaggcatggtccttgggtacatagagcggcccgatagcctggcaaaggggtacaaagcgaaaaactgaccccttgaaggcttgtctcaactttcccaggcagtttttcataagctgaaaaagaacgcatgctccgagacaatccttctccgctccatttcaaatagctttctttgagcgcccaaaggccaacaaaagcttctgcgcgctgcgccgcttccttttgccacaaccaccgcatttctgcatgcgtgcatacacgctgcgctaagggcaaggaaatagccctctttatcttctgtatgtccacacctacaaacggccttcccacagcacaagcagccatgccaccgctatgtgaaaggctggaatctatctccggatgcgcagctaaatagggccttccgcgcgctgttgtccgccattgtatccgccccggggccaagccatactgccggtatagcacataaccgcgcagcgcgtacgccaacagccgaacatcttcctgttttccgccagcttttcccgcaggtgcaaacagcgttctcagcgcgtttcgctgcgcatcggtcaacggcctatctagggctgcccaaaaccaagagcagtcatttttttttcgatctctactttccattgtgttttatttgctcggccgcttacatcttatatccttgtctctttccagtttagtatgccgaagcatcggatttttatccaaacatacctgatagaattttccacaaatgggaaaatatatcgtttttgtcatgtatgccccctttgcttattacaatatacaaagacactataaggggatctgacgatgggaaccgtagaattattttttctaggcttagggcttagcatggatgcggcggctgtctccatttccaataccctggcctatccacacctaaagtggaaagcaaaactaagcatgcctttgcttttcgctctgttccaaggtatcatgcccattttaggctactatgccagcggcattttcgcaacctttattgatacctatgcaggcttcgtcacttttttcattctgtgttttatcggaggaaaaatgattatagacgtcttctatcaaacggatgaagctgtctctgttccgcggtatacctggcgccagggaggcatacaggccattgccaccagcctggatgcctttgccgtgggcatcagtttacgagctgcgtatgtgccgctgggtacggcctgtcctatcatcgcgctcgttacctttgcctgctgcggcatttcaatgctgcttggcgaacgttttgcttctttcctaggcaataaagcaacgattttgggcgggttgctactgatcgccatcggcatcaaagcgctttggccataaagccttatataaggcgaagcaactcctctggccggtcgatgatatattcggctcccttttgctctagcacgtccctgtctcgaaagccccaggtcacgcctacacaggccaagcctgtgtttttagccgtatccacatccacttcggaatcccctacatagagggtatcttcccgcctacatcccaattggcgcagcgctagcagcgggccatcgggcgccggctttttctttacagtctcgctttctccgatggccacatcgatatacccttcaaactgctcggcacatagctttttgaccgccgcatcaaacttattggaagagactgccatctttatgccgcgctgctttaaggtgttcagcaatggcataatccctggatagggcgcagttttatgattcatgttgtttgcataatgtgctctaaacgttcccaaacagcgcgcttctatcggctgcggcgttccttttggcacagcccggtgtaccaagtttgccacgccatttccaacaaaggcccggatctcttgtttgcttctctgcggaaacccttcggtttgtaaagcatagttcacgctatccataagatcctctaaagtatccagcagcgtgccatccaaatcaaacaaaataccatccatggcgctgtcctccgttttctttcattgtacgaagaattcctttttttgccaagaccttttccttaaaataatgcattccaggtctcggggccaacgataccatcaatttctatctgcatggcagcttgaaacgcacggacggcactaaaggtatccggtccataccttgcatcgatccttgcctgcaaaaaaccttgacgcgccagcttctgctgaaccatccatacatccaggccctgcatatagggcgtacgtaggcaaaggctgcgtgtaaaagccgtatattgagaactaagctttgcccctgcgccaaataacgcatgccaagtgcatgggctcatcctcccagaccccggaatgcccgcccattgctgaaactgcataactgcctctcgcgtgcgcgtgccgtagcatccatccaattttccatggtataacccaaatgccctcagccttcgctgtagcattttgacacggcaggctttttcccaaggcaaggccgggcagcggacataattttttttgcccaatgcgcttccccctccttcttctatgtattggtatgatgcccgtgctccatccgttcattttggtataaaaaaagagcgcattgctgcgctctttttatcgcttacatctctgtaagtttcttgtaatattcgaggcgatctttcgcttcctcttcctgcttggtgaacaactcttccgccaattccggacgctgctgcgccaggctacggtaacggttttcacccatgatgaattcgcgataatccgccgtcggggccttggaatccagaataaacggattcttgccctcttccgccagctgcgggttgtaacggtacaacggccagtagccggactctaccgctttcttctcttctgcctgagatttacccatgttgataccatggttgatacacggtgcatacgcgatgatcagggacgggcccggatacgcttctgcctccgcaatcgcctgcagagcctgggcatggttggcgcccaaggcaatggatgctacatagatatagccatagctcatgctgatcaggccgagatcctttttgcgtacgcgcttaccggctgcagcaaactgcgccacagcaccggtacggctggatttagaggcctggccgcccgtgttggagtatacttccgtatccaaaaccaggacgttgatgtctttgccctgtgccagcacatggtctacgccgccgtagccgatatcgtaggc

SEQ ID NO: 2448 - DNA, 5268 bp, Unknown
  16S sequences of unknown bacteria
gagcggaacgacaatggaaataagcggaatgcaagcggaggcgggtatgatttcagagcttatggcgggaattttaatatttattgcggtatctcttgtaattatgtatatatcgtatagaatatcggtttcaatttacagacgcaaggaattttaactgcttattcttgcttatctatctttttatgccaaattctaataaaaagataataaaacttgctgctacattgccggtgagctgaagcagcaagctgttataatttataatcagtgcagatagcggtcgaagactgtccagatttcctcagtgccttgtgagaactgccagcaggctgagcctgcaataccgtatttgcttacgagggagaggcggttggtaatcgaggtctggtcttcaatccacactctggcggtgccgcctgatgcctgatattccacatagttttgcatttcggttttaaggtatgtaggtgttagatttttttcactcagtatttcattcatgcgcgtcattgtcacggcactgttggagacgattttgccgctgccgtcaacaacccatatgcgtgtatacattggcacgcccatgaggagcttttcggcaggtacgccttcgctgaggcagccttcgattgcttcgattacaaaaggaagcgaggaaactgagcctggaatagtgcttccggcgtagtgctcgtcgtagctcattacggcgagatagtctacataattggaaagcgcatctctgtcgtattctacagtccacggctttggaacgagagtgtcgatggagaggttgaggccctgtctttcggtatagtttctaagctctttggtaaatgccgtaaggccatttgcatctgcgtcttttacatcttcaaagtcgatgttgatgccgtcaacatcgtagaggcacgaatagaagatgtactgtgcgattgcttttttctgaatgctgctgtcagaaaacattttagttgtgaagttagtagagcctttttcactcatattgttcgttattgttgcccagaccataaatccacgttcgtggcagagctctgtgtagcctttgtcggcagaatttgttacagcgccgccgccctcgacgatgaggcgaaaccaagtaggagcaagtatgtcgacaccatctgttcttgccggtgcatccggtgtcacctcgtttacgtactgccaggcaacattgattttttgattggcgctttgcttaaatttgctcttgcgcggagcgtaaaaatcaacagtggaaaggtcgaggtcttctacagtgatgttctgcttttctgtgtaatatacattaccgtcaaaatcggatattttgtaaaagttgtcggtctcaccgttcacaaaaacctgttctcctgctgccagcgttatcgtgtcttccgtttctgcgaagagagaagggaatgcagatactgcattatttcccactttggctattttggcagattggtcgtaggctttaagctttatactgccgtcgctgaaattatagctggtattgaagaactgttccattgtattcagagagaagcagagcgtatcattaatatcctttaaggggacataaacagtaccggcgtaattttttataagtgcggtggtttcgctgtcagccatcattatattcatacgactcaggtcgagcgtgagctttttgcctgctgtatcgacagctaccgcgctgttattgagatatgagcctatcatcgaaacaggtaaatatatatttccttttatataaaatccactgtacccggtgcttttcccgtcataatatatgcgataggagtcttcactgtctgcgaaagcaaattgtgcacacataaggcttatcagcatacaaatagcaaaaattatcaatttccttctttttcccattttattacctctcttacgacaaatttttcaaaaaatgcactatgtaatagtatactatattttggcttataaaagttgaagattttatgaaaagcacgatattttgttgaaaatttttgtcgaattatatataattgaaaagataaaaaaattaggagtatacaattatatggacacaagacaaaaagaacttttgtcgcagatcaagcaccacgcgctggtatttttaataagcgttagagactatttaaaggaaagcttcaatatctatataagaaattacggagtaattggtgcagcggcagttttgctcgtcatcgcaaagattatggtattctatgtacttatgggaacaagcttgcattttgtttctgtgtgcgttattaccttgctttttatatatctgctttttaaagcctttaataataaatgggtgccagcgactatattttttgttctttcggttttgatgttctgtgatgttacatacagcagcttcttcaacagatatctgtctgtcggaatgatcggagcggcggaagttgtgggcgatatcggtgagagtataaaggaagtgctgcgcccgataaatttctttatgcttgtggatgcggtattcataatatttatgcttgctctaaaaaaaaaatcgagcggcaggagaagcagaatagacagtgataatgcggcaggcgcagttttggatggtgaagatacagaggataaaaatgcgaagaaagaagcagaaaaagcgcattcaaaaaagaaagccaaaatcaatctgaaagcgatagcatttttcgtaataattgtactgtttacgacgacaaatatttttaattggagttatatcacttcactttccaatcaggaatttttttcttaccatataaaagacatagtgtccggagcgtttgccggagaaacgagcgaaaatcttgcggcgtggacggactcatacgagcaggaaaaaaacgggccgcttttcggtgctgcaaaggataaaaacctcattatgatacaagtggaatcaatgcaggactttgtgatcggacgcgagtatgagggtcaggaactgacgccgaatcttaacgctctcatagaaggcaatgcgacatattttgataacttctatcagcaggtaggaagcggcaatacatcagacgcggaatttgcggcaaataattcactgtacggtacacttgtcagctacacatacaagctctttaaccaaaattatttccgtggtcttccggtactgcttggggaaatgggatacgatacggccgtatttcacgcgcacgaggacaggagcttctggagtcgtgagagtatgtatccgtcagagggatttaacagatattacggcggacttaaaggccgcggcggtgattatgaaatgacggaatggatgggctggggtcttaccgattccgagttttatccgcagacggtggaatatatgaaggaacttgcggagccgttttacagtttcgtaatttcgatatcaaatcaccatccttatgaaatgctcgaccactacaagtttatagagcttgcacctgaggatgaggatacgattgtcggcaaatatttacaaagtgcggcgtacaccgattatgcactcggagtgttcttcgacgagctcaaagaagccggtctttacgacaactccatatttgtgatatacggagatcatacagggcttgcgcattccgatgaaatagatgaaagcatggagagaatactcggaaagccttatgactatgaggaaatgctcagggtacctctcataatctattcgcctgacgagagcatagagcttggcgatacgataatgacggcgggcggcgagacagatattatgcctactgtagcctatcttatgggaattgaagaactcgatacgatatacacaggccacaatctttacacggtaaaagagggttttgtggcagagcagacatatatgacaaaaggctcattctttacaaatgatattgcctatgagatgtcgcgcgacggtgtgtttgaaaatggcagagcctggaatattcatacgggggaggctgtcgacgtatcattatgctatgatggttacctgcgctctgtggacattgtcaatacatcggaatacgtgctcaagagcgatgcgataagaatgatattcaaggacggagaaagcatcggcaatgtggacagcataaatatctctcgtatatacgcggacgagatagtttacgcagggtatccggattctgagcttatcggtacaaattcggccgaggcgcttgattattccgtgtatgcagggaacagaagcataaggcttgacgtttactggaacgaagatagtcagccatatacgataaaccagaagacaggtgaagttgaaatggaatatgacgaaattatagagtggatggaaagtcatgcgagcgtcgatctttatatgaatatggaaaagagcgctgattttatgatacagttctgcggaacgctttcacctgctacacgtgagcgtattatactggaagtgccgaatgctgaggaatatacgggaagatacgaggcgatcctcgatcttaattcggcggggctttcatatgaaaatgcgcttgaatttataaaatcaaacaaggtatgggcggttgtaatgtcaaaagaggattctgaggggagatttgcgaagcttttaggaggagatgtgacagtatacatcaacgataaggatgcagggatcattaccaaggtcaattaaaaaaatatataaatttctcataatattgctgataattttgctgatgatagaaaatccggccggaaatgcgtttgtaaccgcgcttacgagccaggaatttgtgcttgcgcatctcaaagatgcggcggattattttttcgcggagcaggaggagattaactttagactggcgacaggtacatatgaagagcagaaggatggtccgctttttggcgcggcaaagggacgaaatctcattgttattcagcttgaatctgttcagggcattgcggtggaaaacgactattacggtcaggagataacgccgtttattcacagccttattgcggatccgggcacgatttatttcgataacttttatcacgaaataggcgcgggaaatacatcggacgccgagtttgctgttaacaattcccttatcggcagcatcgagagctatacctaccagctctacgaagacaattattttaaagggctgccttggatactgaaagaacagggctacagcacgaatgtatttcatgggtataaaaaaagcttctggaatagggaaaacatatacccagcactcgggtttgatagattttacggcggcgacgattatg

SEQ ID NO: 2449 - DNA, 32759 bp, Unknown
  16S sequences of unknown bacteria
gtgaaaccggcccgacaggagcggacggggcaacgggagcgacaggtccggaaggcccgactggtccgacaggtgaaaccggcccgacaggagcggacggggcaacgggagcgacaggtccggaaggtccagaaggtccgacgggtgaaaccggtccgaccggtccaaccggtccaaccggcccgactggcccgacaggtcctgtaacgcaggcagccgcagtgacggatgctaccagtacgtcagacatcgtggatcagttcaacgaacttctggcgaatcttcgtacggctggaatcctggcgacttagtatggacgacagtacaaaagcaaaatggcagattaaaaagtaaaaggggagggagcgctattcgttccctcccctttttcagcagaggggttcttagttgtaaaagtgcgcaaaggatggatagaaaaatgtattctgtgagtttatgtatgatcgtaaaaaatgaagaggctgtcataggacgctgtcttgaatctgttcagggaatggtggatgagatcattatcgtagataccggctcggaggatcggacgaaagagatcgtagagagatatacggataaaatttatgatttttcatggagagatgattttgccgcagccaggaactattctttttctctggcatccggagattttatcctgtggctggatgcggatgatgtaatccttccgaaagaacgagaaaaatttatggagcgcaggaaagcgctcgatctgtcagtttctatcgttatgatgcgttatgatgctgccttcgatgaaaagggaaatcctacgttttcttattatcgggaacgcctggtaaatcgaagaatgaattttcaatgggtaggagaagttcatgaggtcattcctctcaagggtaaggtcgaacactgggatgtagcggtggaacaccggaagattatccagaacgacccgggacgcaatctcagaattctgcaaaatatggcggattcggggaaatttatggatgcacggcagattttttattacggaagagaacttctggcaaacggtcagttgaagaaggcggaagaggttctaaaacagtatatcgattctggattagggtggaaagaaaatcagatcagcgcttgtcaggatctggctgactgcaggatgcgcatggaagacgaggaaggagcttttaaagcgcttcttctgagcctgcgatacgatcggccgcggcctgagatctgctgtaagataggaaaatttttcatgaagcgtgaggagtatcgaaccgctatttactggtttgaacaggcgatgcaatgtgaggtggatgttaccgccggaggttttgtatctgtggacagcagcggattcctgcctgcgattcagctctgtgtatgctgggataaattgggtgatttggataaagcgtatttctaccataaaaaatcggaagaatatcgtccggaaaatccatctgtgatatataataaaaagtattttgaaagaaagatggaggagaagatctgatcgatatggaacgggatttgaattttacggtaacggacgacagacgggacgattcggtgagagtgaacggcggaatttcggaatatgcagaagtgagaagcaggacggcggaattattccgccgtcccggtattcgggtaaccgcagctcttttgtgctgtcttctctggggcagcgcttttccctgtgtaaagatgggatatgaaatgctgaacatcaccgatacggggagtcagattttatttgcaggctatcgcttcgtactggcggggatatttacttttctggccggttgtctgatcgagaaaagggcgcttctgccaagaaaaacggcgctgccggcggttgcgggacaggctatgctccagacggctcttcagtatgtctttttttatgtgggaatggctcacactacgggaattaagggatcggtcatcaattcgtctgatgtatttttcgctatgtttgcggctcattttctgatccggggagaacgggtcacgtggaggaaaatgatcggctgcataatcggttttgccggcgtgttttccgtgaatcttcagccgggcgcctgggacagcggcttcggctttttgggggacggaatgatcgttctcagctctgtgatgtacggtgtcagctctgtaacgctgaaactgatcgccgatcgtgagacgccgatgtgtatcacttcctggcagctgtttctgggaggtctgcttctgaccgctgcgggatttttgaccgggggacgcatcgggggattccagctttcctctgtactgcttttattttacatggcgctgctttctacggtggctttcagtctgtggagtatgctgctgaagtataaccaggtggggcaggtagctattttcggattcagtataccgattttcggttctctgctgtcggcgctgatcctgggagaaaaacttctttctctgcagaatctggccgcactggcgctggtaagcgcggggatcctggtggtaaatggagtattgccgataaaatccggcaaatataaaagctgagagtcatgaaaattcgtatttttttaatcaaaaacgacaggaaaagatgcggcagacggagacgttattcgacatttttttaacttattttacatagattttacatttaactaaaatagattttacatttctataatattctattaagtacgaatgtaaagaatgagaaagaaatttgtaaaattctgttaaaatttaacagtggaaggggtaagaatcacattagcgaaataaaacagacatcataagccgggacgcaattgtttatgtaccatgagaagtgcatggaacggaggattttatgaatgaaaatttacaaatcatattcggactgctgggaggtctggcggtctttcttttcggaatgaatatgatgagtgaatgcctgcagaaagctgcaggagaaaagatgaagagcattttatccctactgacgaaaaatcccgtaatgggagtgatcgcaggcgctcttaccactgctgttctgcagagcagcagcgctactactgttatggcgataggctttgtcagcgcggggctgatgacgctccgacaggcgatatctatcattttgggcgcgaatatcggtacgacggtgacggcgcagattatcgcttttaatattacggactacatatttatcattatctttataggattcgtcgtttcctttctgctcaaatcagagcgcgcaaagaacatcggtcagactatttttgcattcggacttctgtttctcgggattgagacgatgggtgacgtcatggaaccgttggcttccagccagttttttctggatttgatcgcccgggtatccgatatgccggtactggggctggcggtgggtacgctgatgactctggtagtgcagagcagcagcgctacgatcgctgtgcttcagaattttgccgctcaggcggggcctgacggagtgacgagcattctcggcctggcaggggcgattccgatccttctgggcaataatttaggcactacgattaccgctgttttagcatcgatcggacagtccaaagatgcgaagcgcacggcggcggcgcactgtctttttaacgcttccgggtgtctgctgttcatatggtttgtcggccctttctcgaaactgattcagatgatttccaccaaaggaccggaggtcgatgtgatcgcacggcagatcgcaaatgcacacacgatttttaatgtggtgatgacgctgatctggataccgctgataccgctgatggtcaaaatcgtaatgaaaattatcccggctccgaaaaaagcggtctttcatccggatcgtccgattattttggatgacaagatgatcaaccagccggtagcggcgcttcagctgatcgccagggaggttgttcactgcagcaaaatcgcggaggaaatgctcagcgaagttatcgtcgctgtccgcgagggggacaagcactgtctccacgtgatttctgacaaaggagagctgatcagggatatttcggagaagatgtcgggttatctggcggaactcttttccgccggcgtgctcaccgaggctcaggcagcgcagacggttcgtctgacttatattctgaatgacctggaccgcatcggtacgctgtgcgtggaggtggcaaaacatgtctgggataaggaggaaaacaagtaccagtattccagaagagcgatggaagaagttcaggagagtcttgagatcatcaaagagatgtatgatgacgctatggatgtgctcgtgacgaaggataaagagaaagcgaaaaagctttcgcggcggaaggaaaaaattctggaactggacagcattatgcgaaaaggccatttgaagcgtgtcaatgagggtacctgcaaggccagtcttaccaaaccttttaccaagattctcaacagtatcgaccgtatgggcaactgctgtctgaatctggcggatgtcgctttggatgatctcacattcggatatttttccggcgtggatgaaaatctgccggctcattagatctgaaactgtggataataggcatcacgggatgattccgggacgctttcagacataatttgtctggaagtgtccttttttccatggcaaaagaaagctctgttaaaatcgtttattatttaacaaaaacagagcggattaaatcgataagcgtatacacgatggcataatatcttctctttcaatttttgacatatcctgattccaatcggagcaaaatctgacagactcaactggttcgggcatacgaatgattttttaccttgcgaaactgtctgcgcttccggcggcagaagaatgccggcgttaaaaaacaaaaaaactttgccttttccgtgtcatttttcaaaaaatgggtatatttactatagcagagcgtcgtaatccgtagggggatacgacgctgtaatattagggaaagagagggtaaaaatgaatacatttgtaaaaaactatctgcagaatattatccccgtaccatttcaaatcgaatccgacggcgatattgacaaaatcggaaacggtacaccggaatttacggtaaaaatgagaggggaactggacaagaaagctctgatgaccagcacttcgctggcgctgggcgaagcttatatgagaggcgatatcgatgtggaccgggacctctttgaggtactggatctctttatgggccagatggggaaatttacgtcggacaagtcggctctccaaaagatcatccacacctcccgcagcaaaaagaatcagaagaccgaggtacagtctcattatgatatcggcaatgacttttaccgtctgtggctggacgagaccatgagctattcctgcgcttattttaagtcggaaaacgatactctgtaccgtgcgcaggtaaacaaggcggaacatatcctggaaaagcttcatctgcaggaggggatgactctcttggatatcggatgcggctggggatttcttctcaagatggcggcgaagaagtacggtgtgcgcggtttgggaattactctcagcgaggagcagtatgagaaatttcgccgggatatcgaagaagaaggactgcaggatgttctggaagtgcgtctgatggattaccgcgatctggaaaagtcgggactcagatttgaccgtgcggtaagcgtgggtatgatggagcatgtcggcagaggaaattacgagctgtttctcagaaatgtggacgctgtgctgaaacctggcggtctgtttctgcttcactatatcagtgcgcttaaagaacatccgggagacgcatgggtgaagaaatatatctttccgggcggtatgattccgagcctgagagagatcataaatattatgccggatttcaatttttacactctcgatgtagagagtctgcgccgtcattacagccggacgctgctgtgctggcgcgaaaattatctgcagcacagagagcagatcgaaaaagaaaaaggaatcgagtttgcgcgcatgtgggaactttacctggctgcctgcgcggcgacgttccacaacggaattatagatctgcatcagattttgatgtctaagggcatcaataacgatcttccgatgattcgtactgtataacagagagcagaagaaccccgtccttttgaggcggggttcgattttttgcgccgtctgtctttggaatctatatcggcagatttcatgtttttcgcatgctgcggcaaaaatccccgtatgatagagacgggaggtgttttatgaaatctgttgtgccgaaaaaggcggcggcgctgctgctggtgtgcgccgccggcctggccttttttatatttgaaacggtacagacggtgcgcacaaatgcggaggcgcagttaatggaagaatggggtcttgagacggcgctgacttcatcggatgcggaggcagagccgcgaaaagtaatctgcctgacatttgacgacggtccttcctatctgacgccgaaggttctggaaattctgaagcagtacggcgtcagagcgactttttttgtcaccggcatcgatccgcaatatgcatactgtattaaagaggcgcgggatgcagggcatacagtgggaatgcatacgtattctcatgattatgcggaggtctatgcttccgcagaggcgtattacgcggatctggagaaaatttcgatgctctgtgtggagcagatcggctacattccgcggtacatacgctttcccggcggaagctccaattccacgtctgtaaaatacagtcccggcctgatgacatttctgacgcaggatgtgacggagcggggatacctgtattatgactggaactgcagcagcggtgacggagagggaagtctaaaaccgcaggttctggtggaaaattcgaaaaaaaatgagggaaagaatccggtggtcctgctgtgccatgacggaggcgggaaagaaactacggtggaggctctgcctcagatcatagaatattatctgtcggagggatatcagtttcagaccgtggatgagatttcagctgaagtacatcaccgcgttctcaattaacgcgccgctttgtgcggatggatatttttcaatacacagatttaagaaaatcttaagagatatattaacggaatctcaaacattatcctttataatagaatttgtcgaaaggatgtgagtgtattgggaaatagcagttatatttatcttttgtttacacggtcgaacacgctgatgtccagggcgatcttttggtttacacatgacgaatatacgcatgtgtctatctctgccgacgatgcgctggaggatttctattcctttgggcgccgggtaccctatatgatgctgccggccggttttacaaaagaatcggtctatgcaggtttgtatcgcagcgacagtgaaatgccgtgcaaactggtgcgcataaagacggaacagggggaggtagagcggatcaagacgattctcggatttttctaccgctatcgctttcagtataagtacagtatattaggaacggttttctgcaagctgggaatccggtacgagaggatgcagcatcgtttttgttcacagtttgtaagcgagctgctgcaggagtgcagtatcatgcagcgggatcgggagccttctctgatcaaaccgtcggatctggcgcaggagccgtacgtacatactctgtttgagggggacatcgaaggtctgcgccagtggatggaggctatgtccgctcatccgtatatcgtttcgatcgaagactatcgaaacggcctgtcaccggagacaaagaaagccgcagctgtatcagcggcggatatttcggcgggttaacttaattcatggaagggccgcagatgaaagcggagatatcaaaaaagacaaaaggggaaaacgataaaagagcggcgcacagcgccgctctttttgtctgttttgtctgcagaggtattctgttttcaggaatgctttcgttaaagaattccttagaaaacatctgaggttatgcgaagaggtcatctccgcttttgaattcgaacgcagggtgaaaatcaaatttaaccgcacccacagcaattccgggacctacggcgcgtttgattctcgcgataccctcgttaccgaatcctgcgcacagctcgatggcggtgcatcctttttccaccagttcttttgccgcgatttctgcctcggcgtaagtagagcagccgatgacgttcatatcgatgtccgtaccctctatgacggctctctgagtcttgggatcgcagtttggagcaacgtaaagaaaagcgcactgaaatttcatgaatatttcctccttggattttctcgggatcaaacggagtcaagacattatgcgtcttctgcgaattgcaacgctgtcttcagcgaacgggactacccggaagccgccggctcaaactgtatcagactgccttaaaaggcaggactcctgttttttaaggagcatattgtaaagtatcaaaattaaaatggaaagtaaaaaatgataaaagcggtaattttggcagaatggggaggagaaggggcggagatgattgacaagtattatcaatgcttatatcataataaataatagataaaataaaaaatatcttaatgaagtatgttttcggcggatcttgctcttttggagattcttggaagcgtacggttccggggaggtatcttatgcaggacgtaagacagattttagcggattttcagaacggtgtcgcaggagtcgcggagagcagcggggccgtcgtcgatgcgtttatggggctgcaggatgcggcttttgccgacggcgctctttccgtcaagatgaaggagctcatcagcgtcgcgatcggcgtctacaacagatgtcagtactgtatcgtggtacatgtatacaacgcttatcaggctggcgctacgagagaggaaatcctggaggcggctatggtatctatgggcggtttcggcgcaggtccgagcatggcgtattcagctacagtgctcctggatgctgtcaatgaatttgaaaaggatttcaaatagctgcgaagtccggatgaaaatcaggaatgtttaggccggagcgtttctccggccttttttacaggaaaagaaaaaggagggcgacaacgtgacggaaagaagagccgctacttatgaagaacagatcgcactgatccgccggaagggctttatcctctacgaagatgaagaggaggactgcatcgcatttttaaagaaggtgaattattatcgcttttcctcctatttctttccctatctgaaggaagaccggtcttttgaaccggggatttcttttttccgccttcagcgtacatatgaatttgacagcaggatccggtctctgatctttgaggtgatcgaggatgtggaagtctatcttcggacacagctatcctattatatctctcagaaatacggaccgtacggtcatctgggagacggaatgtatacaaaaaagcataatgaacggagttttcagagcagagtcagatcctgtgtggaaaagaaccgggattctcctgtcattcggcagagtctggcaaaaaacgacggaagagtgccgctgtggacaattgtggagtttttctctatggggatgctggtttacttttatctcgatatgaagcctcaggatcagaaagcgatcgcaggggagatttacggaaccggtgtgaaacagctggagagctggcttcactgtgtaacggagctgcgcaatcgctgtgcccattatctgcggttgtattactggtcttttccgtcggtgcccaagatgccggaagggtgtgaatttcagccggaccggggattgttttctcagcttctggttctgaaatttctctaccccgacgagcgggagtggaattttaaaatgatggcggttttggagccgctgatggcagagtatgaaaatgacatcgaactgagtcatatcggtttcccaaaagattggaaaatgctgctttaaatcgggctgctgatgagactgccgatctcttccggcgacagttcccgatgattcagctttaccgcgatcaggcgatcttttcggtagaccagtttcagggagaagaacgggatgccggtctgcatcagatgcagaaaaatccggtcgccgggccagatcggaagctcaaatatccgggacttcggaacccattccaattctccttcgtcgcagtcgatgagaccaccggtataatcggaagaagtgtaaagatacatgtattctgtcggatattcgtcggatacgaaggtgacgatgccgtgccatcgccaggagatcagatccagtccggtctcttcttttacctcccgcagcagacattcttccggactttccttgtcctcaaactttccgcctacaccgatccatttatctttattgaaatcatgtcctttttttgttctgtgaagaagcagataactgtcctctttttcgatataacagagtgtggtatttttcatcggtagttctcctgtcatacagcgccgaatgttccctgctttccaaacgggagcgtttcaaaatctcagcgtaaaccggaggctttcgctggattccggaaacagcgttccggcgctttttcttccggaccggatctctgtatattttgcgcggcatttttgccgcctctcttttctcttcgcggaggagtgcgcaaaaatgagactcaatcatacataatttttttttcggaagcgttatgctgtttcagaatgcgtccttttttcagaagttcccggatccgttcccggtcgccggcctccagagcctctttgtgctgactgatatgcttcaggagcgcgtcgatctcctgaagaagattttccttattcagaaggaacagatcgcaccaggtattttcgtccagacgggctaccctggtcatatccaaaaagctgcccgcgctgaaacctctttcttttgagagggttgggcttttgatatatgaatttgaaaccacgtgggccagctgagaggtataggcgatactttcatcgtgacgctccggtgtggcttcgatgactgtcttgaagccgatatcataggccagttttctcagaatatccacgtgagcgcggtcggaacggccggtgggagtgatcagataactggcgttgacaaacatatcggccagcgagaaagagaaaccggaaaattctgttccggccatgggatgagagccgataaaagaaacgccggcctccgcaaggggcgcttccagactttctacgatatatttttttacaccgcatacatcggtgacgatggcgccctgggcgaaattgtttttgttctccagaataaagtccacgattttgtgaggcggcagagctacgatagtgagatctgcgcgcttcatcaggtgagggcggtccacgggaatgatttcgtccacactttccatagcgatggccatttccagcgtcgcttcgtcggaatccataccgatcatgtggtgtgcggtgtatttttttatcgctttgcagaaggaaccgccgatcagtcccatacccactactaaaattttcatagaataacctcgattctgatttttgccgtcggaaatttacgtatccggaagactgccggcggctgatgtatggtatcattatagcacaggaaagctgtttgaaaagaaaaaaatgctttaaagcgttaaggtgtgaaaggactgagcgcagcggtctgtccggaaagattttttatggaaaagaggattcgaaaaatgttttctgcgctctgatgagatacaccgcgaaggaacagacgaaatgcagagtaaatcggtcctataaataaaataaaataaaattttctataaatttcacttgcaaaattcatggattgggttataatagtaaaggtcgtacggatttgtacaaaatagcatagagggttgaccgagtggctaaggagcccgcctggaacgcgggtaaggcgaaagccccgcgggttcgagtcccgtgccctctgccataactgtgaaagcgttgtaaacacttcaaaatgcggtgtttgcagcgctttttttattctattctgcgcggatgaagaatcccgaaatcgcccgtagccatctgaaggtccgaatacatggtgtgcgctcttttttcaaaatataagccggtattttctcgtgcggcctgtgtgaagaaagcgtgacactcattatttgagcagaagaagtttcccgcggtgcagcggatgcatataatatagtacgtctgcatcccttcaacttttataaacggaagctttttctgaaggcagcagcatttcgccgagatgcgggggcgctgcacccaggggacggagcggaaacggaaaggagaaaacagatgaataaaaaatggtggaaagccgccggctcaagagccctgaggacaactgcgcagacggcgatcgcgatgatcggtacggcggcgtttataaaggatgttcactggctggccgtggcttccgcatccgtgctttccggtatattgtcgctgctcaacagtgtggcgggcctgccggaattaaaagacgatgaagcagattgacggtgttgccggaaaagcgaagtctctcggcggcagcataattttcaggcagctgccaaggctttgccgatttctcatcttctgagaagagggcggcgcagccggggcagatgtctgttatctttttatttcggcgcgttttgtttcatgatgttgctggatgcggtgacagcgggctttcctttcgcgttatacagctcggcggtagcgtgaatcattcttttactgttggtgactgcccgggcgcggatggttaccgtttcatcgctcagaaggaccggacggagataatttgaagtggaatcgatggtgcccactggctggcagccgtttgtgacaaagctcatagtgccgaaaatgcagtcgatcatataagtgagaatcccgccctgcacattgtcaaagccattgacctgccacggacggatcgggatttttaccgtcagctctccttcgtcggtatattctacgaattccgtttctaagacttcgatatctccccgaggcatagcgccttcttcagctctggccgcaagcagagccttcagctgagctcttcttccctctgctgtcgtaagatccagcgtcggatcactctgaataaaagccatataattactcctttcacaatcttgaattttccataatacatagaacaaaagatgtttttatacagaggaggagaaagtattttttcccgcattcctatgtacatttatagctgttatcagcataccatatattatgtatgtcatgttttttttgtggtcgattaaaaaaatttttccggaaatcttttcggtgaaatgctttccgcttttttcgcttgtattcggagggcgtgcatgttatacttcttctaaaacaattattgtaaaggaattacaaaaggaggattttcgttagtatggaagcagaccccgatgggaacacagtaatctttcagctattgcttttgttgttatttactctgatgaatgcgttttttgccggtgcggaaatggcggtagtctcggtcaatcggaaccgtatccgttcgctggcagaggacgggaacaaaaaagcccgggtgatacaggggctctttgaagactccacccggtttctctccgcgattcaggtggcgatcacttttgcgggtttctattccagtgcgtcggcggcttcgggcctcgcgccggttctcgccggatggatgaaagaactgcagattccctacagttcggcaatcgcacacaacggcgtgacgctgctgctgatgttttttaacctggtcttcggagaactggtaccgaagcggatcgcgcttcagaagtcggaagctttctgcatgctgactgtcatgccggttcattatatctcgatcatactctcaccgtttatcaagcttctgtcggtatccacaaaaggtgtgctgcggcttctgcggatgaaaacggaagatgaagaagatgcggtgacagaggaagaaattctgtcgatgatgaagatgggttatgaacggggaacttttgatgacagcgagcgcaggatggtgcattctatcttcgcctttgacgacagaagtgggacggaaattatggttccgcgtcaaagggtgacagttctcgatatcgaagagcccctcgaagagattatcgaggaggttttggagagcagatattccagaattccggtctatgaagaggaaatcgataatatcatcggtatcctgcacgtgaaggatgtattgctgcgcatggtaaaggacgacgcgcctttcacgaaagaggaactgcgcggtatgcttcagcgggcatattttgtgccggagaagaaggacgccgatgagcttctgcgcgatatgcagaaaaacagagtgcgcatggctcttctcgtcgatgagtacggcggtttctccggaatcgttacgctgaaagatctggtggaagagatcgtgggcgatctccatgaggattcggaacctgcagagcctgagatccttcaggtgagcgaaagtgagtttctgctggacggaagtctgtccatcggagatctcaacgatgaattcggcctgaagctggaatcggaggactatgatacgatttccggctatctgctggagcagttggggtatattccggatgagaaacacaacggatcggtagaggctttcggctggcagttcagcgcggccaggacagaaggaaaccggatctgcagcgtatgtatgaagcggccggcttccgaaacagaaaacagagcggagtctgttccggcggaaaaataattcaggtcgggcagcatctttttataaatgagcagagttcggaaagattcgtcagatcggagtgtgagtcttggatagcgccgcggcagctgcttaggctgctgtattccagtgggaaatagagaatttctttaatgcccaagcggcatttgccgtcaggaggcagaggggatgccggcgttatacaacagcggattttcattttgtgatttgaagatagacgtaaagatatcaaaaccgccggatgatttccggcggttttatcgctttaaagaaataccagctgcatcagaaaaggtaagattgcatataacacagccgatatttgatattttaataacaatgtgttatgatttgtatatcaagttgtttatgccggcgggactgttgttttagcccctgtttttgtccgtctggtatccgcgccggaaaaattagttggaatagaaatgagaagaagataagttatgagaaaatcaaaagaagacacgcagcttacaagggaaaaaattatcgagtccgcatttgaaagtttttttgaattgggttatgcggaaacatcgctgtctctgatcgctgaaaacgcagggatgacgagaggcgctatttactggcattttaaggataagaacgaactctaccgggaagtggtcaaaatcgcggcggaaaaggcagatgtcgtaaaatttgcctatagcctgtcggaggatttatcctataaggagcgcatgctcagtctgttcctgttttctcagaataatcgatatgtggattttatctacaagacgatcaaccagatttcggtctataaagaatttgaagatctgtttgagatgatcaaattgaacaaaattaaccttttcaggtattttgtggaagagacgagaatgcatatccgttcggagcatattcgaaacgtcatgctgccggaatattatgcttccgatttatatctgatttttgaaggtctgtttctgaccaaaaatgttcccatcggcctgatctgcgacagagaacatataagacaatatatcgacctcgttttaaaagatctgtgattgcggcggtccttcccgatgatttcgggaaggatatttttttttctgcaggaaataatgaaaatgtaagaaaggagaaatgccattatgtttaaacatgaaaaacaattatttcacccggtagcggtggaacgtccgaatcctcagtacgccgtgctcatgcaggaacagctggggggaggaaacggagaactgaaagcggcgatgcagtatatgtcgcagagtttccgcatcaaagatccggagatcaaggatttatttctcgatatcgcagcagaggaattaggccatatggaaatggtggcgcagacgatcaatctgctcaacggtcacgatgtggatgcatccgccgtaggagcgggagaaattcagtctcatgtcattctcggcctgaatccgggcctgatcaattcgtccggctattcctggactggggattatgtgacggtaaccggcgatctgtgtgcagaccttctgtccaatatcgcttcagagcagagggcgaaggtggtgtacgaatatctctaccgccaaattgaggacaaaaaagtcagagagacgatcgacttccttctcaacagggaagaagcgcataacgctatgtttcgcgaagcctttaacaaggttcaggacaccggttccaaccgtgacttcggtacgactcaggcggcgaaaatgtatttcagtatgtccagcccgtcgcctgcggattccgtatttcctcagactcgcgtgactccgccgtcatttcagtaaagtgcggcgttcggagtctgtctgatcggatcgtctgcgtagaaaggaccggatgtgattttattgcagatgaagctgtccggcgttccggcggaggaattgaaaaaaactgacctgattaaaaagtcccggtacagactgttttgttctgcaccgggattttttcgtcttttttatctgtcttttaatgaaacatacaactgcggtgtcttgacgcactgataagcgggacgcatgatacggccgctgcacgccagctcttcaatacgatgggcgcaccagccggaaatccgcgcacaggcgaagatcggagtggccagatcaagcggaatattcaacgcgttgtagacgaaaccggagtagagatccacgttggccggcagaataatatccaggccggtggcttcggagaatatttgggatcctttggtctcgataaaatcatagagcataaattcatccatgagtccgtttttttctgccagcgtgcgagccatctttttcagcagctgggctctcggatcgctgacggtatagacagcgtgtcccagtccgtagatcagaccggtgccgtcgttggcctccccgcggatcaccttgtagagatacttttccacttcgttcagatcagtgatgtcagatacgttttctttcagatctctcatcatatggatgaccgcgagattcgccccgccgtgtttcggacctttcagagaacctatggcggctgagatggcggaatacgtatcagtaccggtcgaggataccagatgagtggtgaaggtggaattgttgccgcctccgtgctctgcgtggagaatcagggcgatatccagcaggcgcgcttccagatcggtatactcgcccatcggacggatgagacggagaatgttttccgcggtggacagttccggaagaggataatgcagatgcaggctttgattttgaaaatgagagcgctttgcctgataagagtaagccgcgatggtagacagacaggaaatcagatgaatcgactgccgcagcacgttgttcagggaggtatcctctgctttttcatcgaaactatacatggagaggatgctccgcgccatctggttcatgatgctcggagagggattggccatgatcatatctctcgtaaaagtgggaggcaattctctcagccggcccagaagtgtcgcgtagtcttttagctgctcctcctccggaagttcgccgaacagcagaagataactggtctcctcataaccgaagcgcttctcccggatagaggcgtttaccaggtcttccacatcgattccccggtagaataatttgccgggtaccgcgattttttttctgttttcgtcgatatcgtagcctctgacatcggcgatatgggtaagtcctacgcggactccggttccgttcttattgcggagtcccatttttacatcgtatttatcgtaaaatgacttgtcgatatcattatttttgtgaagaagaggtgcgacgcgggtgataaaatcccgctcgagaacccgtgtatcgtccggcagacatgccgttatatcgcggcctcctggaaattctgtgcttaacaatacttctcctcctttcgcgtgtctggaatactaaaatgtataaatgtatgaattttattatatcgtatacaattgaactgcgcaatagaatctgctgttccctgcgcttttccggaaaaaagagcaggcggaagcctgctctgatgccgcagaatacaagatccgcggatgatattcgattagagattcaggagctgttttttcttggcgtcgaattcctcttgtgtgatgatttcgctgtccagcagttctttgtatatcttcagttcttctgcgatatccagacttgattttggcgcgggagagtctgcggactctttctgcggagtcggctgagaatccgtagcgctgtccggagtctgccgaaaatccggcgaaccggatgcggtctgcgcctgtgcggtcgtttctttcgaagcatgtgcaaagccggtgaagctgccggatgtatctgacatctgctgaaaacctgccggactgctcggagtctgatgaaaagacggctgtctgccggcgccgccggtttcgatgtcgatgatggcattgagtttttcctgcatcagcatcggagggatgattcccacaaagatcgcgaggatgagacacagtaccgtcagatcgctgctgacgccgcgcgacgccgccagtcggtcgattctccgtgcgctctgataaacccagtaaatcagataaaacgggacgaacatgcagagcagcagtttataggtcgggttgcggtattcttccccttcgactcggttcagatatctggtagtacggtaaatccagatgaaataccagatgccgaaggtgaataggagaagcagaatgtgttttaccagatcgcagtaaccgtcctgcatatggatcggagcgccggttccgtattcataaggcgtctgattctgccggcagccggagtcagcgatgccggatgtatcagacgatgtatcgtatgagaagggagactgttcggcttgaggatatgcgagccacatgcctgtcatcaacagtcccgctgtgagcagaagggtctgcaggatattgaaaaaactgtgataagcgataccgcccatccaaatgcctccggaaaaaacgctgatcagagcataaatcagaagcccgcctgcaaaagagactgcggtcagtgcggccggaagaaaccagatgttctttacgaaagtcttttgcttcggcagacagtcagtaaaggtgcagaccgccagaaagagcagaaaaccgtaagcggtcagcgtgaccagcgcaggcagtatggcgaacaaattgaaatgttcgaagactccgctgaaataactgtatgttcttacacggtaagtgacggtagaaaatccctgaaagaaagagatgagttttgaaaatgccagtaaaccgattccgacgattggaagaaaatcgcgtttttccatgaagagagccgtggctgtcactgcgtagccggctaacaataataccgcggcgaacgaaaagaaccggatcagtgtaatgagctgaaatagtgtcaggacggagaaaataattccgccgatcagactgtatgaaacactgttttttgttttcatataatagtctccttacaattgtcaagaatagaaagaatacagtaaaagtatcttattctattctccgccggctgtcaataagagggcggatcccgcaggcggggcggacggagaaataattcggaaaaggacggggctgtattttctttccggttttgttataataagaacacttgttccgaatgagtttctatgctatagtttttttgaaacagaaaaggatggaattcccgtcggccgtccgggcgcgggatgacgacggacttgcgggaaggagcggcgtatcgtgcagaccggagccttcaggaggaaagtgcaatggagtttaaattacattcagaataccgcctcaccggtgaccagcctcaggcggtggaacggctggtatcgggatttcaaagcggaaaaaagcagcagactctgctgggcgttaccggatccggaaagacgtttaccatggcgaatgtcatccagcgtatgggaaagccgacgctgatcatatcccacaacaagacgctggcggcgcagctgtacggggagatgaaggaattctttccagaaaatgcggtggaatatttcgtctcttactatgactactatcagccggaagcttacgtaccgtctaccgacacgtatatcgagaaggattccgatatcaatcaggagatcgagaagctgaggcattcggcgacggcggctctgtttgagcgcagggatgtcgtaatcgtggccagtgtttcctgtatctacggcctgggaagtccgtcagagtaccgcagccagatgatttcgctgcgtccgggaatggagacggaccgcagagaaatcatgacggagctggtgcgcaatcagtatacgagaaatgatatcgcttttgaacggggaactttccgggtcagaggcgatatcatcgatatttatcccgcaggcgcggagcaggcggtccgggtagaactgttcggagatgagatcgagtcgatcaaggagatcaatccggtgacaggagagattatcggggtgcggaatcatatctccatctttccagcttctcattacgtcacctcaaaagaaaagacagaacgtgcctgccttaccatcgaggaagagctggaagagcagatcgaggcctttaaaaaggaagggaaattgctggaggctcagagaatcgagcagaggacgcgctacgatatcgaaatgttgcgggaagtgggtacttgcaaaggagtggaaaattattccagacatctgaccggactgccggccggcatgcgtccttacacgcttctggactattttccggaggatatgctgattatgatcgatgaatcccacgttatgctgcctcagctgcggggtatgtacgcgggcgaccgttcgagaaaacagtccctggtggattacggttttcgcctgccgtcggccctggacaatcgtccgctcaattttgcggaattcgagggaatggtggaccagattctctacgtcagcgctacgcccaacgattatgaaaaggaaaagagcgattatgaagtggtggagcagatcattcgtcctacaggacttttggatccgccgatcgatgtgagaaagacagagggacagatcgacgatctcatcggagagattaatcaggtcaccgcgcggggcgagcgggttctggtgacgacgctgacaaaaaaaatggcggagagcctgacggattacctgaaggatgtggggatcagggtgaaatacctgcactctgaaatcgatactctggaacgcacggaaatcattcatgatctgcggatgggcgtctttgacgtattggtgggcatcaatctgctgagagaagggctcgacataccggaggtatccctcgtagcaattctcgatgcggacaagcagggctttctgcgcaatgagacgtcactgatccagaccatcggaagagcggccaggaacgagcacggacgtgtcatcatgtatggcgacgccgtcagccctcagatgaaaaacgccatcgaagtcaccgagcggaggcggaagatccaggataaatataacaaagagcacggaattacgccgaaatctgtgacaaaatcggtgcggcctgcggtcaaagcgacggaagcggcagaagaggcggatatctatatgacggaccgcaagccgtcggagatgaccaagaaagaacgaaaagagtacatcaaaaagctggaagaagaaatgcgcgcggctgcggcggcgctgcagttcgaacaggcggctaagctcagagaccggctctttgagctgaaggtcatgctgtaaacaatgcgtgacgcaatcggcacatcgcataattacgcgggcgattatcggggaagatgcggaacgcagacggatagttcggcaaacggatcgtaaaaataaatgcctatcgtgcagagacgatgggtgaggacgtctgccgtacgaatatgataagaggaaaaaccgggaaaagacaggagtattatatggcaggaagcagtacagaacagattatcgtaaaaggagccaatgaaaacaatttgaaaaatgtagatgtggttattccgagagacgaactggtggttatcaccggtctgtccggttcgggaaaatccacactggccttcgacacgatttacgcagagggacagcgcaggtatatggagagcgtatccgcctatgcccgtcagtttctgggacagatggagaagcccaacgtggaatacatcgaaggtctttccccggcgatttccatcagccagaagaccacgtcaaagaatccgcgttcaatcgtaggaacggtgacagagacatatgactatctccggctgatgtatgccagaatcggaattcctcactgtccggtctgcggcagggagatcagcagccagtccgtggaccagattaccgacgcggtgctctcctacccccagggcacaaaagtgatcgtcgtctctccggcggtgcgtcagcagaagggcgagcataaaaaactgctggagcgcattcgtaaggaaggttataaccgggtcagagtggacggtgaaatttacaatctttcggaagatgagataaaactggagaaaacctataagcataccatcgaagtcgtcatcgatcgtctcgtcgtaaagccgggagtggagagccggctggcagaagcggtggaactggcgcttgaggagggcgacgggctcgttattctcaatataaagcagccggaagaggaagaagctttcgaccggctgttcagtacgaaatttgcctgcccggaccacggcgcggcgattacggagatggaaccgcggaccttttctttcaacagtcccttcggcgcctgcccggactgcaacggcctgggatttatccagcagatcgatcccgatctcatcgtggaagacaaaactctgagtctgcaggacggcgctctgggaaaaacgtttaatgcgtttgacgagatgtcttattattccaaaaccatcggcgctttagcggaagatcacggggtggatctcagtctgccttacgaagaactgccggaggcttttaaggaagagctgatgtacggcaccggaggacggaagatcgagtatgtctacgagagccgcagttccggtacggtgattcatcgaaaccagaaatttgaagggattgtcccgaattttgagagaaggtatcgtgagacgcattcggattatgtaaaggaaaagatcgagaaatacatgagttatcgtccctgcacgacctgcagaggagagcgtctgcggccggaggtgctggcggtaaccgtaggcggcatcaatatcatggaattctgtcacatgccggtgcgggattctctgaagtttatcaaagaactgcagctgacggaaaaagagcagatgatcgcggcgcagattatcaaagaaatccgcagcagactgcagttcctgtccgatgtggggctggactatctcacactgtcccgctcgtcggcgacgctgtccggcggggagtcgcagcgaatccgcctggctactcagatcggttccggtctggtaggcgtcctctacattctggacgaaccgagcatcggactgcatcagaaggataacgacaaacttctggcgactcttcgccatctgaccgatatcggcaatacgcttctggtggtagagcatgatgaagacacgatgtatgcagcggatcatattattgacatggggcctgcggcaggggttcacgggggagaggtcgtagctcaggggacggtggaagacatcaaagcctgcagggaatcgctgacgggccagtatctcagcggagtcaaaaaaattcccgttccggcgcagagaaggaaaggaaacggtgagtttatccgcatcagaggcgcggcgcagaataatctgcagggagtcgacgcggatattccgctgggcgtgatgacttgtgtgacaggcgtttccggttcgggaaagagcagtctggtcaacgaagtgctgtacaaaaatctgacggtgaagatcaaccgctccaagatcaagcccggaatgtgcagatcgatttccggaatcgaacagatcgacaaaatcatcaatatcgatcagtcgcccatcggaagaactccccgctctaatccggccacatataccggtgtgtttacacatatccgggacctcttcgctcagactcaggaagcgaaaatgcggggattcggcaagggacggttcagctttaacgtaaagggcggaaggtgtgaagcctgctccggagacggtatcgtaaagattgagatgaattttctgccggacgtctatgttccctgcgaagtctgcaaggggaagcggtacaacctggaaacgctcgaggtgaagtataaagggaagagtatttttgacgtgctggatatgaacatcgaggaagcgctgagcttctttgaaaatataccggctatcgcccgccatatgcagactctctgcgatgtaggactgggctatatcaaactgggccagccttctacacagctttccggcggcgaggcgcagcggatcaaactggcgtctgaactgtcgaagagaatgacgggaaagaccatgtatatcctggacgagccgacgaccggccttcattttgccgatgtggaccggctgatccaggttctggagcgtctggtagacgcggggaattcggtggtggtcatcgaacacaatctggacgttataaaaacggcggattatatcatcgatctggggccggacggcggagaccggggcggcaccgtagtcgtcaccggtacgccggaggaggtggcggcctgtgagcagtcctataccggtcagtatctcaaaaaaatgctgtaaaaaggtgttgtaaaatagccgaaccccgaatcggcacagagggggaaagcgaatcggcttggacttgtttcgcacagaaaagaaaaaatatcagatcatgatcaataattcctcttaggcaggccgggcgaaaagctctttctgcttaaggggtttttttatggtgtttctcctgtttttcggagaaactctatggcactatttccggcagagtcagaaaggagtacagcagctctccgccgggagaatgcggagcctttgaaaaacgtgttaaaactatatcaaaacttgcaattgtccttggtttggcagataatatgggaagaaaatacttttgctcagcgggacgcgcgcattttcagggccgcatcctacggcaggccgggctgcagccggccgcagaacggagaatatcgatgaatcatcatgctgaaaaaaacttcaactatacgatgctcaccgacttttacgagcttacgatggccaacggctattttgaactcggaaaaaaggatgttatagcatatttcgatatgtttttcaggagagtgcccgacggcggaggctttgccatcatggcgggtctggaacaggtggtggattatcttcagaatctggaatttaaagacgaagatatccagtacctcagagcgaaaaactgcttcagtgaagagtttctggagtatctcagaaattttgaattcaagtgtgacgtgtgggcgatcccggaaggaatgccgatcttcccttatgagcctgtcatcactgtccgaggccccattatacaggctcagtttatcgagacctttgtgctcatgtcgatcaatcatcagtcgctgatcgctacaaaagcggatcgaatcgtgcgcgcggccgcaggcaaggcggttatggagttcggctcgagaagggcccaggggactgacgcggcggtcttcggcgcgagggctgcttatatcggcggctgcgtgggaacggcgtgcacgatcgcagagcagctctttggaattccggcgatgggaacgatggctcacagctgggtacagacttttgacagcgagtacgaggcgtttataaagtttgcagagctgtatcctgataactgcgttctgctggtggatacttatgacgtgctgaaatcgggcgtgcccaatgcgatccgtgttttcgatgaaaagaaaccggccaacaaagggattcgaatcgacagcggagatatcacctatctttccaataaagccagaaagatgctggatgaagcggggcacgccgattgcactatcgtggtgtcaaattcgctggatgaatatatcatccgcggcgtcgtaaacgagggagccagcatcgattctttcggcgtaggcgagcgtctgattacagccaagtcccatccggtcttcggaggcgtctataagttgaccgcgatcgaagaaaatggcgagatcgttccgaagatcaaagtcagtgaaaatatagagaagatcacaaatccgggttacaagaaagtctatcggctttacgaaaaggataccggtcaggcgatcgctgatctgattacgctggctgatgaaaagattccggaggagccctttgaaattttcgattcagagcacgtttggaagcgaaagaagatcgaaaattgcgagtgcagagaacttcaggtacagatttttgataaaggcaagctaatctatgatctgccttctctcaaggagattcaggcgaaatgccgcagcgagatcgatctgatgtggggagaactgaggagatttgaaaatcctcacaaatattatgtggatctttcccaaaagctgtgggaactgaaaaacagactcttgaattcgaataaaaaatattgacagcagacagccggtctggtgcggttttttatccgcattcgccggctgatattttttcggcgcgcagcgtgggggacggtaaaaagcggaaaaaggctgtctctttgcagagacagccgaaaaacattttattttactttgatctctctgatccagccttccggagcttcgatatgtcccatctgaataccggtgagtgtttcgtagagcttctttgtgacgggacccatttctttcattccggcagggaatgaaatttcgcgtccgtgatcgtagatctttcctaccggagagatgacggcagcagtgccgcacaaaccgcattcggcgaaatcttttacttcgtcgaagtaaacttcgcgctcctcaacttccaggccgagataatctctggcaacggtcatcagagaacgacgcgtgatggaaggaaggatgctgtcggacttcggagtgacgactttgttgtctttcgtcacgaagagaatgttggcgccgccggtttcctccacttttgtccgggtggcggcgtcgagatacatattttcgtcaaagccttccgcatgagctgtcatgatagcgtgaaggctcatagcgtagttgagtcccgctttgatatgacccgttccgtgaggagctgcgcggtcaaaatcgctgactttaattgtgatcggttttgcgcctcccttaaaataaggacctaccggcgtgcagaagattctgaactgatattcctctgcgggttttacgccgatcaccggattagacgcgaagatatacggtctgatatataatgtagctccggaaccgaacggcgggacaaaagccgcgttggcggctactacctgatcgatggcatccagaaatttttccttagtgattgccggaatttccagtctctcggaagaagcgatgagacgctccgcgttgagatccggacggaaagtgacgattcggccgtcttccgtcgtataagctttcagaccttcgaagaccgtctgagcgtactggagaacgccggcgcattcgtttattacgacattggcgtccgatgtgagaccgccttcatcccaggcgccgtctttgtaattggacacataacgcagctctgtctgctggtattcgaatccgagatcggaccagttgatgtttttcttttccatatgaatcaactcctttatttgaatgtgattgtgagtacatggcaatggaattacatctgcaaattcccgttttctgtccgaaatctccccggacagaggtgaaacttcggctgaaaccgtaaaaaacgatgaaaacagggatgaaaatgtaaattacgtctaattatagaactcaccttttgcgctgtcaagcttgcagcggggacgccggcggaaaagaacagaaggagagacagaaacaggtaaatacgcgttttgcgttttacatatacgcggctttgcgtcgcggcggcgtggttttcttcggagggcgatactccggtgaaaatcacaaaaaactgctgtatacaaaatgcttacaggcattgcgttgaaaaactctgctgaaagtattaatatacaacagattacagatttaatcatatctgaaaaaggaggtgaacttattgactttaggtgaggaattgcaagaaaaactggcaatcgaaccgatctggaacatcccgctgggaaatatcgacattccgattaccaaaggtgttgtggcgacctggggtgttatggcgtttcttgtcatcgtatcgattatcttcacgagaaacatgaagataatcccggggaaaaagcaggccgctgtcgagctggcgataggcaagctgtacggcgtgttttacaatatcctcggcgaaagaggaaagcgatatattccttatctgctgacggttctgctgtatctgggcgtatccaatatgctcgggctcatcggagtcgctccgccgacgaaagagctgaacaccaccgcaggtctggcgatcatgagtatcgtactgattcaatatgcggcgattcatcagcgcggcgtcaaagggtggctgaaacatttcgctcatccgatgggcattatgctgccgatgaacattttagagctgttcatcaaaccgctgtcactatgtatgcgacttttcggcaacattctgggcgcatacattatcatggaactgatcatattctgcattccggcagtcgtgccgctggtattcagtttttatttcgatatcttcgacggactgctgcaggcatatgtattctgtttcctgacatctctgttcattcaggaagcggttgaggattgatgaaggcagaacagcagaaacaaaaagatctattttttcagatgaagatcggcggctgccggaagaatttcggcggtgaagatcactcagatttttagtcatttttctaagtcattattttcaataggaggataaaattatgacaggtttaatcgctataggtgcaggcattgcagttttaacaggtattggcgctggtatcggtatcggtatcgctacttctaaggctacggaagcgatcgcaagacagccggaagcaaaaggtgcgatcaacagtactctcatcctcggctgcgcgctggcggaagcgactgctatttacggtctcgtagttgcgctcgttatcatcttagtgttatagcaaaccgggactactgacaatttggaggctgaagaatgctcacattagactggggcataatctggactgttgtcaatattctcattctctttgttcttctcagaatttttctgtttaagccggtcatgggcatgatcgaaaaccgacaggctatgatccggaaccagctcgacgatgcggagaacaaaaacagagaggctgacgaactgaagggccgttacgaggaatcgctgaaaaatgcgaaagaggaatctttccagatcgtcaacgatgcaaaggaacgggcgaaggtccagtatgcacatattatagataaggccaatgaagatgctgcacagatcaaacagcaggcggataagtctgcggaagccgaccgggagcagatgatgcgcgaggcacaggcggaactcgcccaggtggctctggcggcggcatccaaactgatcggaagcagcgtggacgcagaggccaacaaaaatatgcttgatcaattcttatcggaagaggggtcacagaaatgattgatttacccttaaactatgccagagtcttatatgatatgaacatagatccggagaatctgaataaggcaagaagtctgctgacagaatcgccggagcttatggaagcgctggtaaatccgctgatccgcaaatcggaaaagagaaatgtcatcgaaaaaatatttcccgaatctctttggagttttgtcaaggtgatgagcgacaatgatgatacggcgtgcgctccgcagatgtttgaggcgtatgacagtatcgtgcgtgaaagggaaaacacgatcgaagcggtatttacatatgtgacaaagccggatgacgctcaggtcgaaagcctgaaggccaaaatcgctgcggactgggggaaagcgaaggtggaactccgactgcaggaagacccttcgatcatagggggctttgttctctcggtaggagaacaagtctatgatcagagtctacgaacttcgatggcaaagatgaagcgtcattttgcagagaggtgagaagttgagtaacataaattcgaaaggaattatttctgtcttaaagagtgaaatagaaaattatgacagtaaagtgcaggtggaagagaccggcagagtcatcagcgtaggtgacggtatcgccaatgtctacggcctgcagagcgtgatgtacggcgaactggtggaatttgaaaacggaacgtccggcatcgcgcagaacctcgaagagaaagtcatcggatgtgtattgctgggatccgatcacggcattgtagagggaaccgcggtgaagcgcacgggccgccaggccggcgtagccgtaggtgagaagatgatcggccgtgtggtcgacgctctggggcatcccatcgacggactgggtcccatcgagactgacgattacaggcctgtggagcacaaggctccgggcgtaatcaccagaaaagaagtgtctcagccgctgcagacgggtattctggcgatcgattccatgttcccgatcggcagaggccagagagagctgatcatcggtgaccgtcagacgggtaagacggccatcgccatcgatacgatcatcaaccagaagggcgaagacgtgatctgtatctatgtagcgatcggtcagaaggcgtctaccgttgcaaagacggtgagcacactgaaaaagtacggtgcgatggaatataccatcgtcgtaaactctccggccagcgaacctgcgcctctgcagtatctggcgccatataccggagcggccatcggcgaacactttatggataaggcgaaggacgttctcatcgtgtacgatgatctgtccaaacacgcgcaggcatatcgcgccatgtccctgctgcttcacagaccgccgggccgtgaagcgtatccgggggacgtcttctatctgcactccagactgctggaacgtgcatgcagaagagctccggaattcggcggcggttccatgacggctttgccgatcatcgaaacgctggcaggcgacgtatccgcatatattccgaccaacgtcatttccattacggacggtcagatcttcctggagacagggctgttctactccggcgtgcgtccggcggtcaacgtaggtctttccgtatcccgagtgggaggtaaggcgcagacgaagatcatgaagtctgtcgcgggctctctgcgtgtggatctggcgcagtatcgcgagatggaagtattcacgcagttcagctccgatctggacgatgcgacgaaggagctgctggcccacggcaagagtctgatcgagctgctgaagcagcctctgtatcatccgatgccgctctacaagcaggtgattctgctgtgcgcggcaaatgcgaagctgcttatcgatcttccgattaaggaaatcgaaccgtttaagaacggtctcatcgaatatttcgaggcatctcatccggagattatcagcgaaatcacagagaagcaggttctcacagacgagctgaaagaaaatatcctgactgtgatcaaagaatataagagtaggtgatttcatggcaaacatgagagaaatccgcacgagaatcgacagcgttaaggatacgatgaagatcaccaacgcgatgtatctgatctcgtcctccaagctccgaaaggcgagaagcggcagagacgcggtatctccttatttcgagagccttcaggcgacgatatcggatattctggatcgttctcccgatctggaggggacgctttttgacgcctcttctatgaaagaaaaagaatccgaagatgtaaagcgctgttttatcatcatcacttccgataaaggtctggccggttcgtacaatcacaacgtgtttaaattagctgacgaatatatcgccggagggaaggataataccatctgcgccatcggttatatgtccagaaactattatctgaacaacccgaaggtaaaaatcgatgacgaatttgtctatccggcagccgaaccgacggggtatcgcgcccgggggatggcggagcacgttatcgaaaagtttgaaaaagacgaattcgacgaag

SEQ ID NO: 2450 - DNA, 2944 bp, Unknown
  16S sequences of unknown bacteria
tatatggaaacaagagtcgccgtgatgggcataatcgtcgagaacaccgactcggtcggggctctgaacgagcttctgcacgagtcgggaaagtacataatcggtcggatggggataccgtaccaccagagggggataaacatcgtctcaatcgcgatagacgcgccgcaggacgtgatctccgcactcgccgggaagatcgggaacctgcccggaatcagcgtcaagaccgcgtactcgaatctcacgggtgaaaagaaatgacagagcgcgccatgctgtccctcctgtgccttgacgccggggagaagctgacgggggaggaataccggcgcctgatcgaagacgccgacgacgacacaagagagcttgccgcgaagctcgccgtgaagaagcgcgaggcgatatacggtcacgacgtctatgtcagagggctcatcgagatcgggaacgtctgccgcaacgactgtctctactgcggcatcagacgctcaaaccggaaatgcgacaggtatattctgacaaaggagcagatactcgactgctgtacgaccggttatgagctcggcttccggacgttcgtcatgcagggcggggagggcgtgattccggttgatacggtctgcgggattgtttcggagatacgggagaagttcccggactgcgcgataaccctctcgctcggcgagtacccgcgcgaggactacgcgagaatgcgcggggcgggcgcggacaggtatcttctgcgccacgagaccgcggacagggcgcattatgagaagcttcatccggaagggatgtcgttcgacaacagaatgcgatgcctgagagacctcaaggagctcggcttccaggtcgggtgtgggttcatggtcggctcgccgttccagactccggagtgtctcgcggaggatcttgaattcatcgcggatttctcaccggatatgtgcggcatcggtccgttcattccgcataaggacacgccgttccgggactgtcccgccgggacgcttgaaatgacgacgtttctgctgtcgctcatcaggctcataaagccgaacattcttctcccgtcgacgacggcgctcgggactatagacccgctcgggcgggaaaagggaattctcgccggcgcaaacgtcgtcatgccgaacctcagcccggtcgcggtgagaaagaaatacgagctttacaacaacaaaatctgcaccggtgaggaatccgccgagtgcaggaactgtctctccatgcggatgaagtcgatcggatacgagatcgtgaccgcgcgcggggatataaggaaacactgatttaaggttgctttcacagaaaaaagtccataaatccaaggcttttttctgtgaaagcccgaattattcagtgtttccataaaaaagtaaatattttatctgacgggaaagttgattctgacccgcaagaaaggacaaaacaaaatggcagtctacaatccgaaatccctccacgcggaggagttcatcaaccacgaggaaatcctcgaaaccctcgagtacgccgacaaaaacaagcacaacgaagccctcatccgtgagatactcgagaaggcccgcccgagaaagagcgggaacgagacgaggtgcgccgggctctcacaccgcgaggcgtcggtgcttttagcgtgcgacatacctgagctgaatcaggagatgtaccgtctcgcggaggagataaagctcgcgttctacggtaatcgcatagttatgttcgcgccactctatctgtcgaattactgcgtcaacgggtgtctctactgtccgtaccactacaagaacaagcacataaagcgcataaagctgacgcaggagcaggtcgcgcgcgaggtcgtcgccctacaggacatgggacacaagcgccttgccatcgaagccggagaggacccggtcaacaacccgatcgagtacatactagagtgcataaacacgatttactcgataaagcacaagaacggcgcgatccgccgcgtcaacgtgaatattgccgcgacgacggtcgaggagtacaggatgctgaaggacgccggtatcggcacgtacattctgtttcaggagacctaccacaaggagagctacctcgagctgcacccgaccggacccaagcacaattatgattaccatacggaggctatggacagggctatggacggcgggattgacgacgtcgggctgggcgtgctgttcggacttgataagttccgttatgagttcgccgggcttctgatgcacgcggagcaccttgaggctgtccacggcgtcggaccgcataccatcagcgttccgagagtgaagaaggcggacgacatagacccgacggcgtttgacaacagtctgaccgacgagttgttctgcaagatcgcggcgtgcatacgcatcgctgtgccttatacgggcatgatcatctctacgcgcgagaatcaggcggtcagggagaagatgctgggtctcggagtgtcgcagataagcggtgcctcgagaacgtcggtcggcgggtactgcgaggaggagagaccgcatgactcggagcagttcgacgtctccgaccagaggacgcttgacgaggtggtgaactggctgatgcggcttgggtatataccttcgttctgtacggcgtgctatcgcgaggggcggacgggcgaccggttcatgagcctgtgcaagagcgggcagatacagaattgctgtcatccgaacgcgctgatgacgctcgccgagtacttgaccgactacgcgacagaggatacgaaaaagatcggctttgagctgattgcccgcgagctcggcaatatcccgaaggaaaaggtccgtgagatagcgagagcgaacattaacgccattgagacgtcaaatcgccgcgatttcagattttaagaattgtataaagcttttgaaaaggaggggggcgggggggg

SEQ ID NO: 2451 - DNA, 7202 bp, Unknown
  16S sequences of unknown bacteria
ctgccgcaaccgagatggagcgcttcatccagacggcgcaggaaaagacggggctcgtgcccgaggtcagtgcccccacgcagcccaaagaggagcatcggggagccaagtcggtagccgggcagcgcgccgcggcgggcaccctgttcgacgaggcgatgctcgcccagctcaacacggtgttctcccgcatggaaaacccgctcgtcctcaagctgtccttgaacgagctgcccgtcgccgagacgctgcgcacgtacatggaggagctcgcgaagctgaccgacaagctcacggtcgagctcgtcgacgacccgcagggcgaagacctgcccaaggtcgaagtctttagggaagatggcagctggaccgggctcgcctaccacggcgcacccggcggacacgagttcaccccgttcatcctggggctctacaacgcgagcggccccggccaggcagtcgacgaagaagaccgggcgcaaatcgacgccatcgaccggccgatcgacttcaaggtcatcgtcggcctgacctgcacgatgtgcccggagctcgtgacgtccgtccagcgcatcgcgacgctgaacgacaaggtgaccgcgcaggtctacgacgtcgcgcactttcccgcgctgcagcagcgctacgacgtcatgagcgtcccctgcctcgtcatcaacgacggcgagcgcgtcgagttcggccgcaagaacgtcacacaggtacttgagctcttgaagtaataggcgcggtgctccgcgcgggatgtgtggcagtgccacgcatcccgcgttggctgcacgaaagttgtggcagtgccacgcatcccgcgttaaccgcacgggaactgtggcagtgccacggttttcgcgtcagctcttctgccccatcgcgcgggcgaattcgtcgaagaactcgggaatggcaagcccctgcgggcagacatcgtggcatgcgttgcacgcgatgcaagagctcggctgcttgtcgtcgggcagggccttgagtgccatgggggcgatgaacccgccttcggacctcgacaggtgctcgttgtacaggccgatgagatacgggatgtccagcccgacgggacagtagctcgtgcagtaacggcacgcggtgcagggcagccccttcgccgtggccatctcgtgcgcaatctgattgatcgctgcaagctcctcgccgttgaggggcttttcttccgcaaaggtcttgatgttctcgcgcagctgctcggcattgctcattccagagagcacgacggcaacgccagggacaccctgcacccatctgaacgcccactcgctcggagtcacgcccggacgcaacgattgcagaaggtcgtgctgcgagtcggagagctcgcacagatggccaccgcgcagaggctccatcacgatgacgggaatgccgtgctcattgcagtactcgactttccgacgcgcctcctggaactcccagtcgaggtagttgagctggatttggcaaaactccatgtgctcgccgaaacgttccataaagcgaatgaacgtgtcccagcgcccgtggacggaaaagccgaagtgccgaatcttgcccgccttcttctgctcgaggaagtactcgatcgtatggtacttctcctcttgcagatactgctcgatgttgacctcgcatacgttgtgcagcaggtagaagtcgacgtagtccatctggagcttctcgagctgctttgcgaagatctcctcgtgcttgccgaagttgctcgtatcgtacgtgggaaatttcgtggcgatgtagaagctgtctcggtcgtagcgcttgagcgccttgcccgtcacgatttcggaattaccgccatggtagccccacgccgtgtcaaagtagttgacgccgtgctcgatcgcatagtcgaacatcgcaaacgccgccgcctcgtcgattttggagctgtccccctcgagcacaggaaggcgcatcgtgccaagcccgagcatggaaagctcgaggccctggaaatcccggtacatcattttcgttcccctcttgctagaagcgcatgcactcgctggcgagcgcctcgaactcggggttgtcgcgcagctcgatgtattcgcagatatcgataatcttttcgatctggtcgttggccgtatcactcaacagcagagcgctcgcgccctcgacggctgcatcccctaccgagaccgtgcgattctgcaggcccgggggcagaatgccgagccgcgacgcattcgtgagcgtgacgcgatcggcgaagcttcccgcgaagacgatcttgcgaatgtcgtcttgcgtgacgccgcgctttttgagcatgagcctgacgccggcggaaagccccgccttcgcatgcaagaacacgcggatgtcgtgctgcgtgatggagataccctcggaaagccggaaacacggctctccgtcttccacgcacaggtacttctccagcccacagctgctcacgcatgcggcttcgggagccgtcagaatcgtcccgtcgggcgtgaggatgttgcagtcgagcatgatggcgagcgcgtccatgaagccgctcccgcagatgcccagcggctcctcgccaccgatgacgctcgtcacgagctgcccgtccacatagcgcaccttgtagatggacccctgatacgcgggggcgccgtacttgatgctcgcgccctcgaacaccgagcccgcggtggtcgcgcaggcgaggatcccatgcttgtcgcccagcaccatctcgccgttcgtgccgaggtcgaggaacagcgtgagctcattcgaacgcgccatgtcgatggcgagcaggccgcaggtgatgtccccgccgatcgtgcccgaaatgcacggcgcgaagtacgcggtgccagccgtgatgtcgctgtcgacgagcgtgaggtagtcgatttcttcgccgaacagcgtcggcggcatgtacggagccacgctcagcgccgtcgggtcgacgtttgccgcgatgagctccatggcggtgtttccgcagatggagatgtcgttgatatccgaaggcgagatgcccgcctcggacgcgagcgtgcccgtcatctcggcgagcacttcttcgaggagctttgccatggtcttcagcttgccctcgacgcacgcctcgatgcgcttggcgacggcggcgccaaagacgagctgggggttggcgcggcgcaccgtgttgatcagcttgccggtctcttggttgtacaggcggcagacgatggtggtcgtccccacgtcgatggcaaggccgtagccccacccctgcccatcggagcgccagacgggggcgagcccgcgggtcgtctcgccgatgtcgcgcgtgcggacgctcgcgacctccatgccatcggtcacgggagtctggcacgcgagagtgtagaacagccccctgccgtccttgatgaagacgtcgcagtggcagcattcgccacgcccattgcaggtgccgcccgggttgatgccacacgacaggagcgcctcgcgtacggtgctgccctctggaacgcttatcgtctttctgtctccagattctcgaacgataagattcatggcgtgatcgtcagcctcccattggcataatcgtctgacatagacgttggtcatcgtgacttgtcattttggaacaagatgacgcctgtagccaacgaataccggggaggaattctggtagcggtcgattcgcgcagacgaagcagcctagaggatgtcccgcagggcatcgaagcgctcggggtgggcgaacacgaggccatcttgcccgaggcgcgcacgcacccgatagcccccgcagttgccgacctgccacgagaagtagcggaactcgtcgtcttgcgcgccgcgcgggacgaacgcctcgagcgcggccatgatggtgccgccatgggcgacgatcacagcgctttggctgccctgcgcggcagatgagacgacgatgtcttccacgcttctcgatacgcggcagatgagctgcgcgcgcgactcgccgcccgggcacggcagcgtgcagttgctgtcgacccacctgcggtagtccgcatcgtcggccatatcgtcggcactacgcccctcgaacgccccgaagtccatctcgcgcagcccatcgcagaccacctgcctggcattcggaaagcagatgcgggcagtctggcgcgcacgcagaagcgggctcacgtagacgagcccgcaggaatcgcagatgcccgagcgccgcgcgtcggatatgcccgcatcgctcagggcaacgtcggtcgagcccgcgtagagatggcgttcgttggcgctcgtgcggccatggcgcagcaacgtgagctgcaggtcgaacggcatctagcccacgcgcctcgtgggaagctcgcctttgagcgccatcgggataccgcagacaacgcgcacgacgcagtccgccttgttcgcgagcttgttggtgagcctgcccacgcgctcgcgccattcgcggtcctcgctcgaggcggggacgacgccgcagccgacttcggggcagatgaccacctctttgcccgcgaactgctcgagcaggtcctcgtcggttgccccgaggaaaatcgagtcctggatgttgtagatgacagggcacgggtcgtcgggagagtcggagaactcttcctcgccgtatcccaaagagcggacccacgtcttcttgccggaggcaatccccccgatcacgactatcaaatcaagttcaccactttcggcacgacaacaaggcacaggagcaacgcgagctcgcatacctgcaagaaaaatcccgcgatgtccccgctccagcccccgaactgccgacgggcaaacccgtggaccaaagcaagcaccagaagtgcaatcaccatcatagcagccaaaacgacgccgtcgccgagaaccgccgtcacgacggcgcaggcgagcgcctcgatcgtctgcacgatgacgcagacccgcttggacgccgagagcctgaagctcgcgaccatgccctcgtcgctgctgcccgcaaagcagatgctcgcgatgccgctcaagcagcgcgtgagcacgtagctgcaccccaggcaggcgaacagccgcggcgtcggctcgagcgaggcggcgcacgcgaagtagacgatcaggtaggccgcgacggccatgcccgcgaacgcgcccgtgtgcgggtccttcaagatctcgcgcttgcgcgcgggctcggtgtggctcgactgtgcatcgaccacgtcggaaaagccatccaaatggatgccgccggtcacgagcaacgggatcgcgacaagccccgcgccaaagagcaggcttcccagcgagagcccctcgcacacgagcccccacacccacgcgagcagtcccagcacgattccgatgaggggaaagaagcacatcatgtagcgcatgcactccggacgccagtcgattttgggcatggggatgcgcgagaacgtcgagaacgccatgacaaacgagcgaagggcgttcacgagagctcccccttgaggacgcgcggctggcctgccgcgacttcgaccacgacgtcgctcatgctggcgagcgcgcacgcgatgctgcccaccacgacctggtacagctgcgtgccgctgtcgtaggacacgccgtcgccacccagctcgttggcaacgatgacgaggttcttgcagcgcttcgcgagcatcctcacgttgaccatgatgtgctcgatcacgtcgtcggggtcgcgaaccgagccatctgcaccgaacagctcgcgtgcgacgaggttgcctaggtcctcgagcacgacgttgacatcgcgcgagtacagctggctgattgccgcctcgagcccgtcgtcgacctccagcgtgatgaagcccttgccggagcgcatgtcgcggtggcgctcgatgcgctgctcggactcgaagtcgacgttctccatggtcgccagatagtatttgagcccggtaaagccctcgaacagcgactccgcgtacgcgcttttgccgctcgcggcaccaccggtaaccagaatcatcattgcggatccacctcgtaggcatctattcccgacgaatcgaacgtgctcccatcgtacagggacagcgccatgtccagcaacgggacgaggcacaccgcccccgtcccctcgcccaggtgcatgccggcatggatgatcggctcgacccccaggcgctctgccagcatgcgcgtcgccggctcggtggagatatgcgagggcaccatcgtctgcgcgcacgcggggcacagctgtgctgcgacgtatgccgccaagatgctgatgaagccgtcgatcacgatggggacgcggtgcacggcaccgccgacgaacagccccacgagccccgcgatgtcgaagccaccgagcttggcgagcacgtcgagcgcgtcgtggctgtcggggccgttgacggcgatggcccgcttgatggcggagaccttgcgctcgagcccctcgtccgaaagccccgcgcccttgccggtcacctgctcgacgggcagcccgagcagcaccgaggcgaccgcgctcgaggtggtggtgttgccgatgcccatctcgccggtggcgatgaggcggtacccctgcgccttcaggtcgcccacgaggtcgatgcccacctggatggcctggcacgcctgctcgcgcgtcatggccggccccacggagatgtctccggtgccccgcgcgatgcagcggtcgaggacgccgggctcgctcggtgccttggccatacccatgtccacagagagcgtgtcgatatggaccggtcggcacatgctgcacaccgaggagcgtcctcgcgcgacgctgtccgcgatgatggtcgtgacctcggagccgcactgcgttacgccctgcgcgacgacgccgttgtcggcgcacatcacgaccacgacgcgcttggacacgtcgacgtcctcgctgccgaagatgccagcaagctgcacgacgatgtcctcgagcttgcccaggctcgcaatgggctttgccaccgcgttccacttgtcgacggcgcgctgcgccgccgcatcgtcgaaaggcgccagctgcgcgttcagtgcttgaaaatcgatcatgagagacgttcgccttccccttcgcctgtcttgcgcgcccctttgcggtagagcacgaccgagaagtagcctcgctcggcgtcgaggtccgcaaaccgctcgcacagctgctcgtctgcaagccc

SEQ ID NO: 2452 - DNA, 32759 bp, Unknown
  16S sequences of unknown bacteria
tcgctcgtcggcagcgtcagatgtgtataagagacaggtacttcttgcggccccggccctccagctctcgctttttgggcaggcggcggtagtcggggcggttatcccggggataggaacggggggcctggctgtagccgcctccgccgcccttgtaggctttggtcacggtggggttgcccccgatttggcagtcggccatggcttccagggtttcgtcaaaccgcgattccgggatggccaccaccgtctcgttgtcgaaaatctcgattttaccgatttcccggccgttcatcccggttttgcccgcgatggccgccacgatgtggttgggggcgatccgcttgtcccggccgatgttgatgctgattttccgatagccgccggccgggcggggcgcgaagcccgaaccataggccggcgctttgatttcctccagcccctggctttcctcgccgtaatggagctgcagcgcggcggcagccacggccgcgggatcgtgcccctgctggatcagctcctccaccagtgccgcgaagggggagggttcctccttcgccagcagttcctccagttcagcgacatgcagccgctgctgtctcatccggatatcctcgggtttggggatatccgcccgggcgatagaggtcttgaccatccggccgatctgcacaagctcgctgacctgccgccggccgctgcagatggtgatcgccttgcccgatttcccggcccggccggtgcggccgatccggtggacataatactcgctgctctgcgggatgtcgtagttgatcacataatcgatgccggtgacgtcgatgccccgggcggccacgtcggtggccaccagaatgccggtgcgcccgtgcttgaagccctccatcaccttagtgcgctgggattgcttcatatcgccgtgcagcccttcggccataaagccgtggcggtcgagataagcggcgatttcatccaccatccgcttggtgttgcagaaaatcatggccagctgcgggttctcgtaccgcagtatcaggttgagagcgtccatcttgcggcccatgggtacgtcgatatacacctgctcgatgttttccaccgtctcctgccgcatttggatctgcaccaagaccggatccttctgataggtccgggtcagggccaggatggccggcggcatggtggcggagaagagaacggtctgtctgtcctccggggtgtcggtgagaatggtctcgatatcctcccggaagcccatgctgagcatttcgtccgcctcgtccagcacaatcattttcaggcgatccagcttcaaggtgccccgccgcatgtgatccatcacccggccgggggtgcctaccaccaggttggcggttttcagccgcaggatctgccgatccatcggcgcgccgccgtagacctccgccgcctggatgccgggcaggaaccgggccagcttgcggatttccccgcaggcctgcaccgccagctcccgggtggggcaaaggatcagcacctgacagccgccgcgcatggcggggtcgatgatttccagcgccgggacgccgaaggccagcgtcttgccggtgccggtctgggaccggccgatgacatcccggccgctctggataaggggaatgctttgggattgaatgtcggtggcggtttcgaagcccagggcctccaccgcccggcggatttcggggattaggtttagctcttcaaagggaatggaattcatgcatgtcctcttttcggtaaaatctggaatgccgcttcgccgtgaaaaaaagcgagactttcgcctcgcttccgtgcacggttttcgcggacaaatgtctttcagctcggttcggccaaaaggtgcaaacaagttattataccacacatatcagaaaagcacaagggattgtgcggaataaaaaaccgcccctttataaagccaacgtgttggagggcggcaggcaggcatgagcccggcagacgtagtaggtggtgcggctgttaagcagcgggtagtccgctgtcggcccgggcagcacccgaacggtcgcataaagaggccgccgatttttcacgctttcccattcgccgtcgctgcccaggacgacggtgaccgagggcggcgggttgtcatgcagcagcagggccagcagaaacaggctgtgccccgccggaaagctcgccgcttcgccggacaggaaggccagctgccgaagcgcggcctgctcccagtcgtcctcctgtgtcagctgggacaggaggacgaaattgaaggccatgacggcgttgccgctgggcagtgcgccgtcataggtttccttgggccggattaccaagcgctcattagcgtcccccgtcaggtggaagccgccggcgtccgggtcggcgaacgaggccgcttgccggcagaactgctccgcccggcgaagatagtcttcctccagcgtggcatcaaacagcatgagctgggcggcggcggagaaggcgtattcatccaggaaaccgcgggccgtccgtttcccctcccggaagctgacatacaggccgttttcatcggacagatgggtatccaggaaccgctgcgccgttttcgcggcgtcgagatagcggggcgcgccggtgatccgatagagaaaggccagtgccgctatcatcagcgcgttccaggcggttaggattttatcgtccaaaggaagggcgtcccgctcccggcggtaagtgcgcacggccggcagcacgtcgtcgaaagcgccttcggggccggtcgggtgcaggcggttggggatgctgcccccttcgaagttcccctgcggcgtgatgccgtaatacgcgttgaacgcccgccctttttcgtctcccagcaaggtgagaagttcgtcgtagtggaacaggtaataccgcccctccacgccgccgctgtcggcgtcctgagccgcgtaaaacgcgccggcggggctggtcatctcccgcaggacatagtccgcagttttctccgcggtgtccaggtgggcagccgagccggtcgccgcataggccgccgcgtaggccaggatcagcagcgcgttgtcgtacagcattttttcaaagtgcggcgcgagaaaataccgatcggtggaataccgggagaagccgtagccgatttggtcaaagataccgccgcggcgcatctgggtcagggtggtttccgccatgcgaagagtgcggtcgtgcgccttcagcttactgtaggcaagcagaaacagaagattgtggggcgtcgggaatttgggcgcgtcgccgaacccgccgtattcctcgtcataggcggcggagaaccacccgaccgcccgctccggcagatcggaatggggagccgcctccccggcgggtggcatggcggacgaaagctgcgccagcgcatcctcggcggagtgcagcagcgccggccggttgtccgcccactgccgggcaatggtccgcagcagatcgcggaaaccgatcagcccgtgccgcgcacgcgggggaaaatacgtgccggcgaaaaagggcttttgatccggcgtcaggaacaggctcgtgggccagccgccgctgccggtaaacgcctggcacaccgccatgtacacgctgtcgatgtccgggcgttcctcccgatccaccttgacggcgataaaatgagcgttgagcaggcgggcggtttcctcatcctcgaagctctcgcgggccatgacgtggcaccaatggcaggtgctgtagccgatgctgagaaaaaccggcttgttttcccgtttagcccgcgcgaaggcttcctccgaccacggataccagtccaccggattgtcggcgtgctgcagcagataggggctcgtctccccgtgcagatgattcatgcgataccagctttcatggaggatttttactagtagtatgcgcggattcgcctgagatatgggcgcggagccgccgcagccgatgaaaaaacaccggatcgctcatggaagaagcgatccggtgtttttttatacggtatgaatgcgatattcgccggaggcggcgggttttacggccaggccgtcgtcgaagacatagcccggctccaaggagatccgcccggtcatgtcggcggggaattccaccgtcaggcggatctctccgccctcccggacccaggaggaggcgattttacccgccggggcgagatggaagccgctggcgctgtccagctgcggcacaaaggaggggcgaatgtccgcttccagcaggctgcggcggtggggattgaaccggatgcccgccagcgcctgaatgaaccagctgctgatgtccccccagaaatggtggttgtgggaggtgacgtcgcccccctcgggctggaaatcctcccacaggctggtggcgccgcgggcgacccagttgccgtaagaggggaaatcgggccggacgatcatattgaaggccaaatcgctgcgtccgaaatcggtcagcacatggaaaattacccggccgcccaggacgccggtgtccatatggccgtcttgttcttcgataaggcggagcagccggtcaaaagcggccggccgctcgccgggctcgaaaaccccgtagaacagggccatggcctgagaggtctggcagttccccgccgccgtcatggtggaaaaatccaccagccgctcccgcaccgcggcgcggaattgggccgccagggacgcggcgaaggtctgttggggcgccatgcccagcacgccgaatatgtacgccgccttctcggcgatgtccatggacagcaccgtgtcggtaaattccagcggcgctttgtactgatcgctgccccgggccggcggacaccagtcgcccaggccgattttaatcagcccctcttcgttcacccgggtggtcaggtagtgcagataccgcaggatggacgcggcgctttcctccaggatcgttttgtcgccccggtacaggtacacgaaatagggcagatacaaaagcacgttatcccaggccgggccgttgccccagtggaagccccagccgccggtgggtacgatgccgggcagcgcgccccggtcgtccatggccttgcagatgttccgcatccattcccggtaactggtttcgggcgagaggttgagcagcagatgctcgctggacaacgcggcgtcggccgtccagccatttttctcccgctgggggcagtcggtagggaagtaatagaagttagccagatccgagcggcgggtcagctcctggagcgtattcactgtgggatcggagcaggtgaagccgccccgctccttcaaatcggagttcatgaccacataggtgagcagatcgggcgtggcctgctccggggtgatgccggtgaccagcacatactggaagccgtggtaggtgaaggagggggtgtaggtctcctctccctcgcccttgcagatgtacacgtcccgatgaaccagggggttatcgccaaaccagatgttgcgcacggtcagcttaccgtcctccaggtattcgccgtggagcagctccacccgctggccagcctggccgcggatggtcaggcggcagacgcctgcgcagttctttccgaaatcgtagcggtagccgtccccctcggggaggatggatatgggtttcagctcgtcggtgaccacgatgggctccgcctcgcagagacgggcctcgccccggggcatgggggcgggcaacgctggctgccagccgctgtcgtcaaagccgggagcgttccatcccggcagctccagccgggcgtcgtagtgctcgccgaaccggtaatcgtcgaacagcaccggggagggcgcggtgcggaaactgtcatcgctttccaacgtccgctccgtcccgtcggggccggtgtaggtcagccggagggccacctggggcgcgccgcggaaccgggccttgtcgaagtcccagatatggccgcccggattgttttggaacccgttgcccagccacaggcccagcacgttctcgcccgcctgcagcgccagctcgtaggaatcgtaatagacgatatcgtcgggattgctgatgtagggggccagcgcccctttggtgatccgccgcccgttgaggtacagctcgtaaaagccgagcgcgccgatgagcagacggccctggcacgcctccttgacctcaaaagcccggcgcagatacggggcgggaaccggcgcctcatgcgtccccgtcacgctggtggcacgaataaactgcataggaaactccatagaatcctctcgctttctccttatcactgtcggctggaaaatgatcccctacatagtagcacagccggggaaaaaagaaaatagccgattttcaccaaaatggatgattttcctgaaaatcgcgggctgcggtcgctcgcgccccgccggcgagggccggacggcctgtgtcgcgccgtcccgccgcttgcattttcgccggaggatccggtatgataagggcaatatgggcaaggaggcggttggcatgacagccggtctggtttcggtttcatttcggggcctgtctcccagcgaggtaatccgcgccgcccgggaggcagcattgacgggcatcgaatggggcgcggacgtccacgtccccgctggggatgtttccgccgccaaacgggtgggcggggaaacgcgggcggcgggcttgcgggtgctggcctacggctcgtactataagccgggggtcagtcccgccgaggagtttgacggcgtgctggccagtgcggccgcgctgcgggcgccggtcatccgggtatgggccggaaacaaaggctccgcctccgccacggcggaggcgtggcgtcggacagcggaggacgccgcgcgtatcgggcgcatggcggcccgggaaggatgccgggtggcgttcgagtgccatcgcaacaccctgaccgacgactaccgcgccgcgttgcggcttatggaggcggtgcgggaggcgggggtcggcatgtactggcagcctgacccgtcgcgagacttggcctataatctggaggccgctcgttccctggctccgtataccgagaatatccacgtgttttactgggaagggccaaaccgctatcctttgaagaagggggtgccggtctggcgggagtacctggcggttttccgggagcggggctgggatgggggctgtctgctggaattcatgcctgacgaccgtccggaatccctgcccgcggaggcggccgtcttgcggcggctgatgaaagaataggagacaagcgtatggaattggtgctgaccggcatccggaaggatttcggcgaaaaaaaggtgctgcgggacgtgtcctgcacctttgaaaagggaaaaatctacggccttctgggccgcaacggcgcggggaaaaccaccctgttcaactgcctggccggggagctggatccggacggcgggacggcccggctgacggaggacggcctgtcccgccccctggacgtggaggatgtgggttatgtcttttccacccccatcttgcccgagtttctcaccggctacgagttcgtccggttcctgatggacatccaccgccagcgggtgctgccggggaaaacggcggacgattacttcgagttggtgcaaatggcgccagaggatcggcaccggctgatcaagggctactcccacggcatgaaaaacaagctgcagatgctcagctttttcatcacccgcccgccgatcatcctgctggacgaaccgctgacctcctttgacgtggtggtggcgctggagatgaagaagctgctgcgggatatgaagcaggatcacatcctgattttttccacccatatcctgcagctggccaccgatctgtgcgatgaaatcgccgtgctgcatcagggggccctggagctggtggatcccgcggccatccacagccccgcttttgaggagaaggttgtggaaatcctgaaggacgagggggacggcggatgaaaccggtgaccaaccgcctgctgcccgttttgcaggcctccatggaaatccgcacggccacgaaagtaaacggatggttatattttatcaaaaaattacccattgttggtaagcgaatacccgatcgggtctatcgctggcagaccttaaaaaccgtcctggcctatatcaccctgccggcccggttcatcggcctgtggttcggaaaagcgctgtatgtgctgctgatggccgcgctgccggctattctggcggcgggggaggaaaatctatcggccgcgtatccctacgcgttgcacgctctggtgtttctcagcctggtgtccggcacctttcagtcccgcgcgctgctgagcagcgatgcggatcgctatgtctgcctgcggttgatgcggctgccgccccggccgtatctgctcgctcagtatctggtggagatcggcaaggatgccgtcggcttcctcccggtgctgaccctgggggcgtttctgctgggcggttccccgtgggacgggctgctgtgcgcgctggaaatcacggcgctccacgcggcgggggaggcggcccatctggcatggttcaagctgcgtgggggcgcgcccgggcggctgggcggcttcaagcttctgcccatcgccgcggcgctggtcctggcctatctgccgctgatgctgggccgggactggggaatcggccggctggcggtcagcctgcccatggtcctcgtctgcctggcggccggcgcggcgggctttgcctatgtctggcggtatccccgtttcactctggtggcgatgcgcaccgccaaggcggaggatttggccgacctggaggaagccaaaaccaaggcccatgcggcggatgtccagctcaaggacaaggatctggagcagaccgacagccggaaattcgcccggctgcatggctaccggtatctcaacgccgtcttttttgaacggcataagcggctgctctaccgcccggtgctcatccgcctggccattatcggcgcggtgttcgtcctggcggtgctgctgctcctgctggccccggaggcggggcgaaaggccgcgggaaaggtgcccaccctgctgccggtgatggtgttcgtcctgtacctgctgacctcggtcagcgatcgcacctgccgcgcgttgtttcataactgcgacgccgcgctgctgcgtcaggggttttaccgcaagccctccgcgattcttgtcaattttcggatccggctgggctatatgctggggcccaatctgctgctgggcggggcggtggcggccggttgcgtcggcttcgccctgctgggcggcttggcctggccgctggccgactgtattccctttgtgctgtccctgctgttgctgggcgcttttttctcggtgcattatttgttcctatactatgtattccagccgtacacctctgatatgaccatgaaaaacccgttttattccctcattcggggcatagtttatgcgttgtgcctcatctgcctgaacatggacgccgcccccgcccggttttccctgatcgtcctgggcgccacggcggcgtacattggcatggcgctggtgctcatccgccgttttgccccgaaaaatttccgggtcaaataaaaggacaggaaactttaagaatttcgaccgcttctcttaacacctggcgcggcgcgtgtgctacaatggagacatgacagacaaacaggagttggtgtccatggcaaccgagtggaaagacggcgggtggctgaaaagcgaggaggctgcgccggaggagcagagccgaaccccggaggaaacggcctatcacgcgccccgggggcgctgttcctcccgggtgcagataaggcggcgggacagaaagaggaaacagcgtctggccctggtgctctccctggccgcgacggccctggcggcgctggtggtgctcgttgttctggcggtgcggggcctgtcctccctactgggcggcgaaagcatcgatatgggcgccatcccctgcccgtcctggatcgatcagcagttcatcgatttgggcggcggaagggacggggcgaaaatcgaccgggtgaaggacatcgccatccattacgtgggcaatcccgataccaccgccaaagccaaccgcaactatttcaacacccccggagtggaggtcagctctcactttatcgtggggctggaaggggaaatcgtgcagtgcgtacccctggacgaaaaatccgccgccaccaatcagaggaacatcgacaccatttccatcgaggtctgccacccggacgaaaccggccggttcaacgacaagacctacgcctccctggtgaagctctgcgcctggctctgccagcagctggatttggacgagacgcatctcatccggcattatgatgtcacgggcaagtcctgccccctctattatgtggtgcacgaggacgcctgggcacagctgaaaaaagacgtgggcacctatctgaaggagcatgagaccatctcataaagaagcgccggaggcaatccggcgcttctttatgagccatatagccgttatcgctctgtttccgccagattgatcaccggcaatccctgttttcgggcataacggacggtgtaggcggtgccgcccgtttcggcggtgagataacacaggcagattccgctgccgtccaccagccgccgattgcgctcaaacaggcaccctggaccgtaggtcgaggccacatacatcaccttattggcccgcgcccggatagcctcgtaccgccggacattgccggaggaccagcctcgggtttggtcgggactgggaagcacgagaatcagcttcacctgcgggcgcgtccgctgaagccggatcacagcctcggcggccagggtgtcgaagcccagagcgcctcccgcgccgaaatagatgacgccccgtgccgccagcgcctccagctcttcattcagccgcctctccagccgcggcagcgcctcctccgggatgcgccgatgcccggtgaagcagcaggttttcgcgcgcagatcctccgtcatagcctcactctccccctgtcagatgctcctagtatacacatccgcgtttcaaaaatcaaacttttgttcggatttgtgaggcattatcacaacgcggttaccggcaggtagtctggtgtctcgcaagtgcttgcttgtcaaacctgccgggcaacgggatgctggaggcatagatcagacaacggaggccatggagcatcgcatcccgggaaccgaacgagcgagaacgcggcaccctgcacgcccgctgccccgtcctgttgacataaaaagcggcccatccagaccggagggccgctttttcacacggttttctcttcttttttctgtccgaagttgatgcgataaaactcgtccgacggggcgaacaggaagagcttgtgccggccccgcaggtggatggccatcagcacgcacaggatcatggcccccaccaggcagaaaaacatgtcctccatgctgtcctttaccccgttcgcgatatcctgggcgtcatggccgaagaacaagaagccggcgtactcgatgagctcccagacgggcgcggtcatcatggcgaagcagaaggagaaccccaccgccgtgcgccggttgtgccccggcccgtggcccttgtcctcctcgagcacatagaacacgcacagcccgatgagggcgaacaccgccccgctcaggccgtgaacagcgttgtcgtaccatggaatgctgccgtacagccgcagggccacccccaggttgaaggccagcaggatgaaaatcatcagcaccatatcaatgagataggtgggcttgaggtggaaaatccgccggtacaggggcgggatgagcaggtacagcacggcgatgaaccccatccacgccaccccgatccctcgggtggtcagctgatagaaccccacgatgagggcggacaggaagaaggtcaagattaccacccggttggccagttgaaaccgcggcgcttttttcggcatggcagggcatcctttctccgcaaaggcggcgatgttgtctgtctcctattatgcccttgtttgctcgcccagtcaagatgcacgcgcaacttccgtgaaaccgccgcccgcagacgaaaaaaggcggaaggcgggaaaattcgccccctttcctggttgaaaagggaaaaaccttatggtataatttatcattgcttgcaatttgcctcgttttggggcatagtaaaagatggtttaaggatgcttccttaaaaaaggccgcggagcgctgcctccgcttatgtaatgaaacgggttattcccggcgaaaaggattgagagtgagccatgatgtttgaaaaccagtaccgcacgcatacctgcgcgggcatcgacgaaagcgtaatcggttcagaggtgcgggtggccggctgggtggagaatatccgcgaccacggcggggtgcagtttctggatctgcgggatcactacggcgtggtgcaggtcgtggtctacgacgaggcgctgctgcacggggtgacgcgggaatgcgccgtcaccgtttccggcccggtggttaaacgcagcgaggaaacctataacgataaaatcgccaccggcaccgtggaggtcaaggccgcgtccctgaccgtcctgggccgggtgcgggagcctctgcccttcgaaatccccgcctccaccgagaccaaggaggaggtgcggctgaaataccgcttcctcgatttgcgcaaccgcaaggttcacgataacatcgtgctgcgttcgcaggtcatttcccacctgcgccgcaagatgaccgagatgggcttccttgagctgcagacccccatcctctccgcctcctctcccgagggggcccgggattacctcatccccagccgcaagttccacggcaagttttacgccctgccccaggcgccccagattttcaagcagctgctgatggtgtctggcttcgataagtatttccaggtggccccctgcttccgggacgaggacgcccgggccgaccgctcccccggcgagttctaccagctggatttcgaaatggccttcgccacccaggaggacgtgttccgcgtggccgaggacgtgctgtacgacgtgttttccaccttttcggacaagccggtgtcccccgcccccttcaagcggatcccctatgccgagtgcatgctcaaatacggcaccgataagccggatctccgcaatcccctggagattattgacatcagcgacctgtttgtttccaccgattttgctcccttccggggcaagacggtgcgggccatcaacgtgcccggctgcgcctcccgctccaagagctttttcgagaacatgctgaaattcgccaccgatatcggcatgaagggcctgggctacgtcaaggtcacggacgacatgagcttccagggccccatcgataaattccttaccgccgccgaccggcaggagctgatccgccgtgcgggcctcgagcccggctgcgtgctctacttcatcgccgactccaaggagctggccccccgcctcgccggccaaatccgcaccgaggtggcccgccggatggatctcatcgacgagaaccggtacgagctgtgctttgtggtggacttccccatgtacgagcgggacgaggagagcggacagctcatcttcacccacaaccccttctccatgccccagggcgggctgcaggccctggagacgatggatcccctggatatcctcgcctaccagtacgacatcgtgtgcaacggcgtggagctgtcctccggcgcggtgcgcaaccacgatttggacgtgatggtcaaagcgttcgctctggcaggatataccgaaagcgatttgcagcagaaattctccgctttgtataacgcgtttaagtacggcgcgccgccccacgcgggcatggcccccggcattgaccggatgctgatgctcctgaccggggaggagagtatccgggaggtcatcgccttcccgatgaactccaacgcccaggatctgcttctgggcgccccctgcgaggtcaccgagcagcagctgcgggacgtgcacatcaagatccgctgatcagggggcctgacgcgatgcgtcaggcccgcgttcgctttttgaccggagcgacgaaccaccattttattccagagaggaagggatcccaatggtcacccgcgaagagatcctgaaaatcgccaagctgtccaagctgtccgttaccgaggaggagctggacggcctgaccgccgccatgggcgagatcatcgcttttgccgacaccatcaacgcggcgggagccgccgccggcgagttcgacaatattaacaatctgcagaatgcgttccgtgaggacgaggtggttccctcctatccccgggacgagattctcaagaacgtggacggcggggaagacggcttcttccccgtgcgcaagcggcagtaaggaggcggcggtatgagcgacaagaaaacaagcgatatccgcgccctgcgggacaagctgaccaccaaggcggtttcctgcgccgagctgacccaagcctatctcgacgccatcgcgcgggacaatggacggctcaacgcctatgtccgcgtcacggaggacacggccctggagaccgcccgccgggtggatgaaaaaatcgcccgaggcgaggctctggcccccctggagggcatccccatgaccctcaaggacaacatctccacctccggcatccccaccacctgctgctcgaggatcctggaggggtatactcccatctatgacgccactgtctggaagctgctcaaggagcagaacgccgtcctgctcggcaagaccaatatggacgagttcgccatgggctcctcctgcgagacctcttgcttcggcggggcgaagaacccgcacaaccccgcccacgtggctgggggcagctcgggcggcgtggcctccgccgtgggcggccgcctggcggcctacggcctgggatccgacacgggcgggtccatccggcagccggccagcttctgcggccttgtcggtctcaagcccacctacggcgcggtttcccgctacggcctcatcgcctacgcctccagcttcgaccaaatcggccccatcgcctcatcggtggccgacgcggccgccgtgtacgacgcgatctccctttacgatcctatggattccacctcccggggccgggtgaacgccccggtctgcgacggtctggagcaggacatccggggcatgaagatcggcatggcccgggaatacatggagggtctgcgccccgaggtgcaggccgccgtggaaacggcggtgaaaacctacgagtccctgggcgccgagatcgtctggttcgacctgcccgagctgaagttcgccctgccggtgtattacatcctggcgtgcgccgaggcgtcctccaacctggggcggtacgacggcatccgatacggccgccgcgccccccattatgacgatgtgaacgatatgatctgcaaaacccgcagcgagggcttcggagacgaggtcaagcgccgcatcctgctgggcacctatgtgctcagctccggctactacgatgcgtattacaagaaggcgcagaacctgcggggagccatcgtggccgcgttcgagcgggcgttcgcctcctgcgacgtgatactcgcccccaccgtgcccatgaccgccttccccgagaaccaggcggcccaggatccggtggaaacctatctgacagacatctgcaccgtgccggtgaacatcgcgggcctgcccgccgtctccctgccctgcggcatggacgccgccggcctgcccatcggcatgcagcttatcggcggccgctttgaggaagggaaaatcctgcgcgccgcctatcagtacgagcaggcggcggggccgatcctgtccgccgtggaaggaggggtcgccctgtgagccggcaatatgaaatggtcgggggcctggaaacccatatcgagctgtccaccgccaccaagattttctgcgggtgcaccaccgccttcggcagcgagcccaacacccactgctgccccatctgcatcggcctgcccggcaccctgcccaagctgaaccgccaggccgtgcggtacgccatcatggccggcctggtcacccactgcaccatcaacccgatttccaaaatggatcggaaaaactacgtctatcccgacctgcccaaggcctaccagatttcccagtttgacaagcccctgtgcgagcacgggtatgtggagctggcctctggcaagaaaatccgcatcacccgcatccacatcgaggaggatgcgggcaagctggtgcacacccggggggacacctttgtcgattacaaccggggcggcgtgccgctgatcgaaatcgtcaccgagccggacatccgcagtgttgaggaaatccgggaataccttgaaaagcttcagctgatgatgaaatacatcgggatttccgactgccggatgcaggagggatccatgcgctgcgacgtcaacgtgtccgtccgccccgccggggaggagaagctgggcacccgcaccgaaatcaagaacatgaactccttcaccttcatcgagaaggccgtggcctacgaggtggagcggcagatcgacctgctggaaagcggggaagaggtggtgcaggagacccgtcggtacgacgacgcgcgggatgtcaccgaaagcatgcggggcaaagaggacgccaacgactaccggtatttccgggagccggatttggtcaccatcgccaccgcgccggaggaaatcgagagcatacgcgccgccctgcccgagctgcccgacagccgctatgcccggtatacgggcgagtggggcatccccgccgccgacgcgggcctgctggtcaaataccggaaggtggcggaatacttcgaggaggccgcgcagggggtcacccccaagacggcggccaacttcatccttggccagattttccgccgtctggtcaccgacgcggacaaggaggcctgcgaggtgtccgttcccgccgcctatctgcgggagctggtggcccttatcgacagcggcaagctgaagatgaacctggccaaatccaccctggaaaagatgctggacaccggcaagccggtgggcgagctgctcacggaggaggacatggccggcgtggacgagggggccctgcgcgccctgtgcgaggaggtggcggccgccaatcccagcgccgtggccgactaccgaggcggcaaggaaaaggccctgaaagccctgctgggcggcgtgatgaaagccacccgcggcgccgccgacgcgcaaaccgccgaacggctgctcaaggacatcatcgcccgagggtgacgccctgcccggcgttgttttataacaaaaaccaaaaagcggcgcagaagcactctgcgccgcttcaggctgtcaaaaaaggggaatccgccgttcggaaaacgaaaaaagcgggggcgggttaccgatcggtgtttgcgaggacatgtgcctcgcaaacacaccttataggcgaaaaccggcggaaacacacgtgtttccgccggttttcaagagcaggggtggcactggcggggacagatgggaaccgaagatgctttgcatcttccggcgaacgtccgtgagccgccgtgatccggcgtccccgtccagcagcttgtcgactttgtcgacaagctgagcggcgcagaagcactctgcgccgctttttatgtactattttttctcctccgtcttgcgcagcaccaggtcggtgagcagggccagcacaatcccggcggccagagtcaccggcgccacctgcagcgccgcgtcccggtagaggatggcccggaaatagtcgggggtgtatcccgccgtcagatgcaggaacccggcaaatagataccacaccgccgtgaactgcgcgctgccgtgcagcacattgcgggaaaacgggtgaagcttcccccaggcacgcagcgtttttaatcgttttttcatatgcagccgccctttcgaaaaaaatgggggtaaaccttcccgtttgtgctatactgataaagagtctatgaatattctatcacgcggatcgccgccgtctcaaggctaaaatctttccgtttttgggagggacaggaaaatgcatatcggagcctccaccgccaatctgtatcctatgaacaccgaggacgcgctggacgccctgctgcgtctcggcttccgggagctggaggtgttcgtcaataccgaatcggaaatcgtcccttccttcctccggcagctgaaggagagcatccaggccgcgggggcccgcgtcgtctccctgcacccctatatttcgggcagcgagccgtacatcctctattccgcctacgaacggcggtatcgggacgggctggatatatacgcccgcctgttcgaggctgcgtcctacctgggggcggggctggtggtcatgcatggggataaggcggagggggtcctcccggtggaggaatccatcgcccgcttcgaaggggtcagcgacctgggccgcacctacggcgtcactctggcgcaggagaacgtcgtgcgcttccgcgcatccgacaacgcctatatcgccgccatgcgccggcaactggggcctaaggcggccttcgtctttgacctcaagcagtgccgccgctgcggccaccggccggaggatgttgttgccgccatggggtccgccctcgtgcatgtgcatatcagtgacaacgacgcccgccgggactgcctgccccccggcaaaggcgcggtggactacgacagcttgttccgcctgctggcctccgtcggcttcgacggccccatcgtcctggagctgtatcgcaccaatttcgagcgggaatccgagctggccgacgccaaacgtctgctggaggatgccgtttcccgcgtgaaaatgccgtgaatttacgagattcttccactaattcttgcaatttgtcgaatcctgccgcataatacccacataaaaacaaatgagttgacaaattccatagatgtggtatactactaggtgaaatattaccacatttggaggtggggtagtcaatggaccttatggaggggaccgcgacagcggttattaaggcgccggaggacgtaaagcggaaacagtgcgaaatactggagtcctgctgcggcagcgatggtatcccgtcgctggaaaaggttttcggcattcatgtcattctggaaagcgggcaggagtttacctgctcggatgtggattgccggcggaaaacggtggaagatttgtgtgatttggtgctgcgatacgacatcgtgctggaggaactgccgtatattctggaggattttttgctggatcaatacgatatcgccgtataacgcggagtccgcatgggttttccatgcggactctaatattttcaggaaaaacaaggaaaattatacatggatttcttgacagacccggtatacgccatgtataatgggcgcagaaggacaaaacctccctgttttgtgagacatgggctgttccccggccggctgccgggcagttcattaggatgacgactgtaccggaaaggcgtgaacaagtcatgaaatgccctttttgcggatataccgaaagtaaggtcatcgattcccggcccaccgacgaaggcagccgcatccgccgccgcagggaatgcctgagctgtatgaagcgcttcactacttatgagattatcgagagcctgccgatcatcgtggtcaagaaggacaagtcccgggaagcgttcgaccgcaacaagctgctaaacggcctgttgcgcgcctgccagaaacgcccggtgtccatcgaaaccctcgagaaggcggtggatgatatcgaggttcagatccagaattctctggatcgggaggtcaccgccacccgcatcggggagtacgccatggagaagctcaaggacatcgacgaggtggcctatgtccgcttcgcgtcggtataccgtcagtttaaagacatcaacagcttccatgaggaaatcaaccgcctgatgaccgatgaaaaagaataaacttacaggaaaaacgccgcacggcagatgaaccgtgcggcgtttttttgcgttagtagccggctagcttttcaaaccgtctatgtatgcttttaccttttctttatccctgctggttaattggcggtaaacatacacatggtctaattcctctggagataagtcgctgctttgaatactctgtttggtattcgatttaccacagagatagtcaagagaaacgttgaataaatctgcgattttaataaaggtttctaaatccggcgttctttctccggtttcatatgcactaatggtagactgggaaacattaagttttaaggccagactctcttggctgagccgctcctgttcccttaatttttttaaacgaagcacattaccacctgcccaaatatattttatcgcaaattgttgtattttttacccgtatatgatataattaatacccgaattacaggtaaaatttgtatgtgaagggaaaggaaaattcttatggacaaatacccatacagtctgcttaagcgggatgaacgcggctataccattctgctgctgcgcgatcagcagggcctcgcctttacggccattgccaaggagctggggctctcgccgtccagggtggcgcagaaatacaaccaaatgaaggtgaaacagaaaaacctgtatatcagacagatagcggccgagcaaatgtgtgaaaatacttcacaaatgaaaaaggtttttcgggacgcctacgaatgctaccaatcgactccctatgtctgcgcctatctggaaaaaatgtatccggatatcctgcgcgagtaccgcgccggggagccgggcctgccggcggcgtttctcgaagccctgccgccctttcgagcgaggctgagccaaaagacgattgcccgcgtggtggcgatgcgggaggaggacaaggcgtcgtttgccgccatcggcaaggccctgcgcatgaccccagccaaggccagacatacctatgagtggttctatcacgataaggtactggcgctcttgaagggcatgcaggaagaaacggctgaccctggggaaaaaacggccattttgaattggtattttgacacatatagaacatcgaaaaagcgttacgatgcgctgaccaaaggcgaataacgcgcctgcacgcaaaaaggaacaccgcggggagccggctccccgcggtgttccttagtttatttctgcatgataccaccgccggccaccccaccggccttagccgcgtccgccttcacctcgacctcgaagcggcagtcccgcagccgggcgggccattcgtcctcccggccccgcaccagctcgggcgccttctttttcaccatccgggaaaagccgtatacatcgcagccccagtccccgatggtcttgtccagcgcgctgcgcacgtcctggaggatggcttcctgcagcgcgccggccaccgccttcaaatcgctggattccaggcccgccgcgcggtattcctccagcaccgtggctttgcagctgatggtcagccggatgacggcggcctccccctcgggccagatgcgcaccttggttttggaggaggtgacctccacggtcagcctctccggatcctccgccgttcccggaagggacagcggataggtgcaggtttgcagatccccccgtccgaagagcagcccccgggtggcctcttcatcgagctccccggcatattccccccggcgaaagaccgccgtgccgtccatgaccatggccggttcctcgcccgttttgtccacccgcacgatgggcatcaccatgtcgtacatgccgctggtgctccgctccacgtccagcagatcggtgggcacggcgaacccctgccgccccgcctgctgcaaaaggacggacaaatgctccgccgggatggtgtagcccgcgctgggcaccgccaacagctcggccgcctccccgcggcaaaccgccatatctacggtggagcggccctcgtggttgcggatgaagtagtccagcagggcggaaagcggccggcgcttcgcctgctcgaggccgatgaccaccgcccggttgtgcaggatataggagctgcggccggtgcgggtgacaaaggattggagggccccggccactgagggggcctcgatatcatataccttggtggcgttctccgcctgctcggtcagagagccggaggtcttgagggtttcaatggcctggatggacaggcggcagtccgcctcttcccccgcgtcgatacccacggcggtcaccaccacccggctgttggtcagcgatttttcccggcagctgggcagcagggcgaatcccacggccagtatcagcgtcataacccaaattttcatgtcgtttccccttccgctggccccagcttctgccgcatggttttatgccgccagagatcccacagggccagcgccgccgggatccccaccgcgcacacgcccagcagcacggcggaggcgtaccagataatccgctgctcggcctggagcggcgcggcgtcgccgagcagcagcccggccgccagggtgatcacagcccccgtcgccgcgatgagcatccgccatttctgccccgttacccgctggaagcaatcggtgaacagcatgccaaaaaaggccattttcaaaaacagcgcgcccacccagatggcggtggccacaatgtccagccgctgtatcacactgacctgcacggtggtcagcaccgtgtaataggggaacagctccatggcgccgaaatcgcccagcacccccaccaccgtggcctggatgaccagcgccaccgccgtgaaaatgccgatccaccacaggctgccctttatcaggcttccctttacataagggatcagcagcccgagcaccgccagctccatgctgcggggcagctcctcgagtgctcccgccagcacgggggagcctccgtcatacagcaggggcgggaaattgataagctccatgcggggcaggagggccagggcggccagcaggatggtggccaccacaaacaccgcgatgatggccgccgagcgggcgatggcctggatgccgtagaaggccgcgatgcctgccgtcaccatcagcacaatgcacagcacctctcgagacatgccgggggagagggtgctcgaggcgaaccggctgaaccggatgagatctgccgcctggatgtacaggcaggcgaggccgtaaaacaccgccaccaccccgccgccctttcccatcaccgccacggcgtaatccagggtgctgatgccctccgaccggcgcgcgaaccaccaggtcggcagcagcagcagagccagcagcagcgcttggagcaggatggacaggagaaaatccgtcccatgggagagctggtggacggtgggggcgaaggtcatggccaccgccaggcggctggtcagcaggatagccaccaactgccccgcgctgatttgctgctgattgttcataagctgttcatcgtccttttttccaagtaatgcggggcggtctacttgtccgtttcccccttgtccttcccgatcttggagccgggcagcccctgcaccgtgaaggtgcccttccacagcctggtccaggtgtcgcggacgaacacatcccgcatggccttgatgctgaagggcgagatgggcgcaaggaacggaatgctctggatgttcatcgccgcgatgctcaccagcagcaggcaggcccccagcatcaccccatacagccccagagagccgcccaggatgatgaaagcgaaccgcagaatggcgatcggcccgtacaggctgggcagcacgaaggagcatagggcggtcagcgccacgatgatgaccatcggcgcgccgataagccccgcccgcaccgccgattccccaatgaccagcgcccccacgatgctgaccgcgtggcccaccgccttgggaaagcgcagccccgcctcccgcatgatttcaaacaggaaatggatgagcagcgcctccaccgtcaggggaaagggggtggcgtgatccgccttgagaaaggtcatcagcagggtgggcggcagcatttccgggtggtaggtgcccaccgccacatataaccccggcaggaacagggaaacgaaaaacgccgcgtatttgatgatccgcagaaagctggcgtaatacgggttgagggcgtaatcgtccatggattggaaattctccacgaacagataggggatgaccagcacgaagggggtgccgtccaccagcaccccgatgcgcccctccaggatcttgccgcacagcgtgtccggccgttcggtggtgttcaccccgctgaacagcccccggggcgggctttccagaaacggctggatgtatcccgattcgagcaccgcgtccagcggcagggactcgattttttccttcacatgggccagcagctcctccgacacccggcttttcatgtagcacaggcataccgccgtgtggctggtcttgcccgcctccatcatgtcgaacaccagctccggcgttttcagccggcggcggatcatggaaatgttgacccttatggcctcggtgaacccctcccgggagccccgcatggtcacctcggacgacggctcggacaccgagcggatcatgaaattctgcaggccgcccagcaccgcgaagggcaccccgtccaccaatatggccccgaagccggaggccaccaggttcatcagctcgtccatggtggtgacctggagcatgtcggtgaagcccagcacctcgtcccggatgcgggcgatgagcgcttcgggcgtgtagcttcccgtcatttcggtcatgggcaggatgaccgcgttggccatcatgtggcggtctaccatcccctcgatggtgacgatcgccgtctccctcccgcagaccgtcagccgccgcacggtcaaatccgcgctgaccccgaactgggcccgcagatagaccaggtcgtccagcagcacgccggaaatcggcaccggcggcttgggcggcgccttgggctgcggcttcggccgcgcttttttaccgatggaaaacatgattgtccccgcctttccgtaaggtgagggggagcgaatccaccccgcctcagccggtgtattttgccattccgccgcgttatcgtcctaggtgggcgccagcccaccgtcgtcctctgccttgccgaatgacaaaatacgcaggctgaggtcaaagaatttttgggaatgagcgggggttcacagcaaggcggccgatcgcgccatgctgtcgcatggcaaaagaggccaacgccgctgtgggcgctcgctctcccaaaaatcggagcttgttcgctccccctcaccttaagccggtgtcgccagcttttccctgcaaagagtatgtccgcactttcccgcatatatacccgcaaagcgggtcatactactcggcgagagaaaatgaaaggctgggatttttcatggcgattactgctatccgcaccgtgataatctacatattcattatcacggctatgcgcatcatgggcaaacggcagctgggcgagctgcagccggtggagctggtggtgaccctgctgatctccgatctggccgccgtgccgatgcaggaaagcgggatgcccctgctcaacggtctgatccccatcctcatcctggtgtccctggagctgctgctgtccggggccatgctcaagctcccctgggtttcccggctgattaccggcaaccccatcaccatcatccgggacggccagctggatcagaaggccctgaaaaagctgcgcatgacggtggatgacctgatggaaaacctgcggggcatgaattattatgacatcaaggatattcagtacgccatcgcggaaaccaacgggaaaatcagcgtgttcatgaagccggacagccagcccgccacctgcaaggacgtaaataacgtcccccccgacaacgggatgcctttggtcattatcagcgacgggaaaatatcccagtgggcgctgcagaccgtgggggtggacgaggcgtggatcgaccaggtgctcatcgacaacgcctgtcctcaggacaaggttttcctgctcaccgccaccaaaacccgggaatactacctggtgcgcaaggaattggcgtaaagactcgctaagagaaaggaggacctggccgccatgatcaaacgtatgctcatcgccctgggaatgctgctgctgaccgccgtgctgtgcgtcggttctattataattatgtcccgcaacaccgattatctgctgcaatctctcgatcggatgcaggaatccttcgatcagggggatatggaagcctgcaagcaggaggcgcgccaattcgccaaggattttgaggagaagacgaagatgttcccctttttcctccggcatgcggacatcagccgcatcgaggaaatcgccattcccctgccggtgcttatcgagcagggcgacacccagcatttcgccgccgagctggtccgctgccgcagccagctcagcaagctgtcggagatggaactgcccctggcaggaaatattctgtaaaaacaaagagtagattccattcggaatctactctttgtctatttatcggttttcaaatcctccagcgggatggggccgttttctttttcgtattgcttaatatgcaggaggacggcgcgtccgatttccttattcatggaacggccctctgcttcagaaatatattttattttgtccagcagttctcgagaaatccgcaaggaataacccgcagagttggccataaacgtcaacaccttagaaaatgtattgactttattatactcatgtattactataatatggcagaataatattattttgatatcacataatttcattctgcgctccccccccataagccaaaaccgccgggacgttttcgtcccggcggttttggcttcctatagcctttcccgtataaacgccgccgcctcgtcgttgtccttgtataacgcgcaggcaatcagcagcagggcgtaggccctctccatcgtgttccccggcagcggcagtacgccgccgccctccaatccggcggccgaggcatagtgatagtccgccccctccggccgggcggggcagagggccagcagcatcccagcgtcccggcagcgggccgcgaacccgggaaagcctgtggccaccccttccatgcaggccgtgccggaatgatacagcccgtgcagcaccgcccgcgtcccctcgggcagggcgatagtccggtagtccaaccccgggtagggccgcacctgcacgacgcaggcggcaagcggcggcagccggcgcagcagcggctccccgccccgctttccggggggagcgggcgccaccccgaaccgatcggtcagccccgcgcactgggtcagccgttccccgggaatcagccgcacctcccggctctccggcgcgtcggccagatcggacacggcggcgtacaccccgccgggatgcccctgcgcgatcgcctgcaccgccgcggcgaaatgccggtgcccgttcgccgctggatcggtgggcggcgtgtggctggataccaggatcaccggcagggctgtcccctccagcgcgagggccagcaggttggccgtgtaggccagggtgtcggtgccgtgggtgaggattaccccggcgaagctgtcgggctcgagatcccgcagcgcgtccagcagggtgttccacttttccacggtcatgttttcgctcagggtggtcagcggctccctttcgtcgaatacggcggggctgtccggatgccggcggcggaacacctccgtgagcagacggccaccgcccggcgccgcgtccgccgcgccgtccgtcactcgcgcgccgatggtgccgccggtgtatagcagagcgattggtttcatgcgcaactcctcccattcgcctttattgtaccgcattccagcgaagaaatcttccaaattttcgttttctcccaaatttattcatttgacgttcatagaatccggttatacttttaacactataccccagtattgtaaatggaggcttctgcccatgagcgcgacaaaagcgaagaaaaaactccgccggcgggtaattgtcattgtcgtcctggtgctgctgatcggcgccgcggtgacgctcttcctgctgcgccccaaggatgccgcttttaccgaggaaaaggcgaaatccggggatatcaccacctattacagcttcagcggcaacatcgaggccaaggaacgccagtccatcctggcggataaggtcatgcaaatcaaaaccctgaaggtcaaggagggcgacaccgtcaagaaagacgacgtcctggccgaaaccaccatgggggagaagctcctggccaaaattgacggcgaagtcaccaagatctatgtggaggagagtgcccagctgatggccggcgtccaggtgatggatctggtcaactacgacgatctccaggtgaccatcaaggtggacgagtacgatctgagcaccatccaggcgggcaaggccgtcaccgccaccatcaacgccctggataaggacgtgaagggcaccgtctccaaggtctcccgggaggccgtgaccctgaacggcgtgtcctatttcaccgcatcggtggatttggagaaggacgcctccctgctcgtgggcatgtcggtggaggtcaagctcctcaaccaggaggtcaagggggtcaccaccctgtccatgaaggccctccagttcgataacgagaacaagccctatgtctacgtcaaaaacgccgagggcaaaaccgaaaccaaagcggtgaccgtgggcatcaacgacggcatcaccgtggaaattaaagacggcgtgaaggccggggacaccgtgctgctgcccaaggccggcttttcctttcccatgatgggccaccgcggcgacagtgaggacaagggatgaacggggaaacgattctgacgatgcgggacatcgtcaagtgctaccagatgggggaagaggagcaaatgatccttaagcacatcgatttttcgatgtgccggggcgaatttgtctccattctcggcccgtccggatcgggcaagtccaccatgatgaacatcatcggctgcctggatgtgcccacctccgggagttatatcctctccggccaggacacctccgacatggacgaggaggagctggcccatatccgcaaccgggagatcgggttcatcttccagtccttccagctcctgccccggctcaacgccctggaaaacgtggagctgcccctggtgtacgccggggtgtccccgtccgagcggcggcggcgcgccaaagccgtgctggagcgggtgggcctggaaaacaaaatgaaaaactacccgaaccagctctccggcgggcagcagcagcgggtggccattgcacgggccgtggtgaccgagcccaccatcctgctggcggacgaacccaccggcgccctggatcaggccaccggccggcaggtgatgcagctgttccggcagctgcacgacgaggggcgcaccatcatcatgatcacccacgacgtgaacatcgccgccaacgcccagcggatcgtccatatcctggacggcaggctgtgggagggcgatcccccgccggagggtgaaaccgccggcgcgggcgcggaaggaggcggtgcggatgtttagggaaagcctgaaaatgtcctggcagaatatcgtgcataacaaaatgcggtccttcctcaccatcctgggcatcgtcatcggcgtggcggccatcatcgccctgatcaccaccgtgcagagcgtcatcaccgaggtcaacagccagttcgacgatctgggggccaataccctgatggtgcaggcccagggcacggccctgaaaatgggcctgaccgataaggatttcgaggacttgcaggctgtggagggcatcgccggggcgtctcccactgtgtccgcccacctggacatcgcgcagaacggcgtcgtcaaggaaaacgtgtccatccagggcaagaacgagctgtatttcgcccgcaaccccgacgtggtcaaagccggccgggggcttaacatcctggacgtggaaaataaaaaccgggtctgcctcatcagtgagacgctggaaaacgacctgttcgacagcgaaagcgcggtgggccacaccctgcgcctgggcggcatcgcctacaccattgtcggggtgacagccagctctaccgacatgaccagcatgctcatgggcacgggggacggcatcatcgtgccctataaaaacgccatgtccctggccggggtcagccacatcatggcggtggagatgtatatggaggacggggcagataccgacgcggtcatcgacgacgtggaggcggtgctgggccaggccttcaactacaaggccgacagctttgccgtcaccaacatggaaagcctgctggacatgatgcacgacatgcagaacatgatgcagaccatgctcgccggcatcgcgtccatcgccctgctggtggggggcatcggtattatgaacatgatgctggtctccgttaccgagcggacgacagaaatcggcctgcgcaaggccttgggcgcgcagccaaagcggatccagatgcagttcctcaccgaggccattttcctttccctgttcggggggatcatcggcattgtcgtcgggctgctcatttccctgctggtggctctggccatcgacgtgggcttcgccatatcgctgagcgccatcgcgctgggcgtgggcttttcggtgctggtgggcgtcgtgttcggtctcgcccccgcccgcaaggcaagccgcctcaacccgatcgacgcgctgcgcagcgtgtagcgccggtaagcgcgggaacaggttatccagtctccgggacaaaggttccggagactttttttatgccgctctttatggaattatcgccgtggcttggttcatactataccattgaaccttcgatttccatgaaaaaggagcgttgctttttgcaatacggatattttgacaacgaccgccgcgaatatgtcatcaatcgggtggacaccccggcctcctggaccaattacatcggcgtgaacgactactgcgcggtgctcaaccagaccgcgggcggctactcgttctacaaatcgccgcagtaccatcgggtcacccggttccggcccaacggggtgccgctggacaggcccggccattacgtgtatatccgggacgacgaaacgggggaatactggtcggtttcctggcagccggtgggcaagccgctggacgaggcggcgtatacctgccgccacggcctgtcctattccacctatgcctgcgattaccgggagatcgaggcgagccagacggtgttcgtccccctgggggatccggtggagctgtgggacgtgcggcttcgcagccgggcggacaagccacggcggctgagcgtgtacgcctatgtggaatggtcttaccaccacatcgagatggacaaccagaattttcagatgtccaattatgccgccggctcctcctatgaggacggggcggtgctgtacgatctgttttatgaagagttcggctatcagttcttcaccgccgattttcagcccgacggcttcgatgccctgcgggatgcattcatcggcctgtatcatgacgaaagctgcccggtgggagtggagcgcggggaactgtccggcagctttggaaaaaccggcaaccactgcgccgccctgcgcaagcggctgaccctggcccccggcgaggaagtgcgcctgctcttcctcctgggccaggggcagctggccgaggcccgggcggcacgggagagatacgcggatccccgcagcgtggacgcctgcttcgccgccctggccgcttattgggacgacaagctctcccgtctgcaggtgaacacgcccaacgacaacatgaacacctccctgaacatctggaacctctaccaaagcgaggtgaacattctgttttcccgttttgcctcctttatcgaggtgggaggacgcaccggcctgggctaccgcgataccgcccaggacgccatgtgcgtgccccactccaacccggacaaatgccgcagccggattatcgagctgcttcggggagagaccaaggcgggctacggcctgcacctgttccagccggaatggttcgaccccggcaaggaggacatcaagcccttcaagtcccccaccgtggtgcccgaggtcaacgtgcgggatatcatcggggaggacctgcgcaacgtctgctccgacgacgcgctgtggctggtgcccgccatcgtggaatatatccgggagacgggcgagctgtccctgctcgacgaggtggtcacctacgccgacgggggagagggcacggtctacgagcatatgacccgcatcctggacttcaccgaccggcagacggggatgagcggcgtggccaaggggctgcgtgccgactggaacgactgcctcaacctgggcggcggggaaagcgctatggtcagcttcctgcacgtctgggccatcggccacttcgtggacgccgcccgggccgcgggccgggcggaggacgcggcgaagtacgaggccatggccgcccgggtgcgcgaggtctgcaaccgggagctgtgggacggggcgtggtatatccggggcatcaccgccgacggccggaaaatcggtaccagccgggacagggaggggcgggtgcacatggaatccaacacctgggccgtcatttc

SEQ ID NO: 2453 - DNA, 8765 bp, Unknown
  16S sequences of unknown bacteria
cccctgccgatagaggagatgttcggcatcggcaagaagagcgtccccctgctgcagcgggaagggatcctcacgatcggcgatgtcgccgatccggtcaatgagcggaccatcatgcgcatcctcggccgtcacgcgtacacgatgatccagcatgccagggggatcgggtcgaacacgctgtcttatgcgacgacttctcgctccatctcgcagtccacgacgctggacgaggatgtagaggattatgaggaaatggccgtgacgctgcgagcgctggcccgccgtctggcaaggcgcgcagcccaggaagaagtgaaggggaagctgatctccgtgagcatccgatacagcgacttccgcaacgcggtgcgcagcgtggctttagacagctatgtcaatgatgaaaagacgatctatgagcatgcgctgtatctgtttgaccgcaattacagcggagaacccgtgcgccatctgggcatccacctgggctcgctgaaggaccgccggcacatgatccatcagttttccatgttcgaggaacagccggcgaccaattcgatcgacgatgtgctcgaacagctgaacgcacgcatgcccggtgcgcatctcatccgcgcttctgatgcgggagacaagtcgaaatcaggctgattttgcggacgataccggtggtatcgtttttttctgccgcatatgatgcagtgaggtgttaagcaatgaaacgcaaactgcatcgtcattcgttcatccacagataccggcatgtgtacatattcatctcgatcctcgtcatcagcggctttctgatggggtgcttcgcttcccgctacatcagcgccagcgacatcgagcagctgtccagcatcctgacgaccgtgccggaggacatggatcaatacagcttcttcatcaaccagttctttctgggcatcgtgctcatcgtggtcgtcttcctgttcggcacaagcctcgccggcatccccatcatcagcttcatcgtcttcaccaaaggggtgcagatcggcttttcctgcgcgctgttcctttgcacgtatcagttcaagggcgtattgggcatcatcctggcgctcgtgccgcaggtgctctttgatgtgctggcgctctatctgatcagcgccagtgcgctgcagtgctcgatgtatatctgttacagcacgaccaaccgggagcggctcgatctgaagaaactgatgaattatctgctcaatgacatcttcatctgctttttgctcgtgcttgccggatcatatctgaaggcaacattgggcattgaattcatcagactgtttaatctgatgtgattctgtattataataacggcatggacaaaaaagaactgacttatgactacattgccggaacggatattcatctctggcagcggaaagatatgttccgcatcaatacggatacagcgcagctggcgcggttcatgaagatcagaaagggagagcgtgtgctcgatgtcgggacgaacaacggcgcgctgctgctggctgcggcagcagatgaaccatccttcctgtgcggcgtggatatccaggaggaggcctgtgagctggcacgcttcaacatgcaggagcatggcatcaccaacgcggagatccgctgtgaggatttttccgcgagcacattgcgcggcttcgatgtcgtgctttgcaatccgccttattttcagcagggacatcatggcgaggtgaaagtgagcagcagggccatcgcccggcatgaggttttcctgcagctcgatgtgctcatcgccaatacggccaaggcgctgaaggaaaacggcagattctatctggtgcatcgcagcgagcgcataccggatatcctgcagcattgccatgaacaccgcctggaggtcaagacgatgcagctgatgttcgatgaacaaaaggagcatgcgatcggcgtgctgatcgaggcggtcctgggcgcgaaccggctgctcagggtgccgcagccagtattcatccgccgctgacggtgacgaccggtattcagccgaataccggtctttgccgcatcatgcgccgtgttatgtcaagatgagggaaatgagagcagaggtgaacgagcatggaactgcaggaggcatttgccgattatcgttattatcttcagatgaatgcgcataagtcgccgcgcaccattgcgtcatacagccatgacctgaatgattatctgacctatcttcaggagctggggatccatacggcagaggaggtcagagaatgtgatgttcaggattatctgatcggcatgagcgaggagttcaggccctctacggtaaaccgtgcgcttgcttcgatccgttcctttcatcatttcctgtcgcttcagcatccgcagctgctcgatccgacgcgctttctgaaaggcgcgcatgcgcagcagcacttgcctcgttatctcagcgtcgcgcagatcaagacgatcttgaacagctttggcggaagcgatctggatatcttccacaaggccatcctggagctgctgtatggctgcggcctaagggtcagcgaatgctgtgccctgcggctgaaccatgtccatccagagcagcgtgtgctgcgggtcagcggaaagggagataaggagcggatggtccccctgcatgaagaagggattcaggcactaacgcgatatgtgcagctggtccgtccttcctgggaaaggaagcggctcccgcaagtcttcatcaacagccggggagctgtgatcagccggcagtatgtccatcagatgatcaaggatacgctggcgcgatcaggcatggacaccggctattctgcccacagcttccgtcacagctttgcgacgcatctgctggagggcggagcagatctgcgcgtcgtgcaggaactgcttggccacagcgacatttcgacgacacagatctatacgcatgtgcagggaggacggctgaaaaaagtgtatgatgcctgtcatccctttgctggaaaggaggaggaatgatgcgcagctatcaacggatctttctgatcgtgatcgattctctggggatctccggcgcgccggatgcggcctgctttcatgatgaaggcgcggatacgcttggccacatcgcgcagcgccacgtccccttgcatatcccgaatctctgccggctgggcattgccaatctgcgctgcctgccgcagctgccgatggtgcaggagccccttggctgttatgccaggctgctggaagtgagcgcgggcaaggatacgatgagcgggcactgggagatgatgggcctgcctgtgcgcacgccctttcgcacctttaccgatacagggttcccgcaagagctcatcgacgcgctcagcaagtgctgcgatgagcgccgcatcatcggcaacaaggcggcaagcggaacggagatcctcgatgagctgggcgaacaggagatccgcaacggcgatttgatcgtctatacatcagcagactcggtattgcagatctgcggcaatgaagagacgatgggcttagatacgctgtatcgctattgcgaggcggccagagcgctgacgatgagggatgaatggcgggtcggccgtgtcatcgccaggccatatcggggcatgcggcgcggcgaattcgtgcggactgccaaccgtcatgactatgccatcaggccatatgggcggacagtgcttgacgagctgagcgaaaacggatatgatgtcatcggcgtcggcaagatcagcgatatcttcagcggacaagggatcacgaagagcatccgctcagccagcagcgtcgaagggatgaaacagaccatccgctgcgcgcaggagcactttcacggactgtgctttgtcaatctcgtggatttcgatgccttgtggggacaccgccgcgatccgatcggatacggagatgagctggagcgtttcgatgtgcttttgggtgagctgatgcagacgatgaaagcagatgatctgctcatggtcagcgctgaccatggcaatgatccgactttccctggcagcgaccacacccgcgagagcgtgccgctgctgatgtattctcctgccatgcgcatccacggattgctggaaacaggagagacgtttgccgacatcggcgctacgattgccgaaaactttcacgtgcgcatgccggaagggacaaccggcaggtcgcggctgaacgtgatcgatcagagaggatgagtgaatatgagttgtgaaggatgtccaagcaagggaaactgcagcaagagcgagggctcttgcgggatcgtcaacaatcccaataatcatatccggcatattgtcggtgtcatgagcggaaagggcggcgtaggcaaatcaagcgtcagcgtgctgctggcccgccagctcgcccgcaaggggctgaaggtcggcatcatggatgcggacatcaccggaccgagcatccccagactgctgggcatgccgcgggcacaggcgttcggcaccaacgacgccatcgagccggtggtggacaaagacggcatcaaatgcatgtcgctgaatttcctgatggatgatgagaaccagccggtcgtctggcgcggaccgatcgtcgccaacgccgtaaagcagttttacaccgatgtgatctggggcgatctggatgtcttgttcatcgatatgccgccgggaaccggagatgtcgcattgaccgtgctgcagtccattccggtaaacggtgtcgtcatggtatccacgccgcagccgatggtctccatgatcgtatccaaggcggtcaacatgtgccgtcagttaaagatcccggtgctcggcgtcgtcgagaacatgagctacatctcctgtccgaactgcggggaaaagatcgccctgtgccaggacagcgaccgggatgagttcctgaaacaaaacgagctgaagctgtatggcgagctgccgatgacccagtctctcatgaacatcaatcaggaagagaccttcgacgcccgcaccctgatcgagatcgagcagctgatggaacctgccgtgaagcagctgcgtgaagatcttggcatctgaatcgatggatctgcaaagccgcatccgcgcgtttgcttcctggctgaaggcgcatgaggatgagctgcgcgctgatcctgaagggatacaggaaggaacggcgttgctggacagcgcggtgagcggggaatgcgtggtgcaggacgatgtcctgcacgtcatcctgaatgccgcagatccattgtggtattatgtgttcccgctcatggacatcgatgcagagggcattcagctgcactgcggcagagatccgctgaaagatgaggattacagcgtaacgctgttcgatgaggagatacaggccgctcaggtcatgacagctgtcgatgcgcagcagaacgtgcatttctatcatgcggcgctgaacgcatgcacagaagaggaagccgtcgtctgtttccgcatcatgcttcaggcttctttaggcgacgcgctggctgccacgcaggtccgctccctcatcaaagaggagcagccgcctgaaggcagcgtttcgctgtgcgcgctgtatcggcaggtgagcgcggagacggacggcgttttgccggccgatctgttcgtgccgtatcagcctgcgctgcccgcacagcggcgcgctctgccgcgctttgacgtgctcgctggaatgagctgtctgatcgcgctggtgaacgaatattatctggacgtctcacggacttaccgtcacttgcagcagatgggcatctgcgcttgttatctgacggtggacgcaaaggtgcagacgctggaggagcttttggatgtgcgcgagcggatcatcgatcagctgcaggaagcttttgcgtccggaaagctgcatgggctgctgatcggcagcgccctgggcgaagcgaaggcgtatatcgatctgctgttcgttgaaccggtcagcttacagacgctgcaggaactggcaggcagcgatgcgcggctttcgctgtttccttttcatcagggaagcgcacccacgcaaattgccgattatcaggccgattctgccggataacgcatgtttcttctgatttgtgctatagtataagcgaacaaggagaagtgcttataacacagacctcggggccgtctggaaggcgtgaataagcagaacttgatcaggaagatcagacagacggaagaggatctggaagtcagccggtgcatgcgttgagatgcgggagaaaaggaattcatctgagatcatcggcaggatgatgaaggagatttccccggatcgaaagcggacggctgatcagcgaagcggggagaacgggcaggacggatgcatgatgaaagatgcaggacatccgcaaggcctcagcacaggtatccgcagcttcgcggttataaaggaaaggggatgcgcaaaagcatctctttttcttgttgccttgcgtaagacattgtataatactgaggtatctgacaatggtaagaacagggggaatgtgatgaagaccttatcgatattgagcgccaggatgctggccagggccctttccctgatcaagcgcggcggaagccttcccggacagatcgccttgcgcatcgacccggatgtgctcagcaagctgaagtatgaaggcatcgtcatcctggtcacgggaacgaacgggaagacgagcacgagcaatatgatcgcggacctgatgatgcatgcgggaaagacggtcatctccaaccgccgcggagacaatatgcgggccggtgtggccacggccatccttacccactgctcgctgtcgggcaaagtaagaggcaatgcgctggtgctggaagtcgacgagctgaatgtccgtcatctgcttccgcagctgccggtaaacgccatggtcgtgaccaacttctttcgcgatcagctcgaccgggccagagagatggagcagctcatcgcaacgatcgaacatgcgcttggatcattcagcggcacgctggtgctcaatgccaatgatcccaatgtcatgcgtctggcggatcatgcgccaaacgcttccctgcatactttcggcgtagcgcgcaacgcagccagcacggaacagaccggagaggcgagcgaaggaaagttttgcccccgctgcggaagcaggctgatctatgattattatcagtattctcatgtcggctccttccattgcagcggatgtgcgttctgctctcccaagccggatgtgctgctcagcgatgtcgatctggaagaccaccgcttttcctggcagcagcatgcgttcaagtcgccggcacaggggctgtataccatctataactgcgcggcggtctgcgctgtcgctgacctgtttcacatcagcgtgcaggcgctgcagaacgtatttgaccatgctccgcagcccaagggccgcaatgagaaattcaagataaacgggacagagtgcatcctgaacctcgtcaagaatccgaccggcgccaatgaggtgatgaaggtcatcgaggcggatgagcggcgcaagagcgtgctcatcgtcctcaatgaccgggaacaggatggcacggatgtctcctggatctacgacacacattttgaaaagttcatcaatgaacagaccgcggccgtcatctgcacggggacaagagcatatgacatggccctgcggatgaaatatgagggctatgagggagaactgcgcatcatcgctgatctgcagcaggcagtggatgcgctgatcgcacaggaaggctgcgtcctctatgccatcgcgacatataccgcgcttctgccgaccagaaacgccatcgtcaggaggctttgaacatgaaagagatcaaggtattatggatgtatcacgacatcatggacctgtatggagacaaaggcaacatgctcgtgctgacccagcgctgccataagcgaggcatcggcatcacgatcgatacctgcggcatcggtgaacaaagggacatgcgggattatgacctgttgtttttgggcggcggcgctgaccgcgaacagatgatgctgatggacgatctgcgcgcacgccgggaaaacatcgctcaggcgatggcagaaaagagctttgtcttcctcgtctgcggcggctatcaactgttcggccagtattatatcgccgcggatggcagccgtatcgacgggctgggcttctttgaatattacacggaaagcggcgcaaacggcacacgctgcatcggcaatatcgctgtggaatgcacattggacggccggaagatcaccgcggtcggctttgagaaccacggcggacagacgcgcaatgtcaagacgccgctgggcaaggtgctgcatggatgcggaaatacgttccaggatgggatggaaggcttttatcaagggcaggtgttcgccacctatatgcatggaccgctgcttcctaaaaatccggatatcgctgatttcatgatcgtcaaggcgctgcagaagaaacatccgcagatcaggcaggacgatctggccccgctggatgacacgctggagcatcaagccaagaacgcgatgctcagacgtctgggcgtccctgaagtcccttacgaattcaagggatgaacaagcacgatgatcgaggaggatgcgtgatgatccggcagatgcatcatccagaagagatcactgaggcactggatctgatatgggaaactttcctgcaatttgacgcgcctgactattgcgatgagggcgtcagcgcattccgcgatttcatccgcgatgaaggaaccgtcgccacactggagttc

SEQ ID NO: 2454 - DNA, 3173 bp, Unknown
  16S sequences of unknown bacteria
gaaaaatggcgaagaacttggacataaagcacggtatgctgtggcgcgaaaagcgcctattggaataacgggattggaaacggcatttagcgtttgccatggggttttggtcagaagcgggaaaataaagttgcccaaactcgtaaaacttatgtctacccgccccgcggagcttctaggcttggacgcaggaactttaaagccggggactccggccgatttcgtgctcatcgacgagaacgaggaatatgtttacagcaatccgccgagcgcggagaaatgtactttgaaatggcaaaatgttcctattgccattcgggagactactacaccgacatgaaacgccatgatgtcggttccggactggaagaatacaagggttttgaatttgacactccaaccctgcgcgaagtttggcgcacagcgccatatctctacgacggaagagcgcgcacggtatttgaaatgctgcggaaattcaataaagacgataaacatgggcacacttccgatttgacagaccaagaattgaaagaattggaagagttcgttttatctctctaaaataaagcctccagcctgaaaaccatataaaaattttttggctggcgccgtttcacctgtccgtttttaccccaagacggatttttatccggattttaagcgcgaaacaattaaaagcgcaaagctacccgtaaaacgcagcaaaagagctgcaatccgccctgtacaattgtttcttcatcaaaaggcgcaaaccgattgcgccgcccccgtccgattgacaatattccgcattttagcaagcggttttaaatattcctaattttgcaaggttccaagaagataaaaacgctatcattttcttgctcggcaaaccgcaaaagcaagcgccaacgcgccgaaaatcgccgcataagtagcgggttcgggcactgcggcagttatccaaagctggtcgccgccttcgccggggcgcaattcgtattcccagccttcgagagcctgcccgccttggtcgtaaacattcaaatctatctctccgcttagcgttattgaggcgtcgctttccaatgccaagtattcatcaagcccaatagagcttaggtatatattcagtatggcggagtcgtctatcgtgacgtctccctcgaccacaagcttgtccgtccattccaaagatgagcctgctgtaatttccatgccgctcatcgcttctatcttgcaattcagcaatttaaaatgcccgtcaaaaataagatttcctttggatgcaatatcgccgtcaaaagtatgtattgtggaatcgcccttgatagtaaaagtaccgcctccctcattcgcaattgcatattcatatgtccaacccgaacttgccgataccgatattgaagtggaattcttgaggattagaagatttgaattatctgaccccggattatctaagttagaaaaatatactccaacacaagttccaaagtcatcaagttgtgccgttatttttacatttgacaattctaactttaacgattcagctccgtcaatccatactgccctggcatcatttactcccacaacattgattgaagaatcgcttatattgcctatgtcataggatgtaatcccataagacgtatcggcgttcacatttatagtcgcgccgcttatgtcacctatgcgatcggatgaaattccgaaggatctttttccctccatatttatagtcaaattgcttacatctcctatgactcccccgtacgagtaaattccgtaggagtcactaataacgcccgcttctacactaatagtgctcgtttctattttaacattatccaagttgccaatagtacctttcgtataaattccataggcatagacactatctttcgcctccaatactacgttgcttatatcacctatagtgctaccattggcatcgttcattatcgcgcaagttttgctagtccctccactcgcggttattttgagatttgaaatagaccctattttagatcccacctgattccaaataccgtaagattggttgccaccattcgtaacggcccttatgaatgaaccttcggaacgccctatgatgtcgcctacggtagaagaagcccaattatttatgccgacagcattggcggaatcgctgccattctgagtaaaaacgtctattttatccacaaatatagacttaccctctgcctgcgacgcttttcgaaaaaacaagcccgaaagtgttccggaggaatttgcggtaaatttcattgtaatgcccgcatacacgtcgcctatgtcggttaaggtggaactttttttgtaaaatcttataccgttaatttcggttaacctgtctgcgccctcgtaatttataacaacgccgtctccgacaccgccgaccataccgaattcatccaaaacgaccgccaaattggctctcccgtcgtcgtaaagttcgtcgtatatcccgggaggaactatactttctttcccctcggaatggaaggatactgcaaaggcaaaggttttcaaaaacaataatgccgctgaaactgaaatgattcttttcatattatattttctcctccgtccagtagtggccgactaaaattttactcgagcgtttttcgaccacatcgatttttatatgaatagtctcgtttgtttgaaaatcgcaaacacgcatgtttccggtagtttgtattgtcgagaattttgaaaagtcggatttccctgaaatgcgaaattcctgttggctgtttgcatatacaagctcgaaagaatcaggtgaagtccattttacgtccattttcgcttttgaccctgcgggaatttcatccatataccgcgcatttaaaaatttctttatggaaagccatgccgcattcaacatgcacttttgccgttcattgcaatcgcttagggcctccaaagaaatatttaacaattcgtcaaacctgttggccgtttcgatagggcaaacggattctataaaaatcgtcccggttgaagacgtctttgaaattccgtctttaaacgaagtgcatgcagacagaataaaaataatattaattataaaaatattataagcgattttcatgcattaccgtatatggtattaagaataccacttgcagttcaaagaattttaatgtactgattttaagcaa

SEQ ID NO: 2455 - DNA, 32759 bp, Unknown
  16S sequences of unknown bacteria
cgaaggcgcggtacgcccgaaaggcgcggtacgcccgaaaggcaaaagagctttacgggaggaaaagcggggcgcgcaatagcgggagggaatctgaaaaatcggcgtttaaaaatcatttttccgctttttcgaaattcatagaaacgcccgcgaaaatagcggagaaagacggcttattttctttttgacgtgggttgacttttgacctgatctctgttataatataaccgaacgcagaatttataagaggatcccttttgaagatattaagcgctttgaaaaggagttttcttattttcgtatagattcggggaggaagacaatggataagccgagaaaacggacagccgagattttgagcgcgtgcctgacgatagccgtctgtttttcgggctgttccgtcagccgaaatctcgtgtttgacgccgtcgaagaaaaaaaagagcagatagagctggacgttttcggattcaagtacgaaaatttgaacgtcatggcgatcgaggacgcccttcacggattcatggacaagtatcccgacgtcacgattgcctacgaagggataaaaggatcctcttattacgacgttttggaaaagagaatgtccacgggcaacggggacgatattttcatggtggatcacgcgcgggcgcaggaattgagcgcgcagggaaaacttctgccgctcgacgatatttccacgctgggacaattcagcgatttggcgaagagtcagatgacgacgggagaaaatatcacctatcttcccacctccatctccgctttcggattgtactgcaatctttctctgctcgaaaaatacgggcggcaagtcccgacgaattttgcggagtttcgttcggtatgcgattttttcgtatcgcagggcatcgtgcccgtcattgcaaacaacgacatttccttaaagaccgtcgccatttcaaagggaatgtatcccgtctatcagggggaggacccgacgcggcaattgcagcgttttaacagcggcgaggcggatttcggcgaggctctgcgcccgggcttcgagctcgttcaggaaatgatagacaagggatatatagattgcgaggaagcgctgaataccttaaagacgcaggacgatctgacgctttttgcgcagggaacccgcccttttatgctgacgggggtatgggcggcgccgcgtctgagggagctgaattcttctttggatttttccgtggtcccttatcctatcctcgaagacgggagcgtgctggtcatcaatctggatacccggataagcgtcaatgcggacagtccgtataagaaggaagcaaaggcgttcgtcgaatatctcacgcagaaggacgtcatgtgggaatttgtaaacagtcagagttctttcagtcccttgaaggaaacccgtctggcggaagataaagcgatccagagcatcggtccgtatataaataacgggcgcagcgttttaggctcggacgatatcctgcaatttcccgtatgggatatgacgaaagcgtgcgtaaacgtcatgctgaaaggaggggacgccgccgacgcgacggcgtctttaaaagaacaattgaacgcttggagggaaaatacgttatgaacgggaagcctcgtccttttactcttttaatagcgttgctttcctcgatactgatcgtctgtgtggggggatactatgttttcagcgtccgctcgtcgctttggataaagtcggtgacggagatcctggaagtgacgacgcagggacgccatgcgctggatacgtatctcgaaaaagataaagaaactttgcatattttggcgacggagctgtcgatcaccgattcggacgacgcctcctccatcgagaaaaaaatgggactgccctacgacgaagaaacgagctacgtgtgcgtcgtcttttcccttgccaaggtctatacgaattttacggaaacgggaacttccctcggagaggacgatctaaaattgttccaatcgttggagggaaacggagtcagagagccttttctggacggatacacgggagtgcgtaaactcggcgtttacgagcgttttcactttgccgacggcgcggaagggatcgtccagaagactcagacgctaaaaagcatttccaaacgtttttccctttcctttttcgacgacagcggcttttcttacgtcgtcaatcgggcgggcgacgtcttggtgcgctcgatgcaccgcaacagcaaccgcaccttccaaaaccttttcgacatcatcgatcttcaaggaaacgacgccgaagcggtggattcgttccgaaattctctggcaaacggggataggggcgtcgcggagtttcgttacagcggggaagaatatgtattttgttacgtgcccttggaggacgcggaaggttggtatgtcctctccatcattcccaatgcggtcattatgaaacaggtcaacgatatcgtcagccgcacgttatggctttgcgccgttattctcgtatgccttgtgatcgtgggactcagtttttattatcagctgaaaaaacaccataaggaaacggaacaattggcgtattacgacacgttgacaggcttattccgatatgagaaatttcgtatagagggagagaagatactcaaacgggagccgtcgttgacgatcctttatatggacgtcgtcggctttaaactgatcaacgatctggaaggttacgaatacggggatgaagtgctcaatctcattgcggagggattaaagaaaaacgccaaggagggggatatttcctgccgcgttgccggcgacgatttcgttatgctgacaacttgttcggataaagaggcgatcgagaaactctgctgggacattttcttatcctgcaaggaaaagacgggaaacggcagacctttgcggcttcggatagggatttgccgcagcgaagacgctggggacgtcagcggtatcagcggactgatcgacagggcgcggatggcgcagcgcaatattcccgatacgagcgagaagaatatttgtttctacacccgggagatgcgctcgcagcttttgaagactgcggaaatagaaaaggaaatggaccgtgcgctcgccgaaggggagtttgtccattatattcagccgaaatacagtcccgacggaagccgcgttttggggggtgaggcgctggtgcgctggcagaaaaaagacggcagcgtcgtaagcccgggtgaattcatcccgctctttgaaaaaaacggtttcatcaaaaagctggacgaatatattttccgatgtgtctgtaaagagatgaaactccgtttggacgcgggattgcccgtcgttccgatttcggtgaacgtttcgagagccaatctcttccgtgaaaattttgcggcggaatatactcggatcaaggaggaaaacggcattcccgatcatcttttggaacttgaactgacggaaagtctgatgctggaaaataccgaagacatcttttccattctcggcgatctgagaaaaaagggattttgttgttccatagacgacttcggctcggggtattcctctctgaacgccctcaaagatcttcccgcagacgttctcaaattagaccgcaagtttttggaagaaagcgaggatgtgggcaagaacgaaacgatcatccgctttgtcatcgaaatggcgaaaaaactgtctatggtcacggtcgccgagggcgtggaaacgcaggaacagcttacttttcttcgggaaacgggctgtgacatgatccaaggcttcatcttttccaaaccgcttccgtccgaaaaattttacgcggtcctttcccgatagaggtcgcgaacgcgagcggacttgtaaaaagtttatcgattccatatcccccctgcgatgacagcgggggatatttatctgccgcggagttggcgccgaagcggaaaaacgtttgacagaaaggacgggaagtgataaaattttatacgaacgttcccgcccgggaatcttcttcgaaaaacggagatttccggggggaacaaataataaaaatgaggcggacgaccgccgaaaagaggtcttttgatgataaaagcggaagaatataaagaatttataatttcttcgttaaaagaaattatggcggtggacagcccgacgggattttccggcgccgtcaatcaaaaattggaagagatgctcaaagaaatgggctatcgtgcgcaagtcaccaataagcggctcgtcaaggtgtccgtggcgggcagaagtcacgataagaaaatcgccgtttccgcgcacgtggatacgctcggcgcaatggtaaggagcgtttccgccgacgggaaaatccgttttacccgtttgggcggtcccattcttcccacgttcgacggggagtattgccgcgtttatgccgagggcggaaaaatttatacgggtacttttctctgtgattcctgctcctgtcacgtctataaggacgcgggaacgctggaacgcaacgaaaataccatgtacgtccgtctggacgaggaagtgtcctccgccgaagaggtaagcgcgctggggatccgcacgggcagcgtgatagcgctcgatcccaaaacgacggtgacggagagcggatttataaaatcccgttttctggacgacaaagcgggcagcgtgtgtcttttgacggcgctccaagcgatgaaaaaagagtccgtaacgccggaatacgacacggatttctattttacgaactacgaggaagtggggcatggagcggcgacggtcggcggcgacgcggacgagcttctcgccgtcgatatgggctgcgtaggcgcggacctcgcctgcaaggaaacgcaggtttccgtttgcgtcaaggacgggcacggaccttacgactacgaaatggtggagcgccttctctcgctcgccaaagcgaatcaaatcgattttgccgccgacgtatatccctattacggctcggacgtcggcgcggcgtgggacgcgggcgcggacgtgaaaggaggtctgatcggacccggcgtccacgcttcccacggcatggaacgcacgcacgtgaagggggtttgcgccacgatttccctgctttgcgcctatctcggcttgtaagggatgccgacagacatacgtcttgaaacactgcgccgctttttaaacgaattttgcgacaggaggtcgctgccatcatcatgaaaaagcacgtatacgtcgccgcgggactcatattcgaaggcggaaaactgttcgcggcaaaacgaggggaaagtccctatccttatatcgcgcataaatacgaatttcccggcggaaaaatcgaggcgggagaagcggaaaaggacaccgtgaagcgggagctcaaagaggaactcaatctggacgtaaaggtgggaggactgttcgccaaaacgacgttcgaataccccgacttcgtcatcacgctctccgtttacgagtgcgaaatgctttcctccttcgtcttaaaggagcacgaaagctatcgctggatgccgcccgcggaattgaaggccgaggaatgggcgcctgcggacgcggatatggtggaatccatcaagcgggtcttcggagaataattcatggagaatatcattttgataggaatgcccgcctcgggcaagagcacggtgggcgtcctgctcgccaaagcggtcgggtacggcttcatcgacagcgatctggtcatacagtcgcgggagggcaggcttttaagccgcatcatagaggacgagggcctggaagcttttctccgcatcgaagaaaaaataaacgcggagctttgcgcggacaggtgcgtgatcgctacgggcggcagcgtcgtgtacggcgaaaaggcaatggaacatttcaaagaaatgggaaaaatcgtctatctgaaactctcttatgaagaacttgcggggcggctgtccgacctcaaaggcagaggcgtcgccatcaaagagggatttacgctcaaagatctttacgacgagcgagttcccctctacgaaaaatacgcggacgttacggtggatctggacggcacggacatcgcgggcgcgctgcgccgcgccggggaggcgctgaaaggatgaacggggaaaacaaaaagatcgccgtatacggcgcgggagcgatggggacggtcttgggcgcgcttctctccgagagccgcggcggggacacagtggatctcgtcagccgcaaccgcgcgcatatcgaagccatgaaaaaaacgggagcgcatatcgtctgcaaggcggactcccgggagtttacgacaaaggtaaacgccctttttcccgaagagatgacggagaactacgacgtcgtttttctgatgacgaagcagaaagagaacggagaaatcgcggaatttctcaaagggcgtttggcggaaaacggcgtcgtctgcacctcgcagaacgggcttcccgaagagagccttgcacgggtgctcggcgaggaaaaggtgtacggagccgtctgcgcctggggcgctacgttcgtgggcggggggacggcggagctcacttcgcaaaggtcggcgatgacgatgcagatcggaggctgcgcctccaaagcggatagggcggacgccgttcgggaaattttgagtcggtgcggcatctccgtttccgtcacggaaaacctttcgggcgtccgttggagcaagctggcgataaacgcggctttttcggggctttccgtgctgacggggctgacgttcggggagattgcgcgccggcgcgggacgcgcagacttgcgttggaaattttgcgggaatgtttttcagtcgcttccgcttcgggcgtcacgctcgaaaaaatgcagggacacgatatggaaaagctcctggggaaaaagggatttttcggaacgcaaaaagcgctgttcgtcctgccgatcgccatgcgcaaacataaaaatctcgtttcggggatgctgaaagacatagaaaagggcagaaagtgcgaaatcgattatataaccggagctgtctgccgtcagggagataaattcggcgtcgaaacgcccctttgcgacagggtgacggagatcgcgcacggtatcgaaaacggactttacgaaatctcttacaaaaatatcgagtttttttgataagcgtttaaaaatcctgtttgtaggttatatttcaagaaaacgcagaggaagtactttcgatgaatatttttttacattatattctgccgcccctcgtcggagcggcgatcggatacatcaccaattggatagcggtaaaaatgctctttcgccccctttatccgaaatatctcggcaagtggcggcttccctttacgccgggaatcattccgcgccgaaaagacgccctcgcaaaggcgatagggaaagcggtgggcgaggaattgttgacgaaggaggacatccaaaaggctttttgcggcgaagagaagcgcgcggccgccgtcacgaagctgacggacggcgtaatgtccgccgcggagaaaactatccgcgctttggcggaaagcgcggtttctccgcaaacgttcgaggaaaagaaagccgatctcgcggagaacgtttccgaaaaagtcgctctcgcgcttcccgaaatgcacatcggggacacgattgccgaagtcgcgggaaacgctgtgctggaaaaaataaaatcttctccgctcggaatgtttgtgggcgagggcaccgtccgttccgtcgcgcagtcgatggcggggcggatagacgaatatctcgctctgcacggcaaagaaaaattgctgcccgccgtcaaaaaagaaatagattccctggcggaagcgccgatagaaaacctgcttcaaggagtggggctggggcgggaaagcgtggaaaaggcgatcggaacgctgtacgataaggcgctcctgcccgcgatcggcgaagcggctgcgtccttcgatattccctcggaagtagaaaaaaagatcgggataatggacgtaaaggaactcgaaaaactctgtctttccgtcatgaaaaaggaactcaacgccatcacctggctgggcggactgatcgggctgattctcggcgtcgtcaatattttcctgtaatcggttgacaacgaaagaaaggcgtgctaaaataaagtgaaattgacaaacggaaggtaaattatggatttgaataagcttgcggaggcgctcgtccccgacgaaaacgtaaaaccgctcgaatattacgaaaagctctatcccgagcgggatctccccaagggggcggaagtcacccgcctcgcgcccagtcccacggggtttatgcatttgggcaatctttacgtcgccatcgccaacgaacgcgtcgcgcatcagagcggcggcgtgttttatcttcggatagaggacacggacgaaaagcgcaaggtggaaggcgcggtggaggtcattcattcctccttgaaatattttggaatcactttcgacgagggcgcggatcttacgggcgattacggtccctattatcagcgtcagagagcggagatctatcacgcttacgcgcgggatctcattcgccgcggactcgcttatccctgcttctgtacggaagaggaactcgaaaagacgcgggaacatcagacggaaaataaattgctgcccggttattacggggagtttgcaaaatgcaggaatcttgcggaaaaggaaatttacgataacctcgccgcgggcaagccttacgtcatccgcttaaagtcgcagggggacgtcaatatcaaacgcgagtttcgcgacgccgtaaaaggggagatcaccgtcaccgaaaacaatcaggacgtggtcattttaaaatcggacggcattcccacctatcacttcgcgcacgccgtcgacgatcattttatgcgcacgacgctggtgattcgcggcgaggaatggctttcctccctgcctattcatatcgagcttttcaaggcgctcggttttcgtctgcccaaatacgggcataactgttccattcagaagatggacggggaaacccgccgcaagctttccaagcgcaaggatcccgaggcatccctcacgttctatcgggaacagggatatcatccgctcgccgtaaagacgtacatgatgacgcttctcaattccaatttcgaggagtggatgctgaaatttcccgacaaaccgttggacgaattcaaatattccatcggcaagatggggaaaagcggcgctctgttcgatattttgaagctcaacgacgtggcgaaatccgtgatgtcggagctttcggaaaacgagatgtacgaattcctcaaaagctgggcggacgaatacggcacggaaaccgagaagggattttttgcggataaagaatatatgctgaaagtgctcgcgctctgtatgggcgtcggcggcaaaaagcgccgcaaggattttgtctttgcaaaacaggcggtcgagatgatctcttacttcttcgattcctcctttgcgccgaagtatgcttaccgtttcgattccgcgctcgtcaaatgcgttttaaaggactttaagggggcgtacgacgcggcggacgattccgccgcatggtttgccagggtaaaggaaatcgcctcgcaaaacgaatttgcggcggacatgaaggcgtataaagaaaacccgtccgcttttaaaggcaacgtttcggacgtcgcggaaatgctacgcgtcgcggtcacggggctcgcgaatacgcccgatctttggacgattatgcgaatcctcggcggcgaacgggtcgcaaagcgtttggacgcggcgatacaagctctgtaaatcggaagtttttttcagaaatagtaaatcccgccgcgtaaattttacgctgcgggatttttcaaagttcctatgtttaaacagacgaaaaagggctatgcgttttcggcgtttaagagatctttcatctcgtattttcccgcgggctttcccgaaaggaatttggcggcgcggacggcgcccgcggcgaatacccgtttgctcctcgcgctgtgggaaatggtgatgatctcgtcttctcccgcaaacatcacctcgtgttccccgacgatcgtgccgccgcgcacggcgtgaatgccgatttccgatttttccctggcgccgaccatgccgcttctgccttccacgtagcgcttttgcccctcgaaaacccgattgacggtatccgccagcatgagtgccgttcccgacggcgcgtcttttttaagattgtgatgccgttcgacgatttccacgtcgaacgcgtcgccgagcacctccgccgccgctttgcaaagcgcctgcatcagattgacgccgagggaaagattggcggttttaaaaatcgcgacggaagcggaatactcgtcgatgagttttatatcctccgccgtaaagcccgtggaggcaagcacgataccgatatgtttccgctttgcgaattcgaggcgttctttaaggttttgcggggacgaaaaatcgatcatcacgtcgacggcctcggcaacgtcggaaaagttttcgtatacgggaatcccgatctctctgggaaataaatcgacgccgcagacggctttcgcctctttatcgccttgaagaagggaaaggacgttgccgcccatcttgccgcacgcgcccaaaataagcacattcgtcatgcgttcacctccaaaccgtaagcgagcatcgcggcgcggagcttttctttgttcgcggcttctatttcggtgaggggagcgcggggcacgcccgctttaagccccatcagatccatcgcggccttggcgggaatgggattcacctcgataaaacacgtctgcgtcaaggggagaattttatcgttcagggcatacgcttcttccgtttttcccgcttttatcgccgtatacattcgcttgacgtctgcgggaacgagattggaaactacggagatcacgccgtcgccgcccacggcgagaatgggcagattgagcgcgtcttcgcccgaatagaggtcgcattttccgcggaggagccgcagcgtttccatggtctgcgccatattgccgcccgcgtccttgatgcccgccatattggggatttccgcaagcctctccatcgtcgcgggcaggatattgacgcccgtgcgggagggaacgttgtaggcgatgacggggatattcaccgcgttgcagatactttcgtagtaggcgacgagtccgttctgcgtgcatttgttgtagtagggcgtaacggcgagaagtccgtccgcgccgatctcttccgcctttttcgcggctttttcggcgtgcgccgtacaattgctgccgcagccgaacaccaacttgactctgcctttcgcctttttcacggaaaattccatgacggaagttttttcttcctccgtcatcgtcgccggctcgcccgtcgtgcccagaattacgagcatatccgtgccgccggaaatctgcctttctatcatttccccgaaagcgttgaaattaattccgccgtccgccccgaagggggtgatcatcgcggtggcggtaccgctcaaaaatcctttcatagtattactatattctccgaatcgctgtttacgatagctttttggtcttgcctgaaaaaattgttcagtcgaaatatccctttgcggcaagcagttctgcgagaagcaccgcgcctcccgcggcgccgcgcagggtattgtgggaaagtcccacgaatttatagtcgaacacgccgtcctcgcgcagccttcccgcgcagacgctcatgccgtgtccttccatgcggtccgtctttgtctgcggtctgttgtcctcggtaaaatagcggataaactcgcggggcgcggagggaagggcgagcttctgaggctctccgcaataggttgcccaagcgtcgagtatctcctgcctttcgggtttgatttcaaaggaaacgaacaccgccgccatgtgtccgtccgaaacgggcacgcgaagacactgcgccgtgatctgcggcccggaggcggaaagtatttttcctccctcgacgcgtccccagatttttaagggttccctttcgctcttttcttcctcgccgccgatataggggatgacgttgtcgacgatttccggcatcgtggcaaacgtctttcccgcgcccgagatcgcctgataggtacacaccgccgcatttttgattccgaattttttgaggggatgcaggaggggcacgtaggattgcagggaacaattggattttacggcgatgaagccccgtttggttcccagccgttttctctgcgcgggaatgacgtcgagatgttccgcgttgatctcggggatcaccatgggcacgtccggcgtaaagcggttggcggaattattggatacgacggggatttcgcgtttcgcataagtttcttcgaggcgccttgtctgctctttatccatattgacggcgcagaagacgaagtccacgcgctttgcgatttcgtctatgtccttttccgcgtcgaaaacggtgagggaggcgaatgcggcgggaacgggccgttcaaacgcccattttccgccgacggcttcccgatacgtctttcccgcggagcgccccgaagccgccagcgcggtgacgcgaaaccagggatggctttcgagaataaggagaaaacgctgtcctaccatgccggtggcgccgatgatgcctacgttgtactgtttcatagtatactcctttgaccgacggcgttttgtcgcacggcggaatttttatcgttaaaagttatgtctgaacaaaaaagaggaaaagcggcggggggaaggggaagttatcatggaaatagcggaagccgtcgggcggggcggcgagttcccgggagcttttctacgcctccgtcaaaggaaaaatgcctgaaaaaggcgcttcggtggaaaaattctgtccgcttggatttttcccgaagggaaaggaggcaggctcttttgcgcaaaagaaacgaaaagagagcgcatttcgccgcaagacgttcaggcagggtaaagaaaaaagacggcataccgccgtcttgcgctttaagggactccccgaaagaggaggtcggtaaatagcgcttcacggacggtgacagtcacacgggtcttctcccgtatgcccagcgcggggggaaggcgccgcgcttcggcggagataccctttccgtccgcctcgcgcctcgacaaaaccttcccgttttgtcttcgcggcgggtactcatgttcgtccgctcctctatttaacgagtctattttatcatacgcggctgcaaaagtcaaagatttttggcgacttgaaaattttatttaaattttttccgtattttccttgaaataatcataaatttgtagtagaatagaaagcgtaggttttcttataaaggggattctgcgtttcggcgcggattcccgataaaattttttggagttttcacacatggcacaagaaaagaaagggctgattgcccgtatgctcgaaggcaaggaaaagagcgaggaatacgcgagaagtactttgcccaccaaccgctggcagcttttttgggatatcttcaaaggcaacttcggtaaaattttcaaagtcaatcttttaatcctcatcttcttcattccgtttatcgccattatcatctttcataatgtcgcgttgcagcaatacgggctgatttttcctttcggcgccaatctcaccgtcggctatcccgctatccccgacaccgcgggtttcgcggaaatgctcgcccttcaacaggacgctcttttatacggcgccttcgtcgtcgcgtcgtttatcgccgccgtagggctggcgggcgggatgtacgtcatccgcaacatggtctggacggagggcatttttgtcgccaacgatttttggcggggcgtcaagctcaactattggaacgcgttgcaggcagccgtctttttcagcgtcgtcatgctgatatgcaaatctctcatcaatattacggaattttcgctcgccatgcaggaactttctaaggcacagcgggtatggtttaaaatttccgaggcgttcagcggaatcgtcatcgcggtggcggcgatgatgtccctttggatgatcgccctcggcgtcaactacaaacagggcatctggacgctcatcaaaaactcctttctgatgaccatcggtatgcttccccagtctttgtttttcggcgttttggcgctgcttcctttcggaatctttttcttgggcggaagctggtcgctctttacgatgatcggcgcgatgctgttgatactgttcgcgttcgcgtacgcgctgctcgtgtggctggatttcgcgcagtgggcgttcgataagttcatcaatcccaaaatcgagggcgcgaaagtcggcaggggcatttacaataaggacggttccagcgcgctcgacggaaacgaaagcgccgcggcgatggaatacaagcgcgcccttctcgcggcgggaaaatccaaactcgtttcccgtcccatcaagcccatcgacgactctttgcaggtgtacgagcttccctccgcgtttacgcgcgaggacttgcagaagctgcgcgacagcaagcagaatatcaccgaggacacggtcgcttacgaagaggaacacaaaaacgatttgaaatacgtggaatacaacaagcagttcgaggagcgcgagaaagcgcttcaagaggaaacggataagaagggcagaaagaaaaagcgcaagccgcccaagatgctcggcgaataaatcgccgggcagacgaaagcgctccggctttttgtcgtcttgcttcgagggaggatatcatggaaaaaaaggcggcatatacgtgtcttgccgaatggttcgaatatctgaacgacgactgcggctatgaaaattggtcgcagtatttattttcgcagttaaagcggtttcccttgcgttcgggactggacatcggctgcggcagcgggcgtttcacccgcgcctttcagcgggcaggatacgagatgacggggctggacgtttccgccgaaatgctgaataaagcggaggaaacggcgttaagggaaggagtgaagagcgagtatctcctcggagacatctcgcgcttctcctctccccgaaaatttgattttgccctggcgatcaacgactgcgtcaactatattcccaaagaaaaattgcggtcggcgtttaaaaacgtgcgccgcgcgttaaataaaaacggaatatttcttttcgatatcagttccaaacgcaaattcctcgaaaagattgcaaatactgtttgcgcggacgaccgcgacgacgtcacctatttaagcttcaacgacgtcgaaggggacagggcgatcatggacgtgacgctctttgtcaaacggttcgacggcctattcgagcgtcgggacgaaacgcatatacaatatatatatgaagaatcggaaatttgcgccgcactttccgattgcggctttcagctcgtcggcgcggaaggacatctcggcgaggagaaaagccaaagcgaccgcatctgttttttagcgaaaaaggcgtaagggattatgaaaaacgtattgaggacattgatttacggggagcagatttctctgactttgctcgacgccacgcagacggtgaacgaagcgatccgcctgcacgcactctcccgccccgcggccatccttttaggcaagacacttgccgtcatgacgtatatgagcgcctgccttaaagaaaagacgggggaggtttcggtatccgtcaaggggaacggcgcgggcggcggcgtttgcgtttcgggcgattacgccctgcacctgcgcggttatatcgaagatgcgcacgtgccatcggtcgcgggcgaaacggacgaggaagccgagcttcgctgtctgggaaggagcggaacgctgacgatcgtccgcgacgacggttacagccgtcccttcgtgggcgcctgcgcgtttcccgctgcgggcggcgtggacgaagcgtttgaagaatactatcgcgtcagcgagcaattgccgacgcatatcgcgtccgaggtacgattggacgagtcgggcgcctgcgcgtttgcgggggcggcggtcttgcagccgcttccgtttgcggacgcggaaactctggaacggctgccttcccgtgcgcggctcaaaaaaataacgggggaaatttcctctctggggcttaaaaaatgcgcggaaatccatttttcggcaaaagaagagctgttgaacgcgtgggaagccgcatataaatgtcattgttcgaaagaatatctggcgggcgtgctcgtttccttgggaaaagcgcagctcgaagatattttaaaaacggacgggaaaatcgaagtacattgccattattgcaataaggattatcgttttacgcaagaggatgtggaaaaattgtttccgtaaatgcggggaaaaggggattgcaagggagtagtaatgagagaacagaaggcaaagagagaacaaaaggtgctgaaaatcgatttcagccgacgccgcctgcgcgaacgggcggaaaaatattacgacgaagggaattatctctccgcccttcgtttcacatacaaggaaatgtccctgtacggcggggacggggacatctataccatgctttcggacatttacgaaaacatggaactctattcttccgccgtcaattgctggttccgtttcatggacaattgctcgggagaagatctccccgatatttacgagggactggcggtaaattatctcaatatgggcaacgaggcgcagtccgccttttactataataaaatgatagacgccgacgacgagctgacggaagagagcaaggcggagatagcggaaacgttcgcgcaggacaaaagcagcaattttcgcttcgtctacccgccccgtttggcggattattccaaggaaacggaggcgggcgcgcgctcaaaaacggcgactgcaaaaaggcgatttccctgctctcccgcgtggaaaaaggctctgcggactacgaaagggcgagggagatgcaggcggtggcctatcttctttccgaacgttccgaggaagcggaaaaaatctgtctggaactgacggaggaaaatccttacaatgtccaagcgctctccacgctcgcggcggtgtataccgaacagggcaggacgaaagagagtcgggaattggcgctcagactgatcgaattcaaggacgtaacgcccgacgagatctataaaatcgccaccgtctgttgcgaaaacaacctgcataggcaggcgctcgaaaagttctgcgaattggaaaaaatcattccctatgacgggaatatgctgtattttaaaggagtcgcggcatataaaagcggggatacgcccctcgctatcgatacgatggaaaagctgtgtacgatctaccccgacgcggcggtggctgaatactatctcaaagcgatgcgccgttacgaagacaatcccgaatttatgcccaagccggagcccacttacttttatcgcgtgccgcaggacgagagagccaatcgctgccggacgctgatcaagatcgggaaatatccgcgggcgaacgcggaactcttcggtacgctcgccctgcgggaagggtatttccgttggtgcttcgacgaaatggacggcatggaacacgatcttcaatatctcgccatcgtcgtgggagagcacgcccgtgccgacgaatttctgcgcggcatccttttggactgcgaggtgtcggacttactcaaaatagaattgctgcgccttctgtatatgcgcaacgaggaaaacggcttcggggtggtcatctgcaacatatacagggatatccatatgctgcgggtgaagatagggcggcggcagcataaaaagttcgtggaggcatatgcgaaagccgcatcgaaattcaccgtcataaacgacgtttacggaaagaaaatacacgatatgacggaattcgtgtacgaggtatttcaaaagaaagattgttgggaactcatcgataattccgacgacctcgcctgcgccgtctatctgttgagcggtttgaaagaagtcggcaaaaattccaaggcggcagcgcccgcgttcgacgccaaggcggaaaacgtagatcggatcatggccgccgccctctcaaaataaaacggaatccgcgccaaggaaaggagaaaaacaaatggaacctgtcgacctcgacgggcttttcgacgaaaagctcgcacagtacatggaagaaaacaagggaaaatacaccgaaaagcaatgggaaaacatcattcccaaactgtataaaaagttcggggacacttacgtcgccaaaatcaaagcgacgccgaaagaatactatgcgaagatgacggacggggaattgacggaaacgttcgcggcgcatcttgcgcaaaaggttcccatgcccgacttcctctgctcggaaatagaagaaagaaactgcatcgacgccctcctgcccctgctccgcgaaggggacggggaaacggtgtcttacgcactcaatctcatcggcgcggacgcacgggcgtttcccgattatttctctatcattacggaggagaagttcgacgaggacatccgcgacgccgcggtcgaaaagctcaaagagaacgccgacgccgcgctcgcagctgcgctcgtttattataaagagggcaggtcgaaggagtatatgctggaaattctctcccgcgccaaaacgcgcagcgaggagatctttcatatcctgctcgacgagtttctctcagacggcagccgggtgcctatgcacgcttcctatctcgccgcttacggcgacgagcgcgcgcttccgtatcttcttaaaaagatagaggacagggagatcgggttcgtggaatttcaggaactcaaatacgccgtcgaagcgctcggcggggagtataacgaaccgagggatttttcggacgacagggattaccgcaccatagaggacgcctctctaaaagagggattcggctttgaaaaggagcttcccaagagctgaaaaggcggcttttggacaaaataaaaaaacgcggataaaattgcttcataaaccgacgtatctccgcatatattaaaccgtaacgtttgaaagcggagattttttgcgaaaacgcaaggcgccgcaaaacacggttggaggtcggtatggaaaattacagcgtttacgaagacattgcaagccgtacgaacggcgatatttacatcggtgtggtgggaccggtacggacgggaaaatccacctttatcaaacggttcatggaagagcttgtcattccctccgccgaagattcgacgcgggcggtgatgacggacgaactgcctcagtccgcggcggggcgcacggtgatgacgacggagccgaaattcgtccccgcgcaggctgcgaagatctccattcgggagggcgctgaggcgtccgttcgtctggtggactgcgtaggctttgccgtagagggcgcgggcggtttcgaagaggacggctcgccccgtcttatcaagacgccttggagcgatcaggccatgccctttgaaaaagcggcgaagctgggaacggaaaaggtcatcagggaacattccaccatcggcatcctcatgacgacggacggcagcattacggacattccccgttccgcctacgtcgcggcggaggaacacgccgccgcccagctcaaagagatcggcaagccgttcgtcattctcctcaactgccgccagcccgaaacgcaggaaacgctccgcgcgtctttggaggataagtacgccgttcccgtgctcgccgtcaacgccgagcagctcaccgagcaggagatcctcgaaatcatgcagaaagtgctcttcgagttccccgtgacgggcatcgacatcaaacttcccaagtggatacaatccctgcccgaaagcagcaagacggtatccgccgtcctgtcgaagctcaaaaaggcggcgcccgcgctcgtgaagatgaaggactgcctgacgctcgaaaatctcttcggagaggacgataagtttatcaatcccgacaatatcgccatggaactcggcaaaggcaaggcggaacttcgcatcgacgccaaggaaggacttttctacgaggtgttgagcgaggaatgcggggagagcatcgcggacgatttctgcctgatgcgctatgtgaaatccctcgccgaagccaagcgcaattacgataagatcaaggaagcgttcgcggaagcggaggcgaacggttacggcatggtcgctcccagcaccgaggacatgacgctcgaacagcctaagctgatcaaaaaaggctcgggttacggcgtcaatttcaaggcgaccgcgcccagctatcacatcgtaaaggtagaggtgacgggggaggtcaatcccatcatcggcactcagcagcagggagaggatttcgtcagggaaattcttgccgattacgaggaacatacggataaggtatgggatacgaacatttttggcaagacgcttaaagacctcgtcaacgaaggtcttgcgggaaagatcgaagcgatgccgcccgatatccgcaaaaaaatgcgcaggacgatcacacgcatcgtcaacgaaggcaggggcggggtcatctgcatccttctttaacgcaaagcgcataaaatccgaaaaaggggatatacttctcttaaattcatttttcggagaaactgttatgagcaaatcttcaaaaaacggaaaagtacctaagatgacggaagaacaatatgcggaatacgtcatggcattaaaggacgaaactcccgtgaaaggttacagagagatcgcggaggggcgccataacgctcctcatctcgatgcggagcatcacgggcaagcgtgacggaggcttccgcgcgcaatgaaagtaaagaggggcgcagcacgtcggcaaacggcggctgtgccctttcccgtttttttaatcggcgcaggggaaagttgtttttgtcggcgggaaaagagagaaaaaagggaaaaaagaagcttgatcgagtacatggttgtaattttttagcaaatttttatgctttgcgggcagaatttttctcaaaacccttgaccgagagtttaagatgtgctataatgagaagcgaaataaaaaagtatcggattttctttttgcggcgtttgttttttctctcgtccgatacatggcatatcgttccgattttcagattctttttcggggaataaggcgattctctttacataagccgcagcatcgctgcggggaaggggtctgtccgtcggcagagaaattgcatatttttataaagcgagaaaaaatcttcaaagcgcgcgcaaaggtatcggaaaattcaaaaagcatttcttttcggataaaaattaaaaaatctgaaaaaattttcgccaagggtatttacttttcgtcggaaatggtgtaaaatgatagcgatgtaagcttatccgatttttttcgcaagcgaacaagataaattgaggtgtaatatgacggattacggcaacaacaatcagaaacaagctccttcttacgcttatgcgaacgtaccgccgcgggggaatgaaacggcccttatgatcgagggactgtataacggcatcgcgtacgatctgcaaaagatgaaaaaagagttgatgaacgaactcaaatacaacgcgctgcaagccagctcgctgtatcagtccgttcaaaaagaaaccaactccgccacggaaacgaatgcgcagaccgtgcagtcgatggtccgcgagctgaaatacggctatcagcagaaccagatgatttacgaatcgctctcctccgttctgaccgacgacgttctttccaagctcgaaacggtggaaggcaaggtcgaactcttggaacagatcgacagagcgctcgcggagatcaaggataagctcgacgagctcgtttcccgtcctgaacccgattacgattcgattgccgaaacggtgaaggaaaaagtcgtcgaggcgcttcccgtgcaggaagagatcgattacgataaaattacggaatccgtcacggaaaaaacggaatcgagcctcgtcgcccacaataaggagatcctcgacgcggtagcggcgattcccgttgcggaaaacgtggattatgcccgcatcgtggaggaagtcagcgaaaaggtgctcgaaaagctgcgcgattcccttcctaaggaagcggagagcgaagccgcgggcgaagtttccgccgcaatcgattacgacagaatcatctacggcgccgccgagaaggtagtggaatccctgccttatcccgaaaaggtggactatcgccgcatcgacgagaatttcctcaaagcggcggagagcgtcaaagcgcccgcgctcgacgaggaggcgctgacggcaaacgtcgcggcggctgtggcgcagtcgatcgcggaaatggataccgacgcgctcgcggaggcggtggcttccaagatcgtcctgcccgaagcccgcgccgaggagatcgattacgataagctttccgatatgatcatcgccaagcttcccgcgcccgctcagcccgaaacgatcgattacgatctgctcgcggaaaccatcatcgcgagaatgcccgcgcccgtcgagcccgagcccgtggattacgacaagctcgcggacgccgtggtcgcgaggatgcccgaggcgatcgattacgaaaaaatatccgaaacggtcgcggaaaaagtgcccgagccggaaactttggattacgtcgtcatggcgcagcagatcgcggaaagtatgccgcagcccgaagaaatggattacgctgcgattgcacagcagatcgcagagaatatgcccgagcccgaggcgatggattacgccgagatcgcgcagcgcattgcggaaaatatgccgcagccggaagaaatggattgtgccgtcgtcgctcggcagattgcggataaccttcctcagccggaggcgatcgattacgccgctatggcgcagcagatcgcggagaatatgcccgagccggaggcgatcgattacgtcgtcatggcgcagagtattgccgaaagaatgcctcagcctgcggagcctgtcgattacgacagagtatatcaggcggcaaaagcggcggaaacgattcccgatcccgtcgattacgaccgcatcgcggagatcgtcgaagccaaagtttcgaacgaggtcgactacgacatcgtggtggacgaagagggcaagaaggatatcgcgcagggcgtggcgggggcgctcgattacgaggaactctccgatagggtggcggaaaaggtgatccttcccgaagtggaattgcccaagcccgaggagatcgactatgatcttcttgcggagatggtggcgaacaagatcgtgcttcccgagatcgaactgccgaaggcggaagagatcgattatgatttgctcgcggaaatggtggcgcaaaaagtcgcccttcctcagatagaacctcctacatacgacgtggtggtcgacgaagacggcgccaagtctatcgcggaatgcgtcgcggctgcgatcgatttcgatacggtcacggataagctggcggagaaggtaaaagttcccgctcccgaaattgtgcttcccgaacccgaagttctcgattatgaagctctttccgataaggttgcggaaaagatcgtccttcctcagcccgaaaagacggagatcgactacgagcttctctccggcgaagtcgccgataagatgaacgttccttctttcgatattttggtggacgaagagggcgcggaaaagatagccgacgcggtcgtggaaaagatgcgcggatgctgtcctgcggcgcagcagacggaagagcccgcgcagacggaagaggaaaccgccgtagaggaacctgcaaacgcaacggaagaacccgtggaaaacgcagaggaggaaagtaaggcggaaactgcggaggaagtgacggaaacaacggaagaagtcgtttccgaaacgccggcggaggaggagtccgcgcccgccgaggaagtggccgtcacggaagaacttgccgtcgaggacgccgctcctgtcgaagagcctgttgaagagcctgcggaagaaaccgccgaagaagcggaggcgcccgcagaggaaacggcgtcggaagaaatcgcggaagaaccctctcaggagcagacggaatccgttgccgcgcccgaggaattgctcgcggaagaaacgaagggagagattctctctcagtcggaatcgacgatagaaacggaaatcgccctcaccagcgcggaagccgcgatgtatgaagaggtggacgacaatctcgtcgacgcggatacgggattggtcattcgcttaaagcgcagctttacggccaagatgaagcagagcgatcccgcggtgaagcattattacagcgaggtaaagaacgagctcacttcctataagaagctcaattcgaatctcagctggcacggagatcgattcaatttcggccgcgacagcgtcgccaaattaaatatctgcggaaagacgctgtgcttctatctggcgctcgatcccaatgatcccgaatataaagccaccgtatatcatcaaagggatatgagcgggcaaaaggcctatgagaacacgccgttcatggtgaagatcaagagcgacgcaggtcttaaaaaagccttgcggctggtcgggttcctggcagaaaagctcggcaccgaaaagcgggagaatttcgagcctgtcgattacgtggaagaattccgtcatgaatcgaccaaacagctattggaagaaggcttgatcaaagttaccaaagaaaagaaagttgtgttggatttcaattaatttcggttagcggaaatcatacataagaataagaaaaggagagctgataattcttattttcggctctctatttcatgaaaggacaaacagttctttgaggagaaagttagacaaagtgaacaacagaaaacaagaccagaattcttccggcaggcgttttgcggcggatacctccgcaggcgcgtcgggaggcgaaacgaaaaagcgcttcgcagcaaacagaaacggagctcgttccgtcggaggcggtacgggcacgtccatgcaggcaaagtccctcagaacgggggcggacagggaaaacaaggaatcccgtcccgcgtataaacagggcgcgggaacgaggacggaggatagggaaaaatattccgattcccgccccatagaacgcaaaaaatccgtttccgcccatccctctcaccgcggcatggcgcagtcggacatagaaaacgcggcgattaccgctgaaaagaaaggacgcggactcaaaaagaaaaagcccgtcaaaattttgttcctcggcggcgtcggagaaatcggaaaaaatatgaccgccatcgaatacggcggcgatatcatcatcatcgacgcggggctcacctttcccaataacgaggatatgccgggcatcgatttggtagtccccgacatttcctatcttgtccagaataaggataaggtgaaagggattctgctgacgcacggccatgaggatcacatcggcggcattccctatcttctgaaagaactcaatcccggcactcccgtttacggcacgaaactgacgttgatgctcgcggacaataagattcaggaacaccgcattcaaaacgttacggagcgggtcgtacagccgggcgataaggtgaagctgggcgtattcgaagtggaatttatcaacgtcaatcactccatttcgggcgcggtggcgctcgccgtcactactccgtacggactcatctatcacagcggggatttcaaaatcgatttgacgcccgtcgcgggcgagcctatcgatctcgaacgcatcgcagaactcggcaggcaaggcgtcctcttatatatgggcgaatccacaaatatcgaacgcctcggctataccatgagcgaaacggtcgtcggcactacgctcgatcatcttttctcggaaaatatgaatcgtcggcttgtgatcgccacgtttgcgtccaatgtacaccgtttgcagcaaattatcgatctggcggtgaagtatcgccgtaaagtcgccctttcggggcgcagtatgttcaaggtcgtggacgcggcggtgaagatcggcgaactcaaaatccccgaaggagtgctcatcgatatcgaaaagagcaaaaacctttttgacggggaactcgtcatcgtttccacgggcacccagggcgagccgatgagcgcgctcacgcgcatggcttcgggcgatttcaataaagtgaccatcggttctaacgacaccatcatcatctccgccacgcccattcccggcaatgaaaagatggtgtaccgcgtcatcaataacctctataaaaagggcgccgacgtcatttatgaaagcctcgaaaagatacacgtttccgggcacgcctgccaggaagaacacaagatcctccacaaccttttgaatcccaaatttttcattcccgtccacggcgaatatcgtcatttgaagcgccacgcgctcttggcggaggaactcgggatgccggaacgcaatattctgattaccgaaatcggcaactgcgtggaactgacggacgaaacgatcaagctcggtgaaaacttctctgcgggcacccgcctcatcgacggcgaaggctttgaggattacggcaccagcgaggtgatgaaagatcgtctgagaatgtccgccgagggaattttcattatttccctggcggtgacgggcaattatgtcatcgacgatccgatcatcgaaagccgcggctacgtgtttgcgggcaaccgcgatgcggataaagagatcaagtcggtcgttcataaagcggtggaacaatacgattacgaaagcggaaataaggacgaactcgcctcggcggtcaagaaggccttgaagaattatattttcaaaaagaccaagcagtcgcccctcatcgtcgtatccgttctggaagtataatttaaaaacacaatcgggcggaaaggaaaatgaaatacgcggcggatttggtacagcttcatatcgacgagcggatagaacggctccgcggggaggctctttcccgcggtatacccgtagcggataacgaaacgctgaattatttattgttgatgatttccgcaacgcggcccaaacgcattttggaaataggcacggcggtggggctttccgccgccgcgatgctgacgcgccttccggaaacgcacgtcaccaccattgaattggaggaggaaaggtacgcggaggcgaaacgcaattttgcctctctggggcttttggatcgcgtcacctgctacttaggcgacgcgggcgagattctttcgatgatggacggttgtttcgatttcgtctttctcgacggacccaaggcgcagtacgaaaaatatctgttcgatttaaagcgcctgatgaaggcgggcagcgttcttttcgccgacgacgttcttttatacggctgggtgagcggggcggaacccacgccgcccaagcgccgttccatcgtcgataaaatccgcgggtatctgaaagcggtgacggaggatacggattttttgacatccgttttggatataggcgacggcgtagccctttccgtgctggtggcggaggaagcgaaaaacgaagggaacaaaagatgacggaacttttggcgcctgcgggcaattatgcaaaatttcagacggcgatgcacttcggtgcggatgcggcttacatcggagggaaaagtttttccctccgctcttttgccgacaatttttcggaatcggaacttcgctccgccgcagagtacgcacataagctcggcaggaaggtttacgtcgcggcaaatatttttgcgcgcaacgcggattttgcggcgctggacgagtatttccgctttttggaaaaaatcggcgcggacgcggtcatcgtcagcgatcccggcgcggtgtatcggataaaaaaagtcgcgccgcggcttcccgtccatctttccacgcaggcgaacacgacgaataaatacgccgtgaaattctggctggaacagggcgtttcccgcgtcattctcgcccgcgagctttcgatcggagaaatttcggaaatcaaaaatttcgtgccggaaatggagatagaaacgtttgtccacggcgctatgtgtatttcttacagcggcagatgcctcttgtccgactatctggacgggcgctcctccaatcgcggcgcgtgcgtgcaggcgtgccgctggaagtacgaagtgcgcgcgctccctcccgcaaacggcgaggcgggatggcttcccgtcgaggaggacgagcggggcacctatcttttcaacagcaaggatctcaatctgatttcccgcctcccggagcttacggccgcgggcgtagattctttcaagatcgagggcagaatgaagagcgagtattatttggcgacgatcatcaacgcctatcgccgcgcgctcgacggcggcgtgacgccgcggcttgaagacgagctttgctgcgtggcgcaccgcgattatacgcagggttttgccgatgggaagaacgcctccaccgtccattattcggatagtcagacaaagggggaatgcgcgtatatcgccaacgttttagactggcgggagggatttgccgaggtggaaatgcgcaatcgcttccgcgcgggggattcgctggaaatcctttctcccgacgaaaattttgcaaaggcctttatagtcgaggaaatttacgacggcagcggcgaacggacggacgacgcaaagctcgtgcaggaaatatataaaatccgatgtccctatcctgtccgcaaaggggatttcctgcgccgcagaacggatttttctccctctcccgaaaggagcggctataagaaaaacttatgaaaaggaacaaagaggactccccgcaaaatcgttcggaaggaacggatggcgaggagtttttcttttacggcgggaaaatttgcgattttgccaaaaaaagcctgcccgtcgtttgactccgcggataaaaaagggtataataatagcataaattttacagatcggggcaaaacaagtcgtatatgaaaaaaattctcatgatagcgacgggcggcacgatcgcctcccgcggcggcgaggacggactcgcccccgaaatggattccgacggtcttttgggctgcgttcccgaaatccgggatttctgccgggcggattcccttcaaattttcaacatcgacagtacgaacattacgcccgaccattgggtaaagatcgcgcaaacgatcaaggacaattacggcgcttacgacggctttgtcatttgtcacggcacggatacgatggcgtatacggcctccgttttgtcctatatggtacagcattcccccaagccgattgtccttacgggctcgcagaagcccatcgacagggaggatacggacgcaaggataaatttgcgggacagttttttgtatgcggcttcggagaaagcgtccgacgtcgtcatcgtctttcagggaaaggtgattgcgggaacgcgcgcgaaaaagatccgcaccaagagctttaatgctttcgacagcgtggattttcccgaactggcgcgtatccgcgacggaaagatcattccctatatcgtcgctccgaaaagagcgtcgcccgagttttattttaacttaaaccgcaaagtcggactcatcaatctgacgccgggcatggacagcgaacttctggacgtctgtttccgactcaacgacgcggtggtgctttcgggctacggcacgggcgggattcccgaaggggaatattacggcttctacgacgtcattgaaaaatggaaagagaaaggcaaaacgctggtggtgacgacgcaggtgcagagcgagggcagcgatatgagtatctaccgcgtcgggcggggactgaaaaagcgtttcgcgctcctcgaaagttacgacatgacctacgaaagtattttgacgaaactgatgtggattttgggacggacggaaaatcccgacgagatccgctcgctgttctatacaagcatcaattacgatttgatcggttaatcataaggagaaaacaatgaaagaatttaccaccttcggggaactgaaatataagcgtcccgattttgaagccctcaaagaattttatacggctctcaacgaacgggtgaaaaatgcctctacgtatgcggaggtcaaggcgtgtatgcaggaggaggaagaatattcctcccgcgtttccacgatgttcaccatcgcaagcatccgccacacggtggacacttcggataaattttacgaggaagaggacaaatacatcaatatgcagtatcccgaggcgatgccctatatgcaggcgttcagcctcgcgcttttggattctcccttcaagcgggacatcgacgcggaatacggcgagtttttcctgaaaaacatcaagctcggcgtggacagtttttccgaaaaaaacatcaaactcatgcaggaagaaaacgaattggtagaccggtatcagcgcatcatggcgtcctgcaaaatcccttttgagggagaggaatgcaacctttacggcatcaaaaagtatttttcttcccccgacagaaatatccgcaaggcggcgtggaagaaatattcggagtttttcgcctcccatgaaaaagaaatgggggaaattttcgacaaactcgttaagatccgcaatcagatgggcgtgaatatgggcttcgacgatttcgtgaagctcggctatatgcagcagggcagactggattacgacgagaaggacgtcgccgctttccgcaaacaggtggaggaggtgctcgttcccttctgctcagagctttataagtcgcaggcgaagcgcatcggcgtggaagaagtcatgtgttacgacgaggaatttattttcaaagacggcaacgcggtgcccgtgggcaaccgcccctatctcgtcgaacaggcgaaaaaaatgtatcatgacatgagtcccgaaacgggtgaatttatcgatttcatgctcgatcacgagctgaccgatctcgacaacaagccgaataaagcgtcgacggggtatatgacttatctcgccgactataaggcgcctttcgtgttttcctgcttcaacggaacgacgggggacgtggacgttctgacgcacgagatgggacacgcgttcgcggggtatatggcgatgcgcacgcagcccctgatggcgcagtggagcgaatccacggacattgcggagatacattccatgtccatggaacagttcgcctatccgtatgcggagtttttcttcggcgataaggcggataaatatcgttttcagcacttgcaggaagctatcactttcgttcccttcggcgtggctgtggacgaatttcagcatatcgtctataaaaatcccggtctgacgcccgaggagaggacgaacgaatggagaaagctggaagagaaatatatgccttggagaaaatacgacggggacggcttcctcgaacggggcggctggtggtatcataagatacacatcttccactatccgttctattatatcaattacacgctcaccaccatgggcgccatggagttcaagaagaagatggcggaggataaggcagcctgctggaaggattacatgaccctttgcaaagtgggcggctcgctcggctatctcgacacgctgcgcgccgcgaatctctccgttccctttgaatcgggaagcgtgaaaaaggcgacggaatacgcgatggaaattttgaaaaaacagatgacgaaagaataaaaaggagcagatcaatgaagacggcacaacttaaaaaatatgcaaagctcatcgccaagatgggactcaacgttaaaaagggacaatcggtattcattcaggcgggattggatcagcccgaatttgtggcgatggtcgtggaggaatgttataaggcgggcgcaaaggcggtctatgtcgattggagttatcagcccgtcggcaagctcaatgccgtttacagaagtctggaaaccctttccgagctttcgccttgggaaaaagcgaagtgggagtataaagcttccgacctttcctgccggctctttatagaatcggaggatcccgacggtatggcgggaatcgatcaggagaagatgagcaaagcccgccgcgcgcagtatccgcagttaaagcctttccgcgacgccatcgaaaacaggcatcagtggtgtattgccgccgttccgggcaaagcctgggcgaaaaaagtgtttcccgaattgtctgaaaagaaagcggtcgaaaagatgtggaaggtcattctctacaccgcccgcgcggacgggaaaaatcccgtcaaggattggaaagagcataatgcggatcttgaaaagcgctgtaattatctgaattctctcgggcttaactatctcgaatataagagctctaacggcacggatttcagggtggaactcaacgaggacggacttttctgcggcggcgacgaaaagacgcttaaaggcagggtgttcaatcccaatatccccagcgaggaagtgttcacctctcccaaggcgggcgccgcggaagggatcgtgtacgcgacgaagcctctctcctatcagggacagctcatcgagaatttctccgtccgctttacgaacggcagggtgtccgaagtgaaggcggaaaagggcgaggaacttttgaagcagatggtgtcgatggacgagggggcggcaatgctcggcgagtgcgcgctcatcccttacgattctcccatcaacaattcg

SEQ ID NO: 2456 - DNA, 5856 bp, Unknown
  16S sequences of unknown bacteria
cgacaaatgaaaatacgccgaaaatacgccgttttgggcgggttcggattattctcgtttgcctaatctttattaaagtcttctaaaataagtccttcatttttatcgagcgcccagttgatattccattcgcttgtaaatatcaaaatattgttgtccttaaagtcctgaacccattttgtatccgaggtgaggttcaggcttttcatatctatatccttatttcttacccagcggatgtactgatagggcatatcgtttcttataacgtcaacgttatactcatttttaaggcggtattcgagcacctcaagctgcaaaacgccaacaacgccgactattacccgctccatgccggaattcggctcgcggaatatctgaattgcgccctcctgcgctatctgctcaacgccctttacaaactgcttgcgcttaaggctgtccttttgctctataacggcgaaatgctcgggggcgaaggtcggaatgccctcaaatctgacatgctttttaagcgagcataccgtatcgcctattgagtaaatgccggggtcgaaaacgcctattatgtcgcccgcatacgcttcgtttattacctgccgctcctccgccatcatctgctgcggctgagacagccgcacgggctttcccgcctgaacatgataataatccgctccgcgctcaaatttgcccgagcatatgcggaaaaaggttattctgtcgcggtggttcttattcatattcgcctgaattttaaatgcgaatgccgagaaattatcgtcaaacgggtcaacaggctcgccctccgacatacgcggcaggggggatgtagtcatttttaggaagttctccaaaaacggctcaaccccgaaattggtgagcgccgaaccgaagaaaacaggggaaagcttgccgcagcgcaccttttcaaggtcaaattcatagcttgcgccgtcaagcagctcaatctggtctaccagctctgcgcgctgatattcgcctataagctcatctaatttttcggtgtcgctaatatcgcactttacggcgcttaatttatcctgcccgcggtggaactctttaaaggttagaatttcgcgcttgtcgcggtcaaaaacacccttgaaatcaacgccgcagccgataggccagttgacagggtaggtgcctattccgaactccttttcaagctcgtcaagcagctcaaacgggtcgcgcgcctcgcggtctaacttatttataaacgtaaatatcggaatatgccgcatggcgcagaccttaaagagcttgcgcgtttgcgcttcaatacccttagccgcgtcaattaccataacggcgctgtccgccgccatgagagtgcggtaggtgtcctccgaaaagtcctggtgccccggggtatcgagaatatttatgcaaaagccctcgtattcaaactgcattacagatgaggttatggaaataccgcgctgtttttcaaggtccatccagtctgaaaccgcgtgcttagccgtggctttgccctttactgagcctgcggtttgaatagcgccgccgtacagcaaaaatttttcggtcagtgtggttttaccggcgtccgggtgggatattatagcaaacgtccgtctgcgttcaatttcggttttaaggtcgctcacaaaattactcctctgtaaaaaaatgcctgtaaattataacatattactttattgtgtgtcaagtacggcgggacaaacggttcgtgtcaagtttttgtaggaaaatttttttgagaatgttaatagtgtgcggttctgcgcaccctccgttatttgctctcttgtcttttttgcaaatgccgatacctttcgcaaagcgttgtaaatatgcggcattttgtgagattgtttcagctctgtcaggatttcgcataatcagactgcctgttaattgttcgtataattcaagattttcttcatatgcttcttctgtctcgtaaagtttttcactttctttgaatatttctccgatttttttgatgaaatctcccgttatctgtgttatactcttgtactattttttcctacatttattttacactaagttagctatttttgattttttcaaacgccgagcgtatctgcttgtttttataggcttttctgctgaatatttcataaattgagcatgccttatcaacaagacagaccaaaagactttccttgtatgcgggcggagtgagggtgagcggaaacatatgctttttaataatatcccgctccatatcgctcaattcaaagtcctcttcggcatttttgagcgcagcgctcgggtggtacctgccgtgcaagggtctgttttcatcgggaatgtgccagtcataaagaaaataatcatgcagcagcgccccgcgcacaagctcgttttcatgccccttgagggttttgaagcgttctgccagcctgtagcagtaatatgcaacggcaatgcagtgcagaaggcaggaggtattcccgtgctgaataaaaaaagctgtttttgaaagccgcgaatccgctgcggcggcggttattatcttaagaaaacttttgttgctcatattaagaattatatcatccgatatttgcattttcaatagccgttccgtgaaatttttgttaatgcgttaatatattcaaacctgctcttcttctgcgcgcaccctttcgctctctttccaaacaatctgcttaatgtctttttgtattatttgtcttgcgttttctcgggaataattgtattttgaggggctgtcatcggttttaaggcttattttgtctccgttcatttcaaacagacgctcggcgcgctcataaagcgcatgatatgctgcatctcgcacggattcgttatcgctttttgtaagctgcgctatatacggcacgaccgaatcggaaagctcgcctaaataatcgatgtcaagttcctttaagactccgcttgtgaatgcgtttacattgtagcttgccaccgtacggtcgatatcgcagaagccggttataagacctatcgccgcaaagcatataatcacacatttcattgcagggaagcgctttgcatacattgaaaccgttattataatgaaaagcagggctaacgccgccatgaagatgcttgtcatgaggcgcaggcgcgtaagaccgaagaagccgatatacataatcatttttgaaatcgcggttgcggcaaatataagtgaaaatatacatattaccgttgacatgatcctgacagaaagcggagcggcggcattttcgccgcgctttgtgaaattgaaaatgacgcttaccgtaacgaaatttattccgcatacgccgcaaagctcaaagaagccgcgccttgcgtaatcggcgggggtgaaggcatagcccttcggcagaatgcccgaaaagccgctgaaaaagtaagccgactgcgaaagcagataaacaaaataaaccgccgccagaaccgaagaaagcgtaaccgccgttgcgggcggaatttttctgagctcttcgaacgacccgatgtccgtgcattcgtgctttaggttcttttttaccgagaaaagcatggaaaagaaatataccgatgccgctgctccgagcaggatcttcagaatcagcattccgaccccggaaaagaccgatactataagcccctcaaaggcggcgtcggaacgcatgagcagcggaaatatcacaaccaaaacgggaacggaaagcaatattcccgcaagcacctgtcggttaacacctctaagcttattctctctgcggtagctgccgtaggagcggaaggggatatccattttgtcaaacggatttacaagcagtgtattgaggatactgagcatcggggacgaatttttatcctcgccgaaaatacctgcgacggaaataccgtacagtatgaccgcagcggcaaaaaaaataagattcataagtgaatcgttataaaccgaaaatattgccgaaaagccgaccgacgccgccgcacaaaaaaccgaaaatgcgcctatatgacggcttttccccccattataggcaaaggtcagcgcataaagcagcagaagggaggcagtaaagcctgcgttaaagccgccgaaaaccgaccaatcgacaaacagtaccgagcttataagcgttatgaccgcaaacaccgtgtcccttttctgccaggaaggaatttccttttgaatcttctgaatgggttccgaaattactgtatcgaacattattcatcactcctgtattcaagtatatctccgggctggcattcaagcacctcgcaaagcttttccagggttgaaaagcgtatggcgcgcgccttgttggttttgagtatagaaaggtttgcctgtgtaattcctaccctttctgcaagctcacccgatgatattttgcgcttcgccatcataatatcaagatttattactatcattgttccgatcaccctatattgtaagctcattttcgtttttaagctctatcgccgtgcagaatatattttttatgacccgcagaataagcgcgataaagccggcagccgttcccgaaatgtaaaagggcagataaaaatatccgcttataagcgttataagcgcaacggcggtgcagcaccatgaaagaattcgcagaagcctgacattttcgccgataaatgcctttgactttaaaatgtttttaagcaggcggcgcaacgtcaaaagggcagcggcggcaaacggcaggcagaaatagcaaacggttataagcactgtcctaagcgactgcgatttgccggtaagctcgatataccgcgatgtaataagggggagaaatatccccgcgatgaccgcaatcagaaaaataatgtcggtaagaataagcgaaagcttggcggaatgcctcgccgtccacatattaacatctcctcggtttcaatttttataagcaaataatagcacggattttatcgtttgtcaataaaattatatcgaaaaaagatattacaattttgtaacaacgcttgatatccgcacgtgctgttcatgcggcttgcggtttcatcgtattttgaaaaattctttccgcttattttaaaggtcagcgccatgcatataaaggaaagcggaaaggtcgcaagggaggcaggcgataagtagcaatcgattgcgcctacggtataattttcgacatcgccgtaatgttgaaaccggggattcggaacttagtgaactgtaaaaaaatattttgtaaaaaaattaattttggggcttgactttgctcctttgatatggtatagtagttaggcgctgaaaaatgctggtgtagctcagttggtagagcagctgatttgtaatcagcaggtcgggggttcaagtccgtccaccagctccatttttgcgaaggtggatttcagcatgaattaaatatgggagagttcccgagtggccaaaggggacagactgtaaatctgctgctttcagcttcgatggttcgaatccatcctctcccaccatattgtgggtgcaaaatagatacccaccccgaaaacccactaaccatcacggtttggtgggttttttcgtctctaaaaacaacttaggaaaaaaagatacctcaaccgcaaaaacagtgataggagggatttgaactaccgcacccattataatacgagcttttagggcagactttacgagttaattctcatagagtctgccctttttttattgcctatttaagaaaggagtacccatgagaaaagaaacagatttaggcggcgtgaaagcaatcgcaaaagccctgctgatgaccgccgttaatcaaacgccctactcaccgatgctcgtacagcatccgttcacatctaccggtt

SEQ ID NO: 2457 - DNA, 15111 bp, Unknown
  16S sequences of unknown bacteria
cgtttttttgattcagattctcaggaagcggtacgccccggcgcaaatcccggaaggatatgcccgaaaaattcccggcgtccggcttcggtgaggttcgggagcagcaggctccagatgcactgacggaactgaggacaccggttgccgatgctctcctccatctccgcatagccatcccagtaccggtacaccatctggatggctgtgatcagctcgctgtaatgcccgctgtacagttctccgcacagctgaccgctccgctccagggaacgcagggtttccgcccacagtccccggttggcccgcaccagattcttctggcactggagcatcttctcccccagctgctcatccaggctataccgccggaacagacagctgctctgggccgcgatcttggagaaccgctccagcatggcatcaacttccgccaatgtgccgggaatatccgccggacggctgacctcctcattgatctgatccagtaccgccagcatgatccgttccttgcgtccgtagtagtaggtcagattccccacactgattccggcccggtctgcaatgtcccgcatggacactttatcatagccatacagtccgaacagctctttggcacagatcaggatctgctgtatcttatcttcttttgccattaaaatcccctctctgccttggctgtccggtcagctgtggatcttatcaggctgacggaccggttctcccgcgggatttaccacccagttccagattccatgcagcagtgtggtaagaaccattccccagaacacatcaatcaccgaatgctgcttgaggaacagggtggacaggacaatcgctataaaaatcccatgggaaacaagccgtacccagcgcttctggcccagcacactgcggcagagtgccagatccatcgccatggacgacgccacatggatagacggacagacattggtgggggtatccacctgctgcatcagccggacgatctcggcaaagagattgtgccgggtgatctccacccgcagatcaagaccgttggggaagatcacatagagcagcagacaggtggtcatgcccacaaacatcacaaaacacaggtagtaatactgcctgagatcataccgcagcagggcgagcgggatcacagccagctctacaaaccagattgcatagggtatgatgaaatactcacagaacggaatccagtcgtccaccacactgtggataatataccggggctccaccagctgttccaccaggaaaaagcccagcagataaaacggcatataggtcagtgcgatggcgatgggatgctcccggtaaaaatccttgatccggctccaccggttccgaacgctcacaggtcgtacttgccatggacagccccagccatcaccggttcaccgcagctgcctccacagctgctgcaggagccggaacagccgtcctccgaaccggggaagtagatctccggcaccgaacgctcgccccgggcagcggcagtgagcatgagcttgatacggttgagctggttgacttcactggcgccggggtcatagtccacggcgatcatgttggcctggggatagtcccgctggatgctgcgcatgacacccttgcccacaatgtggttgggcaggcagccgaagggctgtacacagacaatattcggagtgccgctcttcaccagttccaccatctcacctgccaggaaccagccctcaccgcactggttgccggcggagaggtagggttccgcacacttgcggatggtcttgatatccaccggcggtgtgaagcggctgctctgggcaaaggcctcggaagcaggcttgcgcacccactccactgccttgatgcccagttccgagataaaggcagtctttttgctgccgccgagatagtcggccttgaagttgctgttctcgaagcagtattccatgaagcccagcagctcgggcacgacggcctcggctccctcccgctccagtaccttgaccagatcgttgtttgccaggggcatgtacttgacgaggatctcgcccacaatgcccacacggttcttccggggaatatcccggatgggcagggtgtcaaattccttgaccatctgccggatattgcgcttgtattcaccaaagccgaagccctttttggtcagcgacgcaatgcagatcttccgccacttgtcgtggagggcgtcggtagagccgggttccagctcatagggacgcacccggtagaccatctgctgcagggcatcgccataggccaccgcctgggcagcccgcaccatcatggaggcagtataggtaaagccttcgttcttctccatgccgttgaggttcaccgataccaccgggatatgggaaagtccggccttctccagcgccagacggataaaggccacatagttggaggcacggcatccgccgccggtctgggacatgaggatagcgagcttgttggtgtcatacttgcccgagaggacagcatccatgatctgtccgatggtgatgagggacggatagcaggcgtcgttgttgacaaacttgaggcccatatccaccgcgctgcggttatcgctgtccagcaggacgatgttgtagcccgcctgccggaacactggctcgagcagttcgaagtgaatgggcgacatctgcggacagagcagggtataaccggcttccttcatctccttggtgaactcggcccggtgataggcagtgggcacaggatgcgccacgatgccgttttccttgcgcatattgatggcggagatcagcgaccggatgcggatgcgtgccgcgccgagattgttgacctcgtcgattttgagcagggtatagagcttgcccgacttgatgaggatctctgccacctcatcggtggtgacagcgtccacgccgcagccaaaggaattgagctgcaccaggtcgagattatcaaaccggcggacataggaagccgccgcatacagacgggagtgataggtccactggtcggtgacccgcagcggacgggtgagatagtcctcgtcctggagggccaggtgggcaatgctgtcctcggtgagcacagccaggccataggaggcgatcatctcgggaatgccgtggttgacctccgggtcgcagtgatagggacggcccgccagcacgatgccatgacggtcagaatcggcgttcacccactccagcacccgttcgccctcccggcggatgtcgtccttggcccggagctgttctgcccaggccttggaagctgccgcggcggtttccgcttcgggaatgccgaagttctccgccatcaccttcttcagacgctcggtgatggtgatctcatcggtgaaggccacaaagggactgtacatcttcacagtgccctgccagagcgcctcaatgttgttcttgaggttctcgggataggacataaccatgggacagttgaagtggttctgggagttctcgtcctccttgcgctcatagtagacacagggatagaagatccggtccacgccatgggcgatgagccattccacatgaccatggctcagcttggcaggatagcactccgattcactgggaatggtctccatgcccatctcatagatggccttgctgctctggggcgacagccgcaccgcaaagcccagctcccgcaggaaggtggcccagaagggatagttctcatacatattgagcacccggggaatgcccagtacaccccggggcgcttccgaatcagccagcggctcatagtcaaagatccgctggaacttgtacttcatcagattgggggtatcgttttccacatgggtctcccccagacccttttcacagcggttgccggtgatgaaccgccgtctgcccgggaagatgctcaccgtaagctgacagttgttctcacagcgtccgcagcgtaccagacggctctcccaggtgaggttctggatctcatccatcgagagcatcttgctctggcgtccgtggcagcggtccatggcgatgagcgccgcgccaaaggcacccatgatgcccgcaatatccggtcggatgacgctggcgccgaggatattctcaaagcagcgcagcaccgcgttattatagaaggtaccgccctgtaccacgatatgctcgcccagctcctggggagtattgcacttgagcaccttatagagggcattctttaccaccgagtaggaaaggccggcagagatgtcgcccaggctggcgccctctttctgggcctgctttacattggagttcataaagacggtgcagcgggtacccagatccaccggagacggcgcatagagtgccgcctcggcaaactgctcggcagtgaggcccagggagttggcaaagctctccaggaaggagccgcagcccgaagaacaggcctcgttgagggtgatgctgtccaccacgccttccttgatcttgatgcacttcatgtcctgtccgccgatgtccagcacacagtccacctgatggtcgaagaacagcgccgctgtggtatgggcgatggtctccacttccccttcgtccaggcccagcgcctccttgaggagctgttcgccatagccggtggagcaggcatatgtaatcttgaggtccgcaggcatgagcttctgcagctgtgccatggccttgatgaccgtattgagcgggctgcccacattgccctcatagaaggaccagagcaggtcgccatgggcgttgataagcgccagtttggtggtggtggaaccggcatcgatgcccagatagcacttgccgctggctgtggccagatccgcccgcttgatcttgtagtaggcgtggcgctccacaaactcattgtattcggcttcgtcctggaacaatggcggcagacgcttgatctccgcctccagatggatgcctttctccagcttttcacagagttcatccagcgggaaggaagtcatctgctccggcaggttggctgcggcatactgcgcgctgcccatagcggcaaacagatgggaattctccggcacaatggtctgttccggggtgagcttcagggtgcgcacaaaggccttctgcagctcgggcataaagtggagcggtccgcccaggaaggccacattgccccggatggggcggccctgtgccagaccgctgatggtctggttcaccactgcctggaagatggacactgccaggtcctccttggctgcgccctcgttgatcaggggctgcaggtcactcttggcaaaaacaccgcaccgggcggcaatgggatagattcgcttgtagtttctggcatattcattgagaccttcggcatcggtgcccagcagcgctgccatctggtcgatgaaggaaccggtgccgccggcacagatgccgttcatgcgctggtcccgtccgccggtgaggtagaggatcttggcatcctcaccgcccagctcgatggctacatcggtctggggataccggcggtccagactctcgctcacggcgatgacttcctgaacaaaggggatcttcatggcctgagccagtgccataccgccgctgccggtgatggcaggcagtaccggtatgcttcccagcttctcggaagcccggcgcagtacctcagccagtgtctcctgaatgcgggcaaaatgacggcggtattcgctgtacagaatctcgccgacctggtccataatggcgaccttgacggtggtggaacccacgtcaatgcccaacagataatcctgttcgttcattctttgcacctctttctggtgtagatatacaataagggggtgctttgtatccctctgcgggaattcaaagccaaaaattatactaattttgtgtgaatcatactcgcttgcattatagcacaaactgtcctaaaaaatcaaggttatctgcgcactcctttttacccacttcctcttttgcggacaaaatcctgccggtttcccctggatgtggctccggctcccctggaaaattcatggttttttggttgaagaaccgaataaaatgtattatcattatataggcagatcccgacagtccgatcatactgcttttttcgggattttttcttttttctgcaaagaaatcgcttgcagaagcatattacagacaggtgagggtttgtatgctgtttcttttttccagccttccgtccgaagccgccgatgcccggcagctccaggaacaaaggctgcatgaggctctgctgcgcctggcagcaggagagatcgacgccatgtcggtcctctatgaaaattcaaaaaccgctgtattcgcgctggcgctttccattctcaagaaccgccaggacgcagaggatatcctgcatgacacatttgtacagctttaccgcatggcagaccgctatgaccggggcggacgccctctctcctggattctgaccatgacccgcaacctgtgcctgatgcagctgcgccgcaaaagccgtactgaggtttccgcagaggatctggaattccctgaaacggagaatccctttgccactgctgaagaccgtatgatcctccagaccgccatccgctgtctggaagacgatgaacggcagattgtcatgctgcacgctgttgccggactcaaacaccgggagattgcagagcagatgcatatttccctgccggcagctgtatcccgctatcaccgggcactccaaaaactgcaaaaacacttgaaggaggcttagagatgcgaaacgatccgatggaacagaaactgaaaactgccgcggaacatctgacaccggatgttctcgaccgcatcctggccgactgtgccaaggaaccgaaaggagagatcctgtatatggagaatatatccgatccccgcagccgcaacaataactggatcaaggtgctgtccctgggaacagctgcctgtatgatgatcggcggcctgttctggtggaaccgctaccgtgccctcaactatacggtggagatggatgtcaaccccagcattgagctgcgggtcaacaaggcggaaaaggttatttctgccgaagcgctcaacaaggacgctgaaatcattctggaggatatgaagctcaagggtgtggatgtggatgtcgccaccaatgccatcatcggctcgatggtgaagaaaggctacctgagcgaactttccaactccattctgctcactgtggaaagtgacgaccatcagaaatcggtggaagtcaccgaccgtctcactaatgagatcaacgccgccctggacagcttcggcggctccgtgatcgcacagcaggtggtttcggacaacgacctgcagaatatggcaggcgactacggcatctccgagggcaaggctgccctgatccgcaatatcctcaatgagctgcccatgctcaaggctgaggatctggcggagatgtccatcaacgacctcaacctgctggcatccagcaagcagatcgccctttccaacaccaccaccaccggttctgccagtgagtcaggttatatcggcaccgcccgggcagaggaaatcgctctggaacatgccgggatcacctcggctgacaccgacttcatcaacactgagctggactgtgacggcggcatcatggaatatgaagtggaattcctggctggcggagtggagtatgaatactccatcaacgcccgcaccggtcaggtcctgagctatgaatatgagctctcctccggcggaagcgtcagtgccggtggcaattacatcaccgcacaggaggcccgccaggctgccctggacgatgccggcctttccgaaagcgaagtcaccttcatcaagaccaagctggatcaggacaatggctccatggtctatgacattgagttctacaccgcttcccaggaatatgactatgagatcgacgccctcaccggcaaggtgctgagtgtggacaacgagatcggaggcttcaccgcccagacccagaccggcagctacatcagcgccgaggaagccaaggcgaaggtgctggaacatctggggatggacgccagcgaagtcaccttcaagaaggtggagctggactacgacgacggcatgatgcagtatgagatcgagctctacaccgctgaccgggagtatgactatgatctgaacgcccaggacggcagcattctctcctgggacttcgaggcactgaaagcctggaatcagggcgggtcgggcagcacagctgcggcagctgccatcgacagtgaaactgcccgttccaaggcactggcgtacgccgccaccttcaccaaaaccgagctggactacgatgacgggcgtgcggaatacgagatcgagttctacaccgctgacagcgagtatgaatacaagatcgatggcaccaccggcgctgtgctggaatccaagcaggaggcacggcagacctcgggcggcagcagcaccatttcggaagcggatgccaagcgcatcgccctggagcgtgccggactgactgccgccgactatgtgaaggtggactacgatcaggacgacaacgaatatgaagtagagatgcgttccggcaataccgaatatgaagtcaagatcagcggctccaccggcgccgtgctggaatatgactcggaaaccgacgactgaggcatgatgccatgaaaaaaggaagggcgatgacccttccttttttatttgcctcagaccggttccacctccatgggcagatgcagcatatcctggtatcccaccatataccactccggattgataagctccttatccatcgtacagctatacattcccccgtcagacaggaaccctgtaaaattgcccatccagttggggtcccggagtacaaactcgattttcatgccgcagtgacaggacacaaccgttccgttcaggcttcccacaaagccgccgatgctgttagctctgtcctctccctcaccagggcgaatggtgagagtcccctgggcagagcagccttcgatgccagcttctgtcaccccgacaaatccaccggaattataggtggctgtcacttctccctggaaggtacagtctttgatgactggctctgcaagatccagtttataagcgcccggatcatttttcagaagccccacaaagcctcccattgtcccatatccgtccacacttccgataaagtggcagttttccactttggctccattgaccacagctgccgcaaaacctcctgctgccgctgtgtcatggcctaaatcccagtaatccgccggtgcgctcagaaccgtaccttccaccgtgagatcccggacctccgcattgggggcaatgcagccaaagaatccagcctcccgtgtttcagtgctgtattccaggccggtgatccgatgtcccgcgccatcaaagacgccctggaacccctgggtattcaccacgccatacatccgctcccgctcgagaatcagcgcaaggcccggactgccgatgggttcccattccacgcgggtcaggtcgatgtcctgagtcaggcggtaattcccgtgcgctgcctcctgatcgccgctgttgatcttttgcgccatgtcgagcagctcctccgcggtggagatctcgataaactctccctcatgctcattcccaagccactccacacggtcgaaccgccagattttcccgttgtcgatgagcttttcagcacaggtgccctccaacccatccgggaccggttccgccacaaaggtataacgggcatcatagagcttctgccccttccagctgcgggatacagtcacctccgcccggtcatcggaaaactgatagtcccgcgcctttacccggggctctccgacaaaataggcgctggtgtacccatactttgccttctgctcccccggacagccgaaccacgcttcggacattgtctggatcagggcgttctgttcctccgccggctcctcccggttgctggtcaggtccagataaacctccccgaaatcccaggcgataaatcccggctgcccatattcatacggagcacccccatgagagccctcatagcagagcacctctttcatcaggatctccagccgggccgcctcttccagctcggtttcggtcagcccggattcagacacttcctcctgtgaaacagactgctccgtctcagattccggctccggtgtcccgttttccagggtgcagccggcacacagcactgccagcatcagcgccagcaaaaccattcgtttcatccatcttccctccaaacaaaaaagagcaggaaccagtcctgctcttttctttatggcgattctgttcctgtctccatcatagaacggggcgccggaactgtcaagcgggttctcagacctccaggcccttgaatgccaggtagtcctcataggtacccatgcggtcgatgcagccgttcggggtcagctcgatcacacggtttgccactgtctgcatgaactgatggtcatgggtggcaaagaggataacgcccttgaagtcgatcaggccgttgttgagggcggtgatggactccagatccaggtggttggtgggctggtcaagcagcagcacattggcgctggacagcatcatgcgggagagcatgcagcgcaccttctcaccgcccgagagcaccttcaccggcttgagcggctcatcgcccgagaagagcatccgtcccaggaagccccggagatagctctcatggtcgtcggtggaatactgccgcagccactcgatgaggttgagatcgcagccgtcaaagaactcgttgttgtccttggggaaataggactggctggtgctgatgccccacttgaagctgcccgaagccggctcctcctccccggtgaggatcttgaacagggcggtaacagccatttcgttttccgatacgatggcaatcttgtcctcccggcccacccggaagttgagattctcaaagagggtcacgccgtcctgtaccgcagagaggttctccacagccagtacttccttgcccacttcccgctccgccttgaaggatacccaggggtaccggcgggacgaagcaggcatctcctctacggtgagcttatccagcagcttccggcgggaagtagcctgccgggacttggacttgttcgccgagaaccgctggataaaggtctgcagttccttgatcttctcttcgttcttcttgttctgatccttgatcatctgctgcaccagacggctggactcataccagaagtcgtagttgcccacatacatcttgatcttgccgtagtcaatatccacgatatgggtgcagacattgttgaggaagtgacggtcatgggataccacgatcacagtgcccacgaagtcatagaggaagtcctccagccagtggatggcgcttacatccagatggttggtaggctcgtccagcagaatgatctgcggatgaccgaacagcgcctgcgccagcagtaccttgatcttgtcgtccgccttgagcgaggacatctggctgtacagcagatcattgcccagtcccagaccctgcagcagctgtgccgcttcggtttcagcgtcccagccgcccagctcagcaaattcgccttccagttcggcggccttttcaccgtccgcttcggagaagtcctccttcatatagagggcatccttttccttcataatgtcatacaggcgcttgttgcccatgatgacggtatccagtactgtgtactcatcatactggaaatggtcctgcttcatcaccgacatccgggtgtcggccgggatctccaccgaaccgctggtgggttccagttctcccgagaggatcttcagaaaagtggacttgcctgcaccgttggctccgatgacgccgtagcagttacccggaacaaatttgagatcgacatggctgaacagcttatcggtgccaaagctgaggcccagatcggtaacagtaatcaaaccgaaaattctcctttttaacagtcatatttgtgaaaaggctcaaaaagccgcatacagttttgtattatatcatagttttcccggactgacaatcactccggcagcaaaaaacggcgttccttcccaaagaaacaccgtttttccatccaaagccggtatcagaaccgccgcagcaggtattcccccgcaatggtatagcccaccggcaggctcttttcatcgatccactcgccccgggtatgcgcgccgcctcccaggcagacaccaaagcagatggcattgatgcccatcgaaagcggaacattgcagtcggtggaggaagcggagaccatcggctcctccccgctgtgccgcaggatcagcgcggtgagctcctcagtcagagcctgctgacgctcccggtcgatctccccggcacagggacggttgcccagcaccttgacttcgatgtccaggccgccggcccggtagttttcaataatgccctcaaactgccggcgcatctcctcctgacagctcagatcctccgaacggtactcatagagcatcgacgcatcctgggcaatggtattcaccgaagtgccgccctggatcatgcccacattgtaggtggtcttggccttggtggggacctcgatgccgtagaggtcattgatgatgcgggcaagctgatggatggcattgcggttgccgaagttgccgaagctgtgtccgccctcggtgcgcactgtcacctcataccgggtggagcccactgcgtcattggcgatgccgctgtaatagccgtcaaaagaggtgacctccacagtgcggctgccatagtccttcatgagctggaagctgcccttgaggttgccgaggccctcctcacaggagttggctgcaaagattacggtatacttcgaacgcagaccccgggtgagcacatactttgccagcatcagcagcacagccagattggcggtgtcatcgccgatgcccgggcagaacatccgtccgttttcctcatggtaaggcaggggctccagatccgggaacaccgtatcggtatgcgccatgaacacgatcacctcatcggtttcgcccggcacttcacagaccacattgagcgcctcatcgatgtgcacctgctccggcgaagcaccattccgcagcagccagtcccggcagaattccgcccgcttttcctcatggtgggacggcgccggaatcccgcacagctccacgatcagctccttgagttccggcagagtttcctggatataggccttcagctcttccatttgcaaacatctcctctttacccgctgtccggcagcagatacaattttcctctgtcattgtaccacattctgcaggaattgagaagccggatttcatttctgctcccaaaaaagaaaaccggccctcccggtcagatccccggaaaggccggccttattcacttggaaaaggactgctttactgcccggatcaccgctgcggtgtccaccttttccccatttcccagcagccgccgcatggactgatccagggactggctgtcgtggacggtgaacacattcacagcgtcgtctatatgcacctccgcgttggggttggcaaaatagaccgctgtgcgcaccggcacagaaagccccgcagcccgaaggatattctggagggtggtctggtgccccttgacctgcagaagcgggttgtacatccgtttctgctctgccgggcgtccgccccgggagggcttatactgggagagttcccggtcctcggcccgcccggtcaccttgcctgagacattctttgcctccaggatcagcactccggtgggcgcaatcaggatatagtcggtctggctgcggtgtccccggtactcaatgaccgcatcggggatcaccgtccagtccgccggcagcttccggagcagacggagggtctcagcctcgccatccgctcccgcccggatcacgccgatctgcttctttgccagaggcagagcgatgggcaggatcaggatacagactgccgccggaagatactgctttgcaagcagcagtcccactgcccctgccaacagcactgcaaacagcgctccccagcgcagccagacggaaatttcagaggaacgcacggtattgaccagattgggtcggatgatctttgccataaaaaacctcggtttcatgtataaaaaacgatgggctgccaaatactatcagtgcaatgagggaggtgaaaccagatgaaggacaagcagaagaagaaccccgcccagcccgagcagaagaaggaaaagcccggctgtgagcccaaggaacccaccatggaaaacaagaagtaacaaacccctttgattcctctcctatacaccatatcaaaaaaccgcccgaatccggcatgcaaaccggataccgggcggtttttcctattctgcctgggcaggggcggcagaggcggactctgccgcggcacagaccgcgtcgaacagctcccggagccgggcggtacgcccgcacagccacagatagccgaacagcgcttccacaccagtggcccggcggtaatccgctactttggcgtttttcgccgtatgggaggggtgggtattgcgtccccgcttgaggacagccagctcctcctcagtgagcagcggttccaacacttcataggcctgggactgtgccccggcacagaccatgccgattgccatgcggtgcagcttcccggcgggaatggtggtcactgccagcttctgccgggccagcagctcatagactgcgtccccgagaaaagccagggtagcggcactcatctgccggggattttcccggagcagtccgggatcaaaaatatcgtccatgctatgctcccatcaatggataaagtcgaactcgaagtccaggatgcgcacagtatcgccctcctggatgcccatgcgctccagctcggcaatgatgcccgagttgatgagtacacgctggaagtactgcaggctttcgtagtcgtccatattgacgctgcccagtacctgacccagccagtcggcctcgacggtataaacgccgtcctcctcgtgtaccgagaactcgttgccggccttgacaacctgctcctccagcggtaccggctccggctcataggagcggatgggcggcagatcagccagcttcggtccacccttgagatcggaagagcg

SEQ ID NO: 2458 - DNA, 32759 bp, Unknown
  16S sequences of unknown bacteria
tgtggcccttccctaccggctcagtccctccccggcactgctccttgcggcataccgcagtgccctgggcaagggcgaacggctcaaacccccgccggcagaggtgttccgtccgctggtggcagcccggtttgtatcggtgggctcccgcattgtttccatcctgcgccggctctatcattccagccgggtgagctttgccgggctcttttcccacagccgggaacgcagtgagatggtcgctacctttctggccctgctggaactgatgaagtccggacgggtgcgcctgaatgacgacggcgatgtggaagtgaccgattaccgcagtctgaccgatgaggaacttgcagaagcggaccggcagtttgccgcaccgcagacagagcaggaggacgaagatgaacgagaaacaaatgccgctctttgatgccggggaccggcggattctggcagtgctgtttgcagccggggaaccgctggaactggaacggcttgccgaagggctgggagtggataaggctgccatgcgccagacactggaacggctccggggcaggctccgggaagccgggctcccctttgagctgctggagctggaggagaatgtccagcttgccacagcggaggaatacggcaacctgatccgctcggtgctcagccagaagcgcagcactccgctgtcccagtcggcgatggaggtgctggcgatcatcgcctacaaccagccggtgacccgtgcctttgtggagcagatccggggcgtggattccagttcagcggtgaattcgctggtggtgcgggatctggtggaggaagccggacggctggaactgcccggacgtcccatcgcctaccggaccactgccaatttcctgcggtgcttcgggctgcagagcctggatgagctgccggacatcaccgcggcggcccaggcacaggagcagctggaacagctcaccctgaccccggcagacggacagggggaagagccgtgaaatggctgctgctgatcccggtcctgctggttgttctgctctggcttccgctgagcgtccgggtgcgctataattcccgcctgacggtctgggccggggtggggccactgctggcccgggtgtatgagaccaccggggaatccccggaaccgcccaagccggaacccgagcagaagcaggacacaccaaaggaaaagaagaaaaagaaatccctgttcccggagaaggtgaatgccggactggtgctggatctggcggcatcgcttccggcgccgctggcaaaactgctccggcgggtgcatatccaccataccgtggtgcggattctcacaacgggcagtgatgccgcagaggcagctgtccgggcgggacataccagtgccgccgtatacagcgtctatctggcgctgggacggatcttcaccgtggattatcctgagatcctgatcctgccggatttcttccgggaggaggacaatatctatgccgaaagccgtgttaccctgcggcccgtggcactgctggccttcggagccggatttgtgatccggctggtgaagcgccggcaggaacgtgaacagaccaatgacagttccgcccaggcggcaggagctgatcccaatgaaactgaggtgcagtaaattatggacagcaaagtaaaaggactgatgggcgacagctttgaaaacctgcggacgctcattgatgtaaacaccattatcggcgatcccatcaccacccccgacggcaccaccattattccggtgtccaaggtcaccttcggctacggcatgggcggcagtgacctgcccaccaacaagcgggaggccttcggcggcgccacagccggcggcgtgaccatccagcccatcgccttcctgattgtcaaggacggcaatgtgcagctggtacagctggcaggggaaaacaacaccgcggaacgtgccatgaacctggtgcccgatgtggtggacaagatctcggggctgttctccaagaacaccgcggaaccccatcacaagccggaacccaccgctgcgccccaggaataagctgggataagcagggataaaatcatccgccccgccataaaaatggtggagaggcggtgattttgtgcagaaaaagtttctttgtgccgcagcggcggcagtggggctcctgtgggggagcctggggttttcctatggggaaatgaccgtagcggtcatggccggggatctggaagtgaatgccgaagcggcagtggtcatggacgcggacagcggacggctgctctacgcccagaacccggataaacggcttgccaatgccagtaccaccaagatcatgacagcgctgctcaccctggagcagcccgatcaggaccggtactttacagtggattccgatgccatccaggtggagggcactaccatgggcctgcagcccggggacagtgtgaccctccatcagctggcggcgggcatgctgctgccttcgggcaacgacgcagccaacgcggcggcggtggagattgccgggagtgaggaggcctttgtccggctgatgaatcagcgggcggcagagctgggccttgagaacacccagtaccgcaatcccagcggactggatgccgaggggcattactcctctgcccgggatctggcggctctggcggcccatgccctggaaaacgaggactttgaggacattgtatccaagcaggagatccgcatggcctttggcaatcccccttacaaccgcagcctctataccaccaacaagctgctggaacgctatccctatgccatcggggtcaagaccggctataccgatgacgccggactctgtctggtgacagcggcggaaaaggacggcacccggctgatcatcgtcaccctcaatggcaaggacgatgtgaatacccacatgcggctgtatgagcactttttcccgctgctggcccgggtggatctctcgggctttaccgaggggctcagcgtaccggtgaccggcggtacccgggacagtgtggcggcagttcccgcagccgagccggaagcggccctgctggaacgggaatatgacgagctcacccgggaggtggaactgccccggtttgtctatgcgccggtggaggccggtcaggtgctgggggagatccgtctgctgagcggcgacaaggtggtatggcagtctgctctggtggcggacagcgatgtgcctgccctcacccgggaacgccagggaatactggaatttatcggctcgctgctggggcggtgacgccgtgagaagataaaaagagtcaggagaatgaacatggaaaataaagcacgcatccagaaggtgctgtccgatcagggaatcctctcccgccggcgcaccgaggaactcatcaaggagggacggatcaccgtcaatgggcgcccggcccagcccggccatcccatcgacatccgccgggatattgttgccatcgacggcgaacgggtctggttccagaaaaagaagaaaaactactatgtaatgctccacaagccccgtgggtatgtcaccaccatgagcgatgaaaagggccgccgcagtgtggctgacctggtggcagacttcccggtgcggctctatccggtgggacggctggacaaggacagtgagggcctcctgctgatgaccaatgacggcgactttgccaacaccctgatgcaccctgccaaccacatcggcaagacctatcgggtcacagtgcgtccgggcatcagcgaggatcagctggtgaagctctcctccggcgtgctgctggatgacggctacaccacccagcctgcccaggtgcatgtgctggatcagcagcccggtcgtgtggtgctgcagatgaccatcaccgagggcaagaaccggcagatccgccggatgtgcgaggcagtggggctggaagtggcccgcctgaagcgcacctacatcggcccggtgaagctgggcatgctccagccgggcgagtaccgggagctgacccctgcggaactgagtgccatccggggctacgtgaacaaggcagtgaaccgccggcagaatgccgaaggggaaaaggctgcggcagagcggagcagccgtccggcaaagaaggctccggtgaagcccgccggcaagggccgtaccccgctgggacggaggtaacgccatgctgaagatcgaactggagcagtccgggaacaccctgctctgccgggcgacccagcggggcgaagagctgggccgggccgaggcggagatccgggaggatactgtctggtaccggagcggctggttggaggactccgaggactatggcctgctggatggtctggtacgggcagcttttgatgcggcccgttctgcgggtgtgaagcagtattttgtctccggcgaggctgccggggagtatcgccgggcctttgaggtgtacgattacgcgctggatcaggccgaggaactggaacggttcttcggacggcacagctgcaagggtcagagcggcggtttttagcggaatttccggctttgtgaattgacaaagccattgccagacgctattataataggataggactgagaaaacacagacggcagacctgcatctgccggcaggacagaggtgctgcaatgatacagagtatgacaggattcgggcgctgtcagaaaacgctgggcagccgggacatcaccgtggagatcaaagcggtgaaccaccggtacctggaattttcttcccggcttccccggagccttggatttatcgaggacaagctcaaggcacaggtacagtcccggatcgcccggggcaaggtggaggtttcggtcactgtggcggagcagaagggctctgcttcccgggttaccctcaatgagggactggcgctctcctatctggaggagctgcggattttcgcccggaaaaacggtctcaccgatgatctgaccctgtcggatttctgccggcttccggatctgttcaccacccgtatggtggaagtggacgaggatgccctgtggcgggatatttcggaaacagccgacggcgccctggacagctttattgccatgcgccggcgggagggcgaaaagctctcggcagacctggcagccaagctctacaatatcctcactctggtggaagcagtggagcgccgcagtcctgagacggtggaagcctaccggcagcgcctttacaagaagctcggcgaactgctggcggaccgtcagattgacgacagccgggtgctcaccgaagcagccctgtttgcggacaaggtggcggtggacgaggaaaccgtccggctgcgcagccacatcgatcagttccggcatatcctcaccctggaggagccggtgggccgcaagctggatttcctggtgcaggagatgaaccgggaagccaataccatcggctccaaagcgcaggatgctgagatggcccgcattgtggtggaactcaagagcgagatcgaaaaggtgcgcgaacagatccagaatattgaataggcggtgtatcccggaatgaagctcatcaacataggatttggaaatatggtgtctgccagccgtctggtagccattgtcagcccggaatcagcgccgatcaagcgcattatccaggatgcccgggaacgcggcaccctgatcgacgctacatatgggcgtcggacccgtgcggtgatcatcaccgattccgaccatgtcatcctctcggcagtccagcctgagacggtggcaaaccgactggacgacgaagacgaggatgtggacgatgaataatacaagaggccttctggtcgtggtgtccgggccgtccggtgtgggcaaaggcacgatcatgcgtccctttatggaacgcaatcaaaatgtaaaatattccgtttctgctacaacccgggctccccgggaaggagagattgacggagtgaattatcactttgtcaccaaggaacagttcgagaacctcattgaaaatgatgagatgctggaatatgcccgttacagcggcaattattatggtactccccggtttgcggtggaaaagaacctggctgcgggactggatgtggttctggagatcgaggtcaagggcgcccagcaggtacgccggcgctgtcccgaggccatttcggtattcattatgccgccgtccttccaggagctttccaaccgtctgcacggtcggaacaccgagagcgaggagaagatcatggagcggctggatattgcccgcagcgaaatgcagctggcctatgactatgattttattctggtaaacgatgatgtggacgaggcggtacgccagctggaagtgattctggaagccgccaaggccatgcccaaatatatgaaagactttattgatgaggtgaataacaatgcttagacctgccatgtctcagattgtaaagaaagatgaaagcgcatacgaattcgtgatcgaagtagcccgccgtgcccgtgagatcgtcaacgaagccgaggaacggggcgaagtactggatgtcaagccggtacagctggctgtggaggaatttgccagcggttatccccggactcccatccgttacatcggcagcgacgacgagcagtaatccccaaaaccgaatcaatcgttagaagcaataccggccgggattctcagccggtatttcttgtgtcagggagcaggaaaggagtatgagcgatggcacagattgccgctgtggctgtggataaggccaccccgcagtttgaccgggaatacagctatctggtgccggacggcctgccggtccaggtgggctgccgggtgactgtcccctttggccggggcaaccgccgccggctgggactggtactgtccctgagcgaatcggaggacactgcccggctcaagaaaatcgcctcattggtggaccgtcagccgctcatcggagaggaacagctcggactgatgcgctggctgcgggaacacaccttctgcagctggtttgacgcggtgcgggtgctgatcccggcgggactgggcatggatctggaggatcagttcctgacggagccgggagcggagcttcccgccgatgcccccaagggagcggagaagctgctggaggccatccgggccggacagggcaagaccccggagcagctggcagaggagataggcgagaaagacctgcatcgcctgctgcggtacctgatggagtgcggagcggtgcgcagtgagatcaacgaccgccgccgggtactggatgagcgggtgaccatggtgcgcccggcgccggactttgagccgcggaagcccctgaccaaaaagcaggaactggtgctggcagtgctggaggaattcggcagtgtttcggtgaaggagctgtgctattacagcggcgtcacccggattgtggtggagaacctgcggaaagccggggcggtggagctctatgagcagatcgtctaccgggacccctatgccggacgggacgaagaaccccaggcggagcccattctgctcactgacgcccagcaggccgcctatgataccatcctggcaggggacccgggcaagccggcgctgctctatggcgtcaccggcagcggcaagacccaggtgttcctgcggctcatcgatcagaccctcgccgaagggcggcgggccattgtcatggtgccggagatcagcctgaccccccaggtcatcgagcggttccgctcccggtacggcagccgcaccgctgtgctgcacagctctctcaccatggggcagcgcaccgatgagtggcggcgcatccgggacggcggggcggatattatcatcggcacccgcagcgctgtgtttgctccggtggaaaacctcggcctcatcgtcattgacgaggaacaggagcgcacctatcagtccgagtcctccccgcggttccgcacggcggaggtggcccgggtgcgctgccggtaccatggggcacggctgctgctctgctcggctacgccgtcggtggagagctatcatgccgcccgcaccgggcgctataccctggcccggctcaccgaacggtattcgggccagctccccgatgtcaccatcgtggacaccacccgcaccgaacgggtgggggagatcttctcggaacccctctgcgccgagctgctcaagaatctggagatgggacagcagtccattctgctgctcaaccgccggggctatcatacggtgatgaaatgctcctcctgcggcgaggcggtcacctgccccaactgctcggtggcgatgacctatcaccgccagaacggacggctcatgtgccactactgcggccacacccaggaggtcccggctgtctgtccccactgcggcagttcgctggtgcggttcagcggcatcggcacccagaaggccgaggaggagctccaacggctctttccccaggcccgcatcctgcgcatggatgtggataccaccatgtcccggttcgcctatgaggagaagttcggcgactttgccgccgggaagtatgatatcatggtgggcacccagatggtctccaaggggctcaacttcccccaggtgacgctggtaggagtgctgggcactgatatgtccctctattcggacgacttccgcagctttgagcgcaccttttcgctgctcacccaggtggtgggccgcagcggacgctttgacctcccgggccgggccttcattgaaaccgcccagcctcacaatccggtctttgcgctggcatcggcacaggactatgaggccttctaccgggaggagatcctcttccggaaggtgaacctctatccgcccttctgcagcctgctcacggtgcagtttacctcggtgtccgaggcggactcccacgccggagccagactctttgcccggctgttcacccggctggcccaggcggaatatgccgacctgcccatccggatgctgggccctgccggggataccctctaccgggtggccggcaagtaccgctgccatctgatcctcaaatgccgcaatgaccgccggatgcgggagctgacccgccgggtgctggaacagttctatacccaggcgccggcaggggggcaggccatccccgatctggactgactgccccaaatgtttgacaacagccccctttttcttccgggaaaactgtggtaaaataaaatatatatgacctgtctgaccgacagcagcaatacaaactgaccgataagaagggattaacgatatggcaattcgagaaattcgcaagtatgacgatccggcgctgtataaagtctgccgcccggtggaaaaatttgatgagcggctgggcgaactgctggacgacatggcagagaccatgtatcaggccaacggtgtgggactggctgcgccccaggtgggcattctgcgccgggtggtcgtcattgatgtgggcgacggcatcatcgagctggtgaacccccgcattctgcgcaccgccggcagtgagaccaccagtgagggctgtctttccttccccggggagtatggcctggtggagcgtcccaccgaggtggagattgaggcagaggaccggcatggcaagaccttccgcatgaccggacatgacctgctggcccgtgccttctgccatgaaaccgaccatctggacggcaaggtattcaagaccatcgccatcgagatgctggacgaagaggatctgtgagcatgaagatcgtatttatgggaaccccggattttgcagtgccgtcgctgcaggggcttatcgacgacggtcatgagatcctggcggtctacacccagcccgataagccggtgggccgcaagcaggtactgaccccgccgccggtcaaggcactggcgctggaacacggcctgccggtctaccagcccaccaagatgcgggacggcaccgtagcggcccagctgcgggaactggctcccgatctcattgcggtggtggcctatgggcgcatcctccccagggagatcctggagatcccgccctatggctgcatcaatgtgcacggttcgctgctgcccaagtaccggggcgccggcccgatccagtggtcggtgatcaacggcgaagcggaaaccggcatcaccaccatgtatatgggcgaggggctggataccggcgatattctgctggtgcagcgcacccccatcggtccggaggaaaccgccggggaactctttgaccggctggctcccatgggtgcggactgtctgaaaaagaccgtccgggcgctggaggaaaagcgcattaccccggtgaagcaggacgaacagaaggccacctatgcccccatgctggataagaccatggcagagctggacttcacccgtccggcagccgaactgcacaacctgatccggggactcaacccctggcccgtggcctatacccactatggcgacaagaagctcaaggtctttgccgcccgggtggaacagggcagcggggaacccggcaccgtgctggacgccgaccggtttgtcattgcctgcggcgaaggagccctgcgttttaccgaagtacagctcgagggcagccgccgtatgagtgccgaggaatttctccggggcaagaaaatttttgttggcagatcgttaacagccaattaatatccgcacggtatgatgattccattcccctggaactggaaattccccgccctctgcgggaccagccatgcgggaggaactattttactgggaggaaatcttctatatgttctggtacattgacccctattatttcatgctgattgttccggctatgctcattgcgcttctggcacaggcccgggtcagcagcacttttaaccggtacagccgggtatacagccaccgcggcatcaccgccgcccaggtggcacgcaatatcctcgatgaaaacggcctgtatgatgtacaggtccagcgggtagcgggcagcctcaccgaccattacgatccccgttccaatgtggtgcggctttcggattcggtgtatacttccacttccattgctgccatcggtgttgccgcccatgaggtgggccatgccatccagcatgcaacggattatgccccgcttaccctccgcaatgccattattcccgtcaccaatctcggctcccggctgtccattccgctgatcattgcgggtctgctcttctcggcacagccgctggtacagatcggaattctggccttttcgctgatggtggtgttccagctggtaacactgcctgtggaattcaatgcaagcaaccgcgccatccgaactctggctgcggacggttatctggatcgggacgagctcgccggtgccaaaagcgtactgggagctgctgccatgacctatgtggctgccctgatcacagctgtggctcagctgctccgtctgatcctgctgttcggccggcgggacagggactgacatgaacgcaaatcaatcaaagcaacaatcgaatacccaggcgaaagcgacccggggtgcgcggaaggaaaaaccatctgcgcgccttgtggtcgcttacgctcttttacagatgatgcgccagtctgcctattccaatctggtggcagaatcccggttcgataccctggattcccccagggaccgggcctttgcctccacgctgttctatggcgtgctggaacggcagatcaccctgcggcgcattgtggcctcctattgccgcaaacccgtggacaagctcgaccccgaggtattgtgtgcccttgagatggggctctatcagctgctcttcctggacagtgtgcctcaacgggccgctgtgaatgagagcgtcctgctcacccgcaagctgggcaagcagagcgccagcggctttgtcaacggcgtgctgcgggcctttatccgggacggcaaacccctctgcccgggtgcggagaaactctcgcccctggagcggctctcggcggaggcttcggctcccgaggagctctgccggctgctcatggagcagtacggcgagaagacagcccggcagttcctgctggattcgctggaaccggcgccggtctttgtccgggccaataccacacgcgtcaccccggaggacctccggtcagaactggaacaggccggcaccggcgtggaggaaaccgtcctcccggcctgcctgcggctggaaaagcccggcgatgtcaccgcctatgccgcattcggcgagggacggttccatgtgcaggatctctccagccagctctgctgccaggcactggatgtccgtccgggcatgcgggtactggacgcctgttcggcccccggcggcaagaccttcactctggcggaacagatggaaaaccagggcgaagtggtggcctgcgacctctatcctgcccgggtgggtctgatccagtcgggtgcggaacggctgggcctctctattgtccatccccgggtgatggacgcctcggcgcctgatgagggcatcggcacctttgaccgggtgctgtgtgatgtgccctgttccggactgggcattatccgccgcaagccggagctcaaatacaagccggtggcggagtttgaagggctgcccggagtgcagtatggcattctcaccgcctgtgcccggctggtaaagcccggaggtgtgctggtctattccacctgcaccctcaaccggaaggaaaacgaagaggtaatccggcgcttcctgggggagcatccggagttcgaaccctatgcagtgacgaaagacggaggatttttccgcactctgctgcctgagacagacggcagtgacggattcttcttctccgcagtaaggaggatctcgtgagcgaggagctgcgcatcgacatcaaatccatgactttgccggaactgactgccctgatgaaggattggggagaaccggggttccgggccgggcagctcttttcctggctgcatgaaaaacgggtgcgggactggtcggagatgaccaacctctcggcagccctgcgtcagaagctggcggagcgctgcaccctgacccagctgaccgtactgcaccgactggtatcgtccattgacggcacccagaagtacctctaccggctggcggacggcaactgcatcgaaacggtgctgatgaaatataggcatggcaacagtctgtgcatctccacccaggtgggatgccgcatgggctgcaacttctgtgcctccaccctgggcggcctggtgcggcatctcacgccttcggaaatgctcgagcaggtctatgaaaccgtgcgccagagcggcgagcgggtggacagcctggtacttatgggcatcggcgaacccctggataactatgacaatgtcatccggttcctgcggctgctcaccgaccccaagggatacaatctgggacagcggcacatctccctgtccacctgcggactggtggaccgcatctacgatcttgccaaggaggatctgggcattaccctgtccatttccctgcatgcgccggacaacgaaacccgcaacaagaccatgccggtgaaccgccgctggccggtggaacagctcatgcaggcctgccgggattacttcagaaccaccggacggcgcatttcctttgagtatgcgctcatcaagggggtcaacgacagcccggcagatgcccagaagctggcaaagctgctggacggtatgatctgccatgtgaacctgatcccggtgaacccggtcaaggaacgggggtatgaccgtacagcccagcaggatatccgccggtttgtggatacgctgggacggctgggagtcaatgccacagtgcgccgggagctgggaagcgacatcaatgccgcctgcggacagctgcggcggcagtatgaacagggagaggaggcaaaggcgtgaggggattcggaaaaacagaccggggactctgccgggagatcaatcaggacagcttcagcttctgccagatctcggatacgctctgttatgcagtgctctgtgacggaatgggcggcgaaaatggaggcaatgtagccagtgaactgactgttcgggacattggccgggagctttccgccgctctgggttccgatgcagagcagaaggatctgcgcaccattatggaacaggccatctcccatgccaatctggtggtgaaccgggctgcccgggataccgaagcgctccggggaatgggcactacggtggtgctggcagtggcagagggcaatactgtgaccattgcccatgccggagacagccgggcctatctgatccatggggaggagctctcccagctcacccatgaccacactgttgtgcagatgctcatggaacggggcgagatcaccgaggaggaggcgctcagccatccccagcggcactatatcacccgtgctgtgggagtggactgcgagatccgggtggaattttcccaggcagaactgggcgaaggggacgcagtgctgctgtgcagcgatggcctttacaactatgccgacccgaccgatttcccccggctggtgcgggaagcactggaatcgggggacgcttccggattcatagacgctgccaatgccggcggcggaggcgacaatatcaccgccgtgatcctgtccggcgatgcaaaggagaagatcgatggataagtatatcggcaagcgtctggatggacggtacctggtggatgaactggtgggcatcggcggtatggcaaatgtctacaaggccaccgatgtatccaatggacgcattgtggcggtgaagattctccgggacgaatatgtgcagaatggagaactgctccgccgcttcaagaatgaatccaaggcagtggcactgctctcccatcccaatattgtccgggtgtatgatgtcaacttctctgaccgggtgaattacattgtgatggagtatatcgacggcatcaccctcaaagaatatatcgaacacaagggtgtgctggactggaaggaagccgtttacttcaccatccagatcctgcgggccctgcagcatgcccatgacaacggcattgtccaccgggacatcaagccccagaacatcatgctgctcaaggacggctccatcaaggtgaccgacttcggcatcgcacggtttgcccgcagcggcatgcacaccatgaccgataaggccatcggctcggtgcattacataagccccgagcaggccaagggcgatgtcaccgacaaccgggcggatctctattcggtgggcgtcatgctctatgagatgctcacaggccggcttccctttgaagcggagtcggcagtggcagtggcgatcaagcacatcgaggaggtcccgaaaccgccccgggaatggaacccggatattccggcgggcctggaatccattgtgatgcgggctatgcagaaggacgccgcagaccggtatgcctcggcagcggaaatgctccgggacatcgactccttcaagaaggacccgtccatatcgtttgaatacaagtaccgcaccccttcggaatccgcccatgaggcacggattgaaaaggaggtcagcggagttcagcaggccagccatgaggaaggccgccattcggcccggcaggccaaagcaggagggatcgcagccgtgttttccaaccggaaaaaggataaaaaatcggagcggaacggatcttcccgttcccggaacagttcttcccagcgccgcagagtggcacgggaaaatgaggaactgaccgaagaagcccgcaagaataccacttccaaacggggcgagcgccggggtctgctcaccacactggtgggtgtaacctgtgcctttgtcatcggttcgatgatctttgtgggcaccatgctgctgctcaataaccccttcgagcgggtggaggacatcaaggtgccgaacctgctgggtctggactatgaatccatcaaggacagcgcggagtatgcggacttcaatatcgtcgtcaaggagagcggctacaatgccgaatatccggtgggacagatctatgaccagtccccgtccgaagggcgtaccgtcaagagcggtgccaccattgaggtcaaggtgagccagggcactgaactgggcaccattccggtggtgatgggcaaggacccggataccgtggaaagtgctctccgggcagagggctttacccagatcacccggtcggaggtctacaacaatgtggtgccgtccggtctggtatgcggcatcaaccccggtgagggcagtgaggtagccacctccacccccatcagcctgcagatcagccagggccctgaaaccaagacagccgaagtcccggatctgggcggtctgtcgctggagaaggccagaaccgagctggaagaggccggcctcaaggtgggtgagatcacctatcgctccagtgagagcagcaccgataccgtcatcggacaggaccctgtctttggctcccaggtcagcgagggcagctatgtcaacctgaccctcagctcgggtgaccgggatatcggcagcgttcagctctatatcaccctgccggagaacggctctgccactatgactgccaccgcggtccaggatggcaatgtggtgatggaacgtcaggtgcagcccaacctcaccaatgtgtggaagcccaccctgaccggctatggcacagctgaggtggagatcctgctggatggcgaacactaccgcacctatgaggtggacttcgatgaaggcacctccacccagatcgactgaggcggcagagtatgacagaaatgacagagaaaacagaaacagccacagtccagggacggattatccgggccctgggcgggttctactatatcgatacaccggagggcctggtggagtgccgggcccggggtgtgttccgcaaggagggcgtcactccctatgtgggggatctggcccgggcggaacttaccggggaaggcaagggctatctgatcgagctcctgccccggaagaacttcctgatccgcccgccggtggcaaatatcgacctgctggtgctggtggtatccactgtcagcccggcacccaaccgctttgtgctggataagatgctggccgtggcggaacacaagggcattgagcccatgctggcagtgaccaagagcgacctgcgccgggacccggaacttcttgcggactaccgcaaggcagggtaccgctgcctggaactctcctcggctaccggggagggcgtggcagaactgcgggaacagctcaccggaggccgtctggtggtattcagcggcaataccggcgccggcaagagctccctgctcaacgcgctggaacccggcctgagccttgccaccggcgaggtcagtgaaaagctgggccggggccggcacaccacccgccatgtggagctctatccggtgggcggcggtttcctggcggatacaccgggcttttcctcggtggaactggagaaattcgctgtgatccgcaaggaggagcttgccggatgcttccgggaattccagacctatgtggatcagtgccggttcggggactgttcccataccggggagaagggctgcgccgtggtggaagcggtgcagcggggcgagattgcccgcagccggtttgaaagctactgcaccctctatgaggacgcaaaaaaactcaacgactgggaactgcccggttatcgtcagaaagggtgaggaagatgccgcgctgtgtgatttttaccgcaggggatcagcatggaatcgaaaaacatgagatcggcctgcgccatgatgactttgtgatctgctgtgatgccggttaccggctggctcagcgtctgggggtgcgccccgacctgctgctgggggattttgactcctataccggcgcgctgcccgaggatattccggtgcagcggtacatccgtgacaaggacgacaccgacactgtgatcgccgtccggtatgcgctggaacacggctatgacagcatcctgttggtggcagccaccggcggacggctggatcatctgctgggcaacctgcagatcctggcctttatttccgagaaggctccgggaacagcggcagagatccttggttcccatgagcgggtctggctgctggatggcgggagcctgtccattcagggcaagccggagagcaccttctcggtgctgtgccacagtgaccgggccgagggtgtgaccatccggggcgcccggttcgggctggaaaatgcggtgatgaccaaccgtttcccgctgggcatcagcaaccgcatcggagaggaacgcatcgccaccatctcggtggagaagggcattctctttgtgatctatcccaaggaggtctgagcccatgaagcgtatgctctgccttcttctggggctttgcctgctgctgggcggctgtactgccggcaatgaggagagttcttcttcggagctggagagccaggtgtccgcggcggaaccggcagccgggggcatcaccgaggaagaagcggtggaacgggtgcgggaactgctcatctcgaacagccagaagctctgcaccaccgatgaaaacatcgccatgctccggaacagccagtttacctgcgaagggaccgtcacagtggaggacaccgagtgctggctggtgaaaaagggaaccggcagctatgcggtttccaaggacggggaacatctctatgagtggcaggaggtcaccgggagctatgccccgatccagtgaattgcgaaaaaagggagagaaaccatctggtttctctcccttttttgttgtgtgtaagacagtcagcgcaggccggcttctctggctgcgtctgccagcgagggcagaccggcaggggcatctgcacggaaggcatagcggatctctccgtccggggcgatgacaaacagcccggggtactgcaggggattgcccgagtcctctccatgcaccagaccggcttccttggccttggcaaccgtttcagcgacaatgggattgcgtcccagctcttcccggtcggcggcgctgcccaggcccagagccttgtagagctcgccctccacatcgcagatcaccggaacgccgtcaaagcggtcctggagcgagcggatgtaggcgggataggactgtacgcccaccaccaggtcaaatccggggttttcctgggagcggtactcccggatcagattgcccagctcatactgggagagggtgcagccgaagaaccggtgcagtgccagaaccagcggacggctgcccagcaggtcatagagattcgatacattgtcccggcccacaatctggatcgggagattcggcagtttattcataatgggttcctccattcaaaaagacagggtcagcagggttttccgggcggtgcggcaccgccgtttgagttgtcccaagtataggctttttgaagggaaaagtcggtgactgagtcacggaggaggtcagatccccagggtgcccagcagcaggccggaggccgcgccgatgccccagagcagcaggagtaccagcagggtctggcgcaggctgcggctggtgcgcagcagggggaccaggcccacaccggtggcgctgcacagtcctgccagggcagagctgaagcgcagggtccccgagagatagagctcggtgagcagcacgctggagaagcagccggggatcagtcccaccagcgaggcgatcaccggctggaaggggccggtctgctgcaggaagccggcaaactgttcttctcccaccagggcgatgaggattccgatgccggcactgaacaggaagatatagacgaagatctgcagcgtatgggtgagggctgccatccagataccctgttcctcctcatgttcctcgtggcagtccacggcggcggccttgccggtgaatccgccccggagcggggcaggcagcagccgggtcaccaccagatccagcaggagccccactgccagcgcaatgcacagcttgatgaggatcagcattgccagctcaggccagcgctccggcacagccagcagcatgggaatggcctcatcgctggtggcaataaagacagccatcagggttcccagcgtgatgaccccgctgccgtaaaggctggctgccatggcagagaatccgcactggggaatggtgcccagcaatgcgcccacagccgcgccccagcggctgccctccgccagcagggcttcgatccggctgccccgggtgcgttcaatccattcgatgagcagataggccaggtagaggaagggcagcattttgacgctgtccagcccggcatccagcagtatatccagcatagtatcacttctcctgttgtttattcgtgccattccggcaaaaagaacaccccgcgtcagacagggtgttctttcaaggattcatgttcagtttgggggaagtcagacgggattattcttcgtcctcatcgtcgcgactgctgcggcgatcgtcctcctcatcttcgtccctcttctcgtcttcgtcctgatcctgatcctcctcatcctcgtccttcttgttgacatcgtggtcgccgtcgcagacaggcgggatattggagggtttgtaccagccggtagcggtggtttcacagtcgtcgccagccaggtcaccagtgatggtgcagtactccagaacctctacatccgggtcatcctggaactggaccactgccaggttctgatggatcgggcccatgatgttcttgtagatgatcggcggggcgtaggagtaatagcggatctgttcgggaatatcgtagcccagccagcagacgcctacataatagggagttacaccgatgaaccactggttgttatcgttatccgaagtaccggtcttaccggctaccggcatggcgctgaacttcgcagtggtaccggtaccataggtgccggtggtaacgccctggagcaggtggttgagcacagtggcgctctcactggagatcacccggttggaaatgggggtgtgttccaggatcacagtgccgtcagctgtctccacacgggtgtaggaatagggctcggtatagataccgccgttgccgaagatctgataggctccggccattgccagcggggtgacgccatcggtcatttcacccagtgccatgggagccaggttgatgtccgaaagaacccggccgttttccgtacggctctccaccagggtggagatgcccagcttgttcttcaggaagttgaagctcacctgcggggtgatgatctgctgcagcttgaccggaatggtgttggtcgagcgctggatcgcgatattgacggtgatattgcccaggtaggaaccatagaagttcaccggccaggtgcgctgtacaccgttttctgtgatggtaatgggggaatcctctaccagcgaggagaaatgaatgatgtcattttccacagccagcgaataggatgcgataggcttgatggtagaaccggggtgacgcaccgcgtcacgggcacggttgaaggtacgggcaccggtcttggtgcggtcggaaccggcaatggccttgatctgaccatccagtcccagcaccacaaaggcgccttcgggatattcctcattgatgaccgccgggaagatggtggaattggtgtccacattgaaggccttttccagatagtcctgcatctccacatcacaggtggtgtaaacacgcagaccgctgttgtagagcaggtcataggcttcctcttcggtatagctcttctcggccttgagatcctccagcacatcgctgatcacctgttcggtgaaccagctccagtcggtataggtgttgacctgaccgccggtatcctccgcgatcaccagctggtaattggaggcttcctcatattcctcatcgctgaggtatccctgttcatgcatcagatacaggcaggtctgggtgcgttctaccagattgtcatagttggtgaagggattgtatttggtggggttctgggtgatggaaacaatcgaggcacattctgccacgttgagttcgctgacgtccttcccataatagagattggcggcagcctgtacaccggcagtattattgccaaggccgatggtgttgaggtaaacctccatgatctgttccttggaataatgcttttccagcttcatggcacgaaggatttccttgacctttcggataatggagaaatcatcatcgtgtgtgacattcttgaccacctgctgggtaatggtggaaccgccgggggtgccctcatagatggggatcaccaggttgacagccgaggcaatggtgcgtttccagtccacgccctgatgctcccggaagcgcttgtcctccagagcaatggcggcgttgaccatatcttcgggaatgtcatcataatccacccagatccggttcacatcgccatgcagacgttccatttcaatgtcgttgccattggcgtccttaccatagagaatggtggtatagctcatctgggccgcgtcgagatccaccaccggttcatcggcgatatacttgaatatgtacacagtcagcgcacagccgatgacacaggcagcaatgattcccaggcacagagcaattcccagattgtaccatactttcgggagccgctccagccggtttggtcttgcggattttgccatgttcagaatctactcctttacagggataccagacagggcctgcccggatatgaaaataccagggatttcctgcctgtacagacccgggcacaacacttcggaaaaaggccggaaaacagccggttctgccgggtcaatccaatcaaaagcagaccgctttacggctcaggataccgggggttccggctgaaatccggcaaagggtcatgctgaagctattatagcacataattacatcaaaatgctacaaaactttgaatattcccggtttccggctgtataatcgccgaaaccaggcacaaaatacagaaaaaggcagacagagcctgtccggtatggacaggggagagatccgccggaaagggaggcaagagatccatggaaacacgcaaggttattctttgctgtgcagcatcggcggcggtatcggctctgatcgcggtgacagccactgccgcagccatccgggaagaggtgcagccgccgcagctgccggaacagtcccagcccccggctgtgcagccggaatcccaggaccatgaatatatcctgggggaatgggaaggacggctggcagtataccggaccggggaatcagaaccggattcggtgctggatgtctatcttggtctgctgccgccggcagatgcccaggcactccgggagggaatcccggtggaagaccagactgaactgaaccgccggctggaagattttatgagctgagagggaatgtcaccggactgtaaccgctttttcatcaaaaaaggctgaaatattttatacaatatgctatgatatgcgcaaaggagagagaatatggatttcaaattcgcgcataacagtatcacggtgctggatctggagaggagcatcgcattttaccgggaggcgttggggctgcgggaagtatcccgccggaaatcccaggacggacaggctacgctggtgagcctgagcgacggacagagtgatgtaaagctcgagctggttgcccatgaggaccggctgaacccttacgacctcggcgaaaacgaaacacacattgcctttaccaccgaacattttgaagaggcccgggaactgcatcagcagatggactgcatctgctatgagaaccccaagaagaacctctacttcatcaatgatccggacggctactggctggagatcctgccctgctgctgagttctggcataaaaagaccaaaggcgtctgccctgtgtggggcgggcgcttttttactgccctgaaaaaggaaagtcagctgtctgtgccctccttccggaaccagggcagcttcccctggcagcccagatcccacaggaacaataccgccgccgggagcagcatggctcccagtgccccgcccagccgcagtccggcaaagagcgccgcggtgagcaccagcggaggcagtccggcgccggcgcccagcagccggggttccaggatggcccggagcagttcggcagagccaaagagcagccagagccccacccccagggcagcgcggccccggcagagctcccagaccccccagggcagcaggatcatgccgctgccgatgagcggaagcaggtccagcagggtgatggcaaaggccgctgccagcgggtgtgccacccccagcagccacagcccggcggacagcactgccagcaataccagcgagaggatcgcccaggcccggagcatccgcagcagcacccggctgccgaaatagcgcagttcccccagaagggcagtcagcccgggcggcactttgtcccggaggagcgcacagagccggggatagtcagcagccacgcagaagctgaggatcaccgtgaatacactgcccagcaacagagcgggaagcctggagagccagcgggcggtcaggctggcagcccggctggaaagccccgagagcagcccgggcagggagcgctccagcgcggcggcagcccagtccaccagcggcgctgtgaccggggcataccgggcggagaactcctccagccggggcaggagcagctccagggccggaagcagggaggaattccacagccggggcagctgccggaggagctgcgcgccctgtccggcggcccaggagccagcggcggtcagggcaatccccagcagcagatagaacagcgccatggttcccactgccgccagccgccggggacagccggtgtgccgggagagggtctcgaccatcggagccatcagggcggcgaggagcagccccagggtgagcggcgcaaagagtccggtcatcagccagaccagtccggcagccagcagcacgccgggcaggatgcgccggagctgtcccggggcatgggtcgtctgttccatccgcattcctccctcccgatgaatctgctttcagtatacggcagtccccgtcgggttatgagcctttccccgggtttccggtttcaggggctgtttttcagctgatgacagttttttgtactttttcaaagttttgtcttgcattctctcatttgttatggtatatttgtgttcatacgaagtacaacagttttttggaggtggacgcaatggcggaacagaacaagttcctgttggtagatctttcggtactgccggaggttttcacaaaggtcgtggaggccaagcgctatatggcgcagggcaaggcgaaaagctattccgacgcggctaaaatggctggaatttcccgcagcgccttttataagtataaggataaggtatatccctacgagagcaattccctcacccgggtgctcacccttacggtgacactggtggatgagccgggtattctctcctcgctcatcaccggattgtatcagatcggggcaaacatcatcaccatcaaccagaatatccctgtggacggcgtggcgccggtatcggtatcgctgcgcatcgaccgggaacggggcgatgaagatgtggtcagccatgtgcgccagatcgccggcgttgtgtcggtgcgcactgtcaacgcatagggaaggggaatttttaccatgaaaattgctatcgcgggttatggcgtcgtaggacgcggcacccatgagcttctgctgatgaaccgggacaagatcgctgcccgggccggcgaggagatcgaagtgaagtatgtgctggaccccaagcctctggagggcactccggcagagcggctcaaggcatcgggcatcgaggagatcctggctgatccggaagtgaagctgctggtggaggccatcggcggcgtgggcccggcttatgaatatgtgaaggccgcactggaatcgggccgcagtgttgtgacccccaacaagcagctggtggcggaaaagggcgccgagctccttgccatcgccagggagaagaatgtgggcttcctgttcgaagccagtgtagcgggcggtactccggtgctgcaccccatcagccagtgtctctgggccaatgacctggatctggcagcgggcattctcaacggcaccaccaactatatcctcaccaagatggtgcaggagggcgccggttttgaggagactctccgggaggcccagcgtctgggctatgccgaggccgatcccaccgccgacatcgagggcatcgatgcctgccgcaaggcgtgcatcctggcagatctgctctttggcaagcataccgacccgaacaaggtctttacccagggcattaccaggatcacagccgccgatgtggaggcagccggtctggtgggctgtaatatcaagctcatcggtcaggcccgccgcatggcagacggcaagatcctgtgcatggtgactccggctctgctccggaaggaacactgcatggcagaggtcaacgatgtattcaacgccgtgatggtacacagcaacggcgtcggcaatgtgatgttctacggacggggcgccggtgatctgcccaccgcatcggctgtgctctcggatgtgatcgagatcgtccggggcggctgccggaatgcgggcatcatcggctggactgacgagggcgacgcccatctggcggaccgccgggactatgacattcacgctctggtgcgcatcaagggcatggactttgcggcggcggagaagctgttcaaggactgcgagcccatctgggagaaggacggtgaaacagctgccctggtgtacaatgtgaacgaaggcgagctggaaaagatcctgagcggactggatgctgccccgtatatccgtatgtttgactgctgacaggaggcaaacggcatgatttgtgtgaaggtgccggcaacaacggcaaatttcggcgctggctttgacagcctcggggcggcactggactattataactgcatctggatggaggagtgggacggctgctggatcgagatcctggacgataccgatgtccccaccgatgaaaccaacctgatctaccagacggcgaaggcactgtatgagcgctgcgggcgtccgttccggggactgcatatccgtcaggagaaccgcattcccacagcccgggggctgggcagttcctcggcctgcatagccggaggactgctgggcgccaacgaactgctgggccgtccctgtgagctggctcagctggtggatctggcggcggcaatggaaggccatccggataactccaccccggcgctgctgggcggcttcgtggcggcagccatggagggcatgtattctgggcccagtgccccatccccgaggaactgggatttgtggcggtgatccccgattttgaactgaaaaccgccgatgctcgccgggctctgcccgatcagtatgtccgggcggacggggtctacaacctgtcccggagcgccctgatggcgatctccatagcccagggcaagctggaaaacctgcgcattgccgcagaggaccggctgcaccagccctaccggctgaagctgatcctcggcgcggagcaggtctttgatttctttgacaaacagcaggcgtatgctgcctatatcagcggcgccggttccaccctgatgggtctggtcccggctgaccgtatgaaggacatctgtcaggctgcccgggcatttctggatgcccagggactgtgcggctggcaggtgctgggactccgggccggtgaaggcgcccggatcgtgaccgcagaggagggaagataacatggcacttattgtacagaaattcggaggaagctcggtggcggatgcccagcgggtctcccatgtggcggggatcatcgccaatacctaccgcaagggcaatcaggtggttgtagttgtatccgcacagggcaagaccacggaccatctcatcgcccaggcccaggaagtcaatcccaacccgtccaagcgggagctggatgccctgatggcaaccggtgagctggcttccatggctctgatggctctggcgctggagcgtctgggcatgccggcaatttccctgtccggctggcaggcgggtatccataccgacagcacccatggagctgcccgggtgagccgcatcgataccgaacggctccgcaatgagctggataagggcaatatcgtcattgtggcaggattccagggcgtcaacaagtatgaggacatcaccaccctgggccggggcggttcggataccagtgctgtggcgctggcagcagccctcaatgcggatctctgtcagatctacaccgatgtggacggcgtctatactgccgatccccggattgtgcccaatgccatcaagatcgatgagatcacctacgatgaaatgctggagctggcttcgctgggcgccaatgtgctgcacaaccgctcagtggagatggcaaagaaatacaatgtgaatctggaagttctctcgagcatgaccggtgccgagggtacgatcgtcaaggaggttaccgacgtggaaaaactgctgatcaagggtgttaccaaggatgtgaatatcgcacggatctcggcaatgggcgtttccgaccagccgggtatcgcgttccgtctgttctcactgctggcaaagcacaaggtcagcgtggacatcattctccagtcggtgggccgggacggtacccaggacatcagcttcaccgtggctgccaaggacgccgatgaggtggtccgtctgctgaaggagcgcaaggataccctgggcctcaagagtgtgatctgcgatcccaatgtggcaaaggtatccattgtgggcgctggtatggaaacccatgcaggtgtagcttccaagatgttcgaggcactgggcgaggccaacatcaacatccagatgatcgccaccagtgagatcaagatctcggtgcttattgccgaggaggaggccaacaaggctgtggctgccatccaccgtgctttctatggtgaataagcctccgtatcgtatatttgtaatataaatatacggtttggaatatactgaagggcatctttgccctgtcccgggccggtctctgcaactgccggcctggcaacaatcttttacctctctcatagcaaaaaccgtcggagcgtgctccggcggtttttcttttgcctgtgaactttgatgggagatgaaaaaggagcagggcatattttaatcctgcctcggacagagcacacaggccgaaattatatcctgattgtatattccatactaatttatacagaaataggggcgattccgggcacaaaaaagccgcccggcaaaccggacggctttggatggcattggggaaatcagatgtgcaggggagcggtggcagcacccagccacttgcgctcctccggctccagcatgggcgagagctgttcgaacacatagctgtggtactggttgagccaggcaacctcgctgcgggagagcatcttggtttcgatggcctgggtgttgatggggcagagggtgaggggttcgaaccggaagaactgaccgaactcgtccgaacgcttatcccggacaacggtaaccaggttctcggtgcggacacccagcatgccggcccggtagattcccggctcgatgctgatgaccatgccctcttccatgggcacacgggcgttggcgaagttggtggggccctcatggtcgttgaggtagcagcccacgccatgaccggtgccgtgcttgtagtccagatagttttcccacatcacctgacgggagaggacatccaggctcttgccggtgcagccctccgggaaccgggcggcgtgcagccggataaaggcctgcagcaccagggtgtaatcccggcgatagctgcccggaacctcacccagcggaatggtacgggtaatatcggtggtgccgccaaggtactgggcaccgctgtccaccagcaggaagctgccttcccgcagttccgcgcagtggtcggcagagggcgcatagtggacgatggcgccgttggctccatagccggcgatggtggcaaaggagagcccacggaactcgggctgagccgaacgcagctcatagagcttctcgcagatgctccactcggtcaggcggctggtcttgatggccttttccagccacatcaggaagcgcaccatggcaacgccgtcatgcttgtgggcagtgcggatatgctgcagctccacatggttcttcaccatcttgagatgctcgacaatgtcgtcctccagcaggacacggtccacccgctcgcccaggttatcatagatggcagcattgaccgtccgggccgagaatccgatccggccccgtccgggcagtgttgtaactttcgagtaaatatcatcgcagggcaggatctgcacacctgcctctgccagcgaagccgccagggaatcgggaatgcgttcccggtcgccgaacaggactgcctcgtcctgacagatcatggcaaagccggtgaacagcgggctggtatccacatcgctgccgcgcaggttgtaaagccagcagaggctgtccagcgcgcccactacatagtagtccagacgcagcttttccatcttttcccgcaccagctgcagcttcttgcggaccgacaggccggcatagtcctcgggataggcaaaggccatgccggagggcagtgccggacggtcctcggtccagagctcatccaccagacgcagatcggtgcgcagtgtgatgtcattcacagcgcacttttcccgcagttccagcaccatggcagtggaagccacccgtccgttgagggcaatggtgccgccggaggctaccgatttgaacagatagtccgtcagggaaatcacaccggcgtccgaagcccggaacagggtgacaccgcttccgctgagctggctggcagcctgcagataatagcgtccatcggtccagagaccggcctcctgctgggttactacaaccgtgcccgccgatccggtgaatccggagatccagctgcgctcccgatagtattccggcagatattcgctcatgtgttcatcggaatcgaacacgatatatgcatcaatgccgtttgctctcatcttatctctgagggcggcaattctctccttgacagtcataagtcagacacctccataacactactatggtagcataaaagtctgtaaaaatcacgaactttttttggaacagacgcattttctgaccggggaaaaatctgtttacacagcggacgggagtgttgtataatagaaattgattctgtcaaaacagggcagacaggttcccgggcggatttcccgccggaatcagagcagagagaatgatcttgaacaggagttttttatgaggaatacatcacttttgcggcgggctgcggcactgggctgtgcggcgctgctgactttcgggctggcagcctgcggggagaaggaagagccccagactgaaacccggctctaccgggacggcacttatacagcgcagtttgatacagccggtgcggacggctataccacctatgcggtggtggagatcgccggcgacaaggtgagcgtcaccgaatttgacggaaagaatgcctccggggaactgcgcagcgcggatactgagctggcagactccatgaaggagggggcttcggagtacctgacctttgagccgaccccggcgaacctctcaaagaaggccatggaggactttgccgcggccggcggcgatccggacagcatggcactgaccgccggcggcccggaatatggcctggagctggcggcactggtggatgcggtattggacggcccggcaaaggcagattcggagagcgggtccacccaggtggaggtgccctactatgcggatggcagctataaagtgaccgtccaggatttcgacctgagcggctataaggaatatatcgtgctgaaggtatccggcggcgtgcccacagtggaggaattcgatgctgtggacgaggagggcaagctccgcagtgaggatactgagatcaatcccaaggtgccctattccgagtcggtaccggccctgatggactccttcaacagcgccaggacggtggagggcattgaaaccgtcaccggcgccaccgagagcagtgactgcttccgtctgctggtggagcgggcattggaaaacgcccacctgcggtacagcaccgatgatactgtggatgtgctcggcgatggcagcggcctcaaggatggggtctacaaggcggagatgagcgagttcgaaaacggctggaaggattatgtcattgcccaggtatggcatggcaatgtggtgatcgtggagctggattccctcaatgagtccggcaccaagaagtcggcggattcctcctttgcccagtccctcaaggacaatgacaaggctcccggcgacagcgtggcagtctatctgggcaagatcgtgtcggccttcaaccgggcagacggggatcttcccgctatggagaatgtagcgggcgccaccatttccgccaataacttcaagatcatgctcggcgagctgatgggcggcaatatggtcaccggcgataccgaagtgcgtgagatcgcaccgctcaccgccgaagagctcagcggggaggcctcctccgaagcagaggacagctcttcgtctgagagcagttcttcggcagcctgagcaatactggaaacaaccgacggggggcaggcagctccccgtttttagtgagaaaggaagagaaatatggaacaggcagcagtgattctgaaaaagggcaaaggccggaccctgaaagccggcggcgcctggatctttgacaatgagatcgacaaggtggagggcactcctgaggatggcagtctg

SEQ ID NO: 2459 - DNA, 25900 bp, Unknown
  16S sequences of unknown bacteria
tgtatgaacttctttttatttccctaaattgttgcacttgatagtataattcaccgggtgcatgacaaaaggccttcctttgggaaggcctttttccgcttttcacttggttcgattgcctagcgcggcagcgcagtatgacagcggaggcactccgcctgggattaacggtatttcttgtaattctcttcgaactgggcgaaaaggttccgggccttttcctcccactgatgggggtcctgataagtatcccgggggtccaggatgccgccatccaccccgtgcagagccgtgggcacctccagatcaaaataagggatacgcttggtgggggcattcagaatggaaccgtccagaatggcatcgatgatggcccgggtgtcgtggatggagaggcgcttgccggtgccgttccagccggtgttcaccagataggcccgggcgccgctctgctccatcttccgcaaaagctcctgggcgtattttctgggatgcagctccaggaaggcctggccgaagcaggcggagaaggtgggggtgggctgggtgatgccacgctcggtgccggccagcttggaggtgaagccggagaggaaataatactgggtctgctccggggtgaggatggacaccggcggcagcaccccgaaggcatcggcggtgaggaagatcacatgcttggcgtgggggcctaccgaccggggctgcactctcttttcaatgtgggaaataggataggacacccgggtgttttcggtgaccgaggtgtcggcaaaatcgcattggccgtcttccttcaccgtcacattttccagaagggcattccggcggatggcgtggtagatatccggctcggattccttgtccaggcccaccaccttggcatagcagccgccctccaggttgaagatgccgtgctcatcccagccgtgctcgtcgtcgccgatgagcaggcggtgaggatcggtggacagggtggtcttgccggtgcccgacaggccgaagaacaaggcggtgttctggccactgagatcggtgttggccgagcagtgcatggaggcaatgcctttcaggggcaggtagtagttcatcatggagaagatgccctttttcatctccccgccgtaccaggtgttgaggatcacctgctcccgggaggtgatgttgaacagcaccgccgtgggggaatggagccccagttcttcgtaattttccaccggggtatgggaggcgttgtagcaaataaagtccggctcgaaatgctccagttcttcctctgtgggctggatgaacatattcttcacaaaatgggcctgccaggccacttccatgatgaagcgcacggccatgcgggtttgggggttggcgccgcagaacacatccatcacatagagttttttccccgaaagggactgcaccgccagtttcttgcattcctcccaggccttctgggaagcgggcttgttgtcgttggggaactccggggaggtccaccacacggtgtcccggctcttttcgtccatgacgatgaatttgtccttgggggagcggccggtgtagacgccggtcatcacattgacggcccccagctctgtcagctggcccttttcaaagccttccagcccgggccgggtctcttcttcgaacaaagtctcataggaggggttgcggagaatctgggaaatgccggtgatgccatacttgctcagatcgatgtttgccatggtgcgcgacctctttcctcatggaatttctcccccaaaatggtaccggggaattgttgcatttatcatacaggacctggtaaatgaagtcaatgacagaaaaacgatttttccccgttttttctttcaaaacgaaataaaaaggccaaaaacgccgttttttcccaaaaatcgataaaaaaatcacaagcagcgtgacgctgcacccatactgcgctgccgcgctgggcagttgaacgaaagccggttgtattcactcaggcaaagagagggatggcagcggggccaccccgccgctgccgcgctgggcagttgaatgaaagccggttgtattcactcaggcaaagaaggcgcccttgtgcaaagggagctgtcggcgaacgccgactgagggattggcggcgagccgccgctggcaacctgcgctgccggtccggtgaccggacgaccatactgcgctgccgcgctgggcagttgaatgaaagccggttggagtttcctggcttcacaatcccccctgcatggccctgccatgccgtcccccctttgcacaaggggggctttttctttgcccaggtggacacaaccggcaaaggcaaagaaagttatgggtccagcgtcacgctggccccgcctggggcgcgaaaaaggtcggggaaaaacctagtttttccccgagaggtccggtgtccggacggccatattttctttgcctttctgcatcgggcttgcccggcgcgggagcgcagtatgaccgtccaggcactgggcccgaaataacacgccgccaacgctctaggaggggcccggcggttcccgccgggaagaagcctggagtagccttcgccgtagcgaaggctctggctctgcatagtatgtgggggagggaggccgaagatggagatcacaggtttcaagcaatcgaacaaagcgaactttcaaccgggacgaaaaagcccggttcagtatatcgtggtgcactatacggccaacaaaggcgacacggccaggaacaacgccgactattttgcacgggaagaaaccaaaacctccgcccattactttgtggacgaaaaggaagtgtggcagagcgtaaaggacgaggacaccgcctatcactgcggggccaagacctacaagcaccccctttgccgcaattataacagcattggggtggagatgtgcatctgggacaaagggggaaaagtgcgccccggcacagtggaaaaggccgcagaagtggtgcggcagctgatggcccgctacaatgtgccgctggagcgagtgctgcggcactgggatgtcaccggaaaaaactgccctcttcccatggtggagaatccttccctgtgggaggatttcaaaacaaagctgaaaggagtagatgaaatgctggattatcccgattgggcactgaaaacctaccagtggtatgaggatatgccggaatgggcccgggaatcggtgcagaaagcggtaaaacggggcctgatatccaccaatgcagacaattccgtcagcgtattgggcgccaatttgcagaccctggtttatctggaccgggccggtttattggacaaataaaaggcacaaaggctggttgtatcaatcagagcaaagaagcccccttttgcacaaggggggtccggtgtccggacaggcccagtgcctgggcagtcgttccgctctttgctgctcagcatacaaccaactctgggtgctattgcccagcgcgggagcgcagtatgggtgcagcgtcacgctgcttgccgggcgcgggagcgcagtttggccgtccggacaccggaccacgacggacggaaaagacggtgagaggtgtggtaagatggggacagaaaaaagagggaaaggacggaacggaatatgtataccaagatcgaccaagggctgtggcggcagatgaaacagaaagggctgagcgagacgggccgtcttttgtacctgtacctgttcagctgtccccaccggaatatgctgggactgtatgccctgccccaggcatactgctgcgccgatctgggaatggagccccaacgggtagcggaagggttccgggagctggaagaagtcgggctggtggcctatgaccaggaggaagaaatggtattgctcaccgattttctccggacaaaccctctggacaatgtgaatgtgcagaaaaaagcctgcaccattttccagggcctgccccaaagcccgctgttttcccttctggccgaccttctgcgccagatggaaaagccctattctctgctgcaaaaggcggtctctgcacgcatccacaaagggtccggggaagggtatgccaatacagaagaagaaaccgaaacagaaacagaaaaagaaaaagtagaagaaacagaagaaagagaaggagccggagcagaacggtttgcgccccggcgctttcacccacccaccctctctcaggtgcgggattatgtttatgagagaaattctccggtagaccctcagggatttctggatttctaccaggccaagggctggatggtgggcagcacgcccatgcaggactggaaagcggctttgcgcaatgcagagagctgggagcggtggcagcggcaggagcggcaggttgaggtctgcggggccactgaggagccggacccctacgaaagcggtgagaccctgtggcctttctgagccgtggaaatggcccggcaggggatctggaagccctggctgcacgcaaaggggagcacctcccgggggattatatccaggacggcctgctccattgcggcgcctgccatagccggaaggaaacctgggtggagctgttcggcttgcggcggaaggtggcctgcctgtgccggtgccagagcgagaaagtgcagcggcagctggaggaaatggaggcgcggcagcgtatggaggccctggagcggaagcgggccgccgctgtacaggatatggcctaccggaaatggacctttgacaaagacgacggagggaatccccgggtgatggaggccctgcgccgctactgccagaagtggccggagatgaaaaagcagaacctggggctgtatctctacgggggcgtgggcaccggcaagacctttgccgcggcctgcgtggccaatgagctgacccggcagggggtgccggtgctgatgaccagcctggtgcgcatggcaaacgctttgggctggggaggggagcgggagcagtttctccgcagcctgaacggctatgacctgctggtgctggacgatctgggagctcagcgggggagcgatgccatgaaggaggcggtgtatcagatcatcgacagccgctatgccagcggcaagccgattgtggtcaccaccaatctgacctgggagcagttccagagccccagggaggaaggggacaggcgggtctatgaccgcatccgggaaatgacggtggccatccacatgggcggccccagccgccgccatcggctccatgaggaaaaacagaacgccgcccgggcgatgctgctgcccggcattgcacccggccctggcctgcaggccggataaaagagataaaagaaaggagacagaagcatgaagcagctgatggaacgatacaacgaagcccaggaaaaagcggatccatacgccagggcgccccgggcagggtggatggaggccgggcggattgtggccgaaaaaagtaacgacagagtaacgacagcaataccaccaaaatcccggaaaaatcggcaatttcacattttcccaagcagcacgaaaaaaccccggaagccttgattttcaaggtttccggggcctttcaagatggcagcgggagaaggattcgaaccctcacaaacagagtcagagtctgtcgtgctacccttacacaatcccgctatttgtttttcgctttgggccgtggccctgagcgcataatttattatagctatatttttcagaatgtcaacacattttttaaaaaaatctgaaaaactttgaaaaaactttccggaagtttttcaaggtctcttgcaattctccccgaaaacgaagataatataacagggaggccctgtacccgttcctgtctccggcagaaatgcgttgtttgctttcttgctccgggtgtggcgagccatcacccgggaaaggctttggtgcagtcctggcagcgtgcctttgctggcatactatgtttctgcaccaagcaacagaaccaaccacagaacgattgcccagcgcggcagcgcagtatgggtccagcgtcacgctgggaggagaaacaccatgaaattgatggccattgatggcaacagcctggtgaaccgggctttttatgccgtgcgcctgctgaccaaccggcaggggctttataccaatgcagtatatggctttgtgaatatcttactcaagctgctggaggaagagcagccggaccaggtgtgcgtctgctttgatatgcgggcgaaaaccttccgccatttaaaatacgaaggctataaggcccagcggaaggggatgcccgatgagctggcccagcagatgcctattattaaagaagtgctggacaagatgggcattgcccgcatggagctggagggcttcgaagccgatgaccttctgggcaccctggcccggctctgccgggaaaaaggggaggactgccttatcgtcaccggtgaccgggacagtctccagttcatcgcccaaggggccaccgtcaagctggtgaccaccaaaatgggccagaccatctataaagactatgacgagcaggccttccgggaaagttaccagggcctttctcccgataagatcgtcgatctgaaagccctgatgggggatgcctccgacaacatccccggcgtgcccggcatcggagaaaagaccgccatgagcctgctcacccgattcggctccctggatggagtctatgagcacctggaggacccgtccctcaccccttcccagaaaaagaagctcgccgccgggcaggacagcgcccgcctcagcttcgaactggccctgggggtggtggacgctcccatcaccgccacgctccccagcctgagccggggcgagatggacaaaccggggcttttccagctgttttccatgctggagttttcctccctcacaaagcgtctggggctggagggggaaggggaaagccgtcagacgccgcaggcccaggagatctcccgggacttccgtctggcccagccggaggaactgccagagctgctgcaagccttttcccggaaagacacctcctgccgcctggaagaagggttccgcgccctggccctggaacaggagggggaagtggtgctctttacccgggagcatctgggggaagaagcattcatgggcttcctccgggactttttccagggaacagggggcaaggtgctctgcgacgccaagcccacctggaaagctctgctggaagggggcattcacccccagggtctgaaaggggacaccgccctcagctgctacctgctggaccccaccgccggtggctacaccctggagaaaaccgccgcggcctatctgggggcgcacctgctcccggagagccactacaccggggaggacgccttttctcccctgaacccggagagcatggccctgtccgccctggcccagcatgcaagggccgtggggcggcttcatgaaaccctgggagagcgcatccgggaagagggaatggaaaaactcctttatgaagtggagctgcctttggttcccgttttgtgccagatggagcgggagggctttttgctggacaccggaaggcttctctgtttcggggcctccctcagcagccagatcgaggagctgacacaggagatttaccgcctggccggggagcagttcaacatcaactccacccagcagctggggcatatcctgtttgaaaaactggggctcaaagccatcaaaaagaccaagaagggctattccaccgacattgaagtgctggaaaagctgaaaaacagccatgccattgtgccccttattattgaataccggaagctgaccaagctgaaaagcacctatgtggacggcctgagccggctggtgggaggggatggacgggtgcacaccaccttccagcagatgatcaccgccaccgggcggctcagcagcaccgagcccaacttgcagaacatcccggtgcgccagcagatcggcgccgagatccgccggtgctttgtggcccggcccggctgggtgctcatcgacgccgactattcccagatcgagctgcgggtgctggcccatatcgccgatgaccccattatgaagagggcctttttggaaggggaggacatccacaccgtcaccgcctcccaggtgttcggcgtgccggtggagtttgtcacgccccagatgcgaagccatgccaaggcggtgaatttcggcattgtctacggcatttccgccttttccctgtctgaggacattcatgtgtcccagaaggaggcccagggctatatcgacagctacctggaaaaatacagcggcgtgcgccggtatatggaagagatcaaggaaaaggcccggcaggaagggtttgtcaccaccttgtggggccgccgccggtacctgcccgagctccgcagcaagaacttcaacatccgctccttcggagagcgtctggccctgaacacccccatccagggaacggccgccgacatcatcaaggcggccatggtggcggttttccgcaggctgaaaaaggaaggccttcaggcccggctgctgctccaggtccacgacgagctgattattgaagcgccccaggaggaagcggcgcaggtcagcgcccttctcaaagaggagatggaaggggccttccccttgtcggtgcgcctggtggccgatgtgagccagggagagaactggtatgaagcaaagaaataaggcgctgtggcaggtggaggggctcaaagaggcgcacatccctcagatcgccgccatggagcgggcctgcttcacagacccctggagcgaaagcgccttgcgggatgagctactgagtcctctggcccgctactttgtgtgcaccgaagagggagaagtgctggggtatatcggcacccggatggtgctggatgaatgccaggtggccaatgtggcggtatctccggcgtgccgccgggagggagtggcttcttttctgatggaggccatgctggatttctgccgccgggagggcatgaaccttgtgaccctggaagtgcgggtgtccaacagcgccgcccaggctctttatgaaaagttcggctttcagaaaaccggtatccgccccggctattaccaatcccctccggaagatgcgcttttgatggcactggagccagcgtgacgctggacccgttcctgtctccggtggggatgcgcccggggcctgggtgctccaggtgtgataaaccatcacccggaaggggctgctatgcagtcctggcccagtgcgtcagaaaagcccgcttgtattcactcaggcaaagagaggaacgggagtggcggctcgccgcccgggcactgagccaagaatggaataatgaagagagagaacaatatgaagattttagccatagaaacctcttgtgacgagacggcggcggcagtttgccaggatggccggaccattctgtccgatgtgatctattcccaggcggacatgcacgccctgtatgggggcgtggtgccggagatcgcctcccgcaagcacatcgagaaaatcagcctggtggcccagcaggccatggagcaggccggggtgaggccggaggagatcgacgccgtggccgccacctgcgcccccgggctgatcggggcccttctggtgggggccaacttcgccaaggcctgtgcccaggcctggggcgtgccctttgtgccggtgcaccatatccggggccatatcgccgccaatttcgtggccttcccggacctggagccgccctttttggcgttggtagcctcggggggccacaccgtcctggccgatgtgcaggattacacccgcatggaagtgctgggcaccacccgggacgatgcagcaggggaggccttcgacaagatcgcccgcaccctgggcctgccctatcccggcggcaaggccatggatgaactttccaggcagggtgaccctcatttttacaatctgccccaggcccatgtggcgggcaatgccctggatttctctttttccgggctgaaaaccgccgccatcaacctggtgcacaacttaggccagaagggcttgccggtggaaaaacaccatctggcggcgggggtatgccatgccgtggcagaggctattgtgccccggatgctggaagcggccaaagagcgaaagcgggataccctggtcatcgccggaggcgtggcggcaaactcggtgctgcggggtcttttggaagaggaagcagggaaggccggactgcggcttttcctgccgcccctgggcctttgcggggacaacggctccatgatcgcctgccaggcctattacgaatacctggccgggcacaccggcaccctggagcagaattgctacgccaccatgcccctttcggaggatgtgagcgtggcgctgtgatagagtgaagatgcacagagaaagaggctgcaaaggggaaaaaaagagcaaaatccccattgtcaaaacagagcataacaccttgttaaaccagaacaaagggtcgaaaaaggccggaaaccattgaaaaaaacaggggtttcgggctgtgcataactctgtggacaatgttgataactcattgtagtaagaaaacgggaacaggcggataaatccccggaaacagtcccatggaaggaagaaacaggcaaaaatggaaggaaaaaagatctcaatggcggtgatccgccggatgccccggtactatcggtatgtgagcgagctgcaccagaatggcgtggcccgcatttcctctggggcgctggcggccaagatgggcctgacggcctcccaggtgcggcaggatttcaactgctttggcggctttggccagcagggctatggttataatgtggagaatctccgggcttccatccgggagatcctcaagctggacaacaatcacacggcggtgctcatcggcgcaggtaatctgggccgggcgctgatgaccaacttcaagtttgaccaaagcgggttccagctcaccgcggcctttgatgtgcggccggagctgtttggcggccatgtggccggagtgccggtgctggatatgcaggagctggaaagctatgtggagcggcaccagccggatattgccattctgaccctgccccgtcaggcggcccgggatgtggccgacaagctgtgcagctggggcatccggggcatctggaatttcaccggcgtggatcttcatctggacggcatccatgtgccggtggagaatgtccatttcagcgaaagcctgatgacattgtcatatagaatttgaggcagcataccggcggagtgcctccgctgtcatactgtctccggtggggatgcgctgctgcacctccatgctccggtgctggcgagccaaccccggtaagggccaacctgcaatcctgggtccggtggccggacggccatactttctttgcctttctgtatacaaccggcccagcgcggcagcgcgatatgggtgcagcgtcacgctgcagccccccttgtgcaaaggggggacagcatggcgcagccatgcaagggggattgacggcactcagctacatggatgataccagccgccgggtgtgggcatggtcagccaggtgccctcaatccctcagtcggcgttcgccgacagctccctttgcacaagggagccgtctttgctgcctggcaccgaaccagcctgggttctgttgccgggcgcggcagcgcaatatgacagcggaggcactccgtggaggtaagatttatgaatgaaattctgatggtaaaaggagccaaacgggtggtagagacctgtgtgggggtgcggcctggggaacaggtgctcatcgtcaccgaaggggagaagctgcccattgcaaaggcggtggcccaggcggtctacgccgtggacgccgagcccatgatcgccctgatgctgccccgggagcgggacggccaggagcccccggcggccattgccgccgccatgaaggagagcgatgcctttatcgccgtggtgggcaagtccatcacccatacccacgccgtgaaggaagcctgcaagcgggggagccgtggggtggtgctcacccagttcacccaggagctgatgacaaaaggcggcctggaagccgatttccgggaagtggcgcccacctgcaaagcggtggcggggattctggccggggccagggaagtgcgcctcaccacccctcatggcaccgacctcaccttctccgcagaggggagacggagcaacgccatgtactgcatggtggagccgggagaattttccccggtgcccacggtggaggccaatgtatcacccctggagggcacggcccagggaatcatcgtggccaatgccagcattccctatatcggcatcggccttctggaagagccggtgacctgccgggtgcagggtggccggatcaccgccattgaggggggacgccaggccgaaatgctcaagcgggatctggagcagaagcaggaccccaatgtatataacattgccgagctgggggtggggctcaaccccaagtgccggtttatgggctttatgctggaggacgaaggggtgcgcggttcggtgcatatcggcatcggcaccagcatcaccctggggggcaatgtgaaggccgcctgccactatgacctgatcatgaccgagcccactttgatcgtggacggccagatggtcctccacaatggcagcgtggtccgctagcggagtgcctccggcagcgtgacgctgcacccaaactgcgctcccgcgctaggcgacagagcgaaggccgattgtattcactcaggcaaagagagtatgactgcccaggcactgggccggctcgccactccgcctggggcgcgaaaaaggtcggggaagtcccgtgtcgggacagccatactttctttgtctttctggatacaaccggccaactgcacaacaaaaaactcccccgatgggggagtttttttcttttggtttggtctttggtctgcgctgggcaaggactgcaaaatagccccttccgggtgatggtttatcacacccggagcacgggggaacagcagcgcatacagcctgggagagttttggccgtcccgacacgggactcagcaggaggacgaggacgaagccgcgtgggacaccggctcctgctttttctggggataggccaggggagtggtctttttctccagattttcccgggcgatggccagcatcagcctgatccggttttcctggttgacgctggtggcgctggggtcataatcaatgggcacaatattggaatcgggatagatctccttcaacttgcggatcatgcccttgcccacgatgtgattgggcaggcagccgaagggctgggtgcagatgatgttctggaacccagcgtcgatcagctcggccatctcggcggtgagcagccagccttcgcccatcttgcagcccgaaccgatcagccccttggaaagctccttggtgtgatagaagggggagggggcctggaaccggggctcctgggacacggcgtcgatcatggccttttcaatggagcaaagataatccatgatcttctttgccaccatggccttgatgggactgccgccatagagctccacatcggtgatgttgttttcaatgcagtacatcacaaaattcagcaccccggggatcatcacttcgcaatcctcccgataaagcagcccttccagatcgttgttgcccagcttggaatacttcacatagatttcgcccacgaccccaaccttcactttgggggtcatctgcaccggaatgcgggcaaaatcccggacgatctcgcccatgttctgggcgatctcctttttgccgtagccgctctttttctcaaactgctgcaccagccgctggctccaggtctccaccatggccatggcctggcccttttcggtctcatagggcttcacctggttggaaaggagcatcagaaggtcgccatagaccaaagcggccatggcctgacgcagcaggggcagagtgagctggaagcccttgtttttctccaggccggagatgttcagggagatcaccggcacctggtcaaaaccggcccggtggagggctttccgcagaaggtggatgtagttggaagcccggcagccgccgccggtctgggacagaagcagggcggtgtggtcggggtcatagttgccgcttttcagggcgtcgatcatctggccgatgaccagaagggccgggtaacaggtgtcgttgtgcacatatttcagcccgttctcggtgaccgaggggccgcagttattgagcagcgccgcccggtagccgtggctgcggagcacgctttccagaatgcggaaatagatcggggccatgttgggtaccaggatggtatattcccggcgcatttcctgggtgaacatcagccgcccttttttatcatactgcaatttggccatggtggttatttccctcctgctctttccggcgcctccagagcggccagcaaactgcgcagccggatcttcacagcgcccaggtttgtgatctcgtcgattttgatctgggtgtatattttgttttcgctctccagaatggagcggacttcatcggtggtgacggcgtccaggccgcagccgaaggacaccagctgcaccaggttcatgtcctgctgatcccggatgtgccgggcggcggcgtagagccgggcgtggtaggtccactggttgagcacgccggtgcggaagggaggttcctcctggctgatgcagtcctcgctgatgaccgccgcgccgcaggagcaaatcagcttgtcgatgccgtggttgatctccgggtccacatgatagggccgcccggccagcaccataatgggcttgccttcctgccgggcctcctggataatctcggccccacgggcccgcacctgggcgaagtaattgtcgtattcctgctgcccggctttcagtgcttcctgcacctctttcagggtgatatcggggaagtacttctgcaaaatcgtggtcattttgtgggtgaagtcccggggacggtgcaggccgatgtaatcggtgatgagcaccacatcggaaggcaggggcatattgccggagatcacttccgggtaataggccaccaccgggcagttataatggttatcccctttgtgttcatttaagttataggtcatgcagggatagaatatgcgccccaccccctgatcgatgagggattgcacatggccgtgcatcagtttggcggggaagcacacggtatccgaggggatgctcccctggccccggagatagagggcccggttggaggggggagaggtgatgacctcaaagcccagcttggtgaagaaggcgtgccagaaggggagcagttcatagaaattcaggcccatgggcagacccagctggcctcgtttgccccggatgggctgataggagcggagcagctgaagcttatgttcgtagatatccggcaggtctccggcggccctgtgggtcaccggacgctcacaccggttgccgctgatgaagcggcggtccgagccgaattggttgacggtgagtttgcagtggttctggcacaggccgcattccaccgcctggaccttgtgggtcagattttgcagctcctccggccccagcagagtggaggggcctttctgccgctccatggcatagagggccgcgccataggcgcccatcagcccggccacgctgggccgcaccacctggacgcccatttcctgctcaaaggcccggagcacggcgtcgttgaggaaggtgccgccctgtaccacaatgtgctggcccagctcctgagggctggacgcacggatgactttatagagggcatttttcaccacgctgatggacagtccggcggagatattctccaccgaggccccgtccttctgggcctgcttcaccgaggaattcataaacacggtgcaccggctgcccaggtccacgggagcgtcggccagaaggcccagtttggcaaaatcggccaccgaatagcccagggcgttggcgaaggtctgaaggaaagagccgcagcccgaggaacaggcttcgttgaggaaaatgttgtcaatggccccgttacggatcttaaagcacttgatgtcctggccgccgatgtcgatgatgaactccacttccggcaggaagcgtttggcggcggtgaagtgggccatggtttccaccacgccgtgatccatcagcagggcgttctgcacgatctcctcgccgtagccggtgacggcgctggcggcgatgggcaggttggggaagtccttgtaaaattccagcagaaactcccgcaccacctgcaccgggttgccgttgttgggcaggtagagggagcggagaatggctccatcgggagtgatgaccacgcatttgatggtggtggaaccggagtccacccccaggtacaccggcccctgataggtttcggggtcgcaagtaggcacctgggccttttcgtggcgcaggcggaaagcctcgtattcctcctggctgcggaagaggggagggatggagtcatagtggccggtaacgccggaagattccagacggcggatgatctccgggatattcagctcttcccgggcggaaagggccgagcccaaagcggcataataaagggaattttccgggcagatgccggtgaggtgcagggtttcgtcaaaggccgcgcgcagctggctgaggaaggtgaggggcccgcccaggtacaccacatttccctttatggggcggccctgggccaggccggcgatggtctggttgaccacggcgaaaaagatactcttggagatgtcggcctttttggctccctggttgagcaggggctggatatcggttttggcaaagacgccgcagcgggaggcgatggtataggtctcggtggcctgcccggccagctcgttcatttcgtcgggggtcagtttcatcagggtggccatctggtcgatgaaggcgccggtaccgccggcgcaggtaccgttcatccgcacttcggtgccgccggagaggaagaggattttggcgtcctcacctcccagttcgatgatcacatcggtgccgggcaggtaggtattggcggccaggcgggtggcatagacctcctggacgaaggggatgccgcagccctgggccatgcccatgccagccgagccggtgatggccagggaaatgttctgttcctccgggtatttctcccggatggagcggagcatttcggtggtcttttgggtgatttgggaataatggcgctcataccggctgagaaggatggagccgctttggtccagcaccacgcatttgatggtggtggaaccgatgtcgataccgatttgcaaggtgttcacctctgacttacaaagtaaagctctggttttcccccttgggggcggaataccagaatgttaccatatatcataagccgttttgtttgatttgtaaaggaaaatcacgacgatatttgtcagaaaaaaggacaaaaaaatagcgaaatccaccagcgtgccgctggacccgttcctgtctccggcatcatgcgttgtttgcctgggtgctccgggtgtgataaaccatcacccggcaggggccaaagtgcagtcctggcccagtgccacggaaaaggccggttgcgttggctagggcaaagaccagcgagccgctggacccatactctctttgccttggccggttgtgtttgccagggctaagagaagccccccttgtgcaaaggggggacagcatggcaaagccatgcaaggggggattgacggcactcaactgcctggatgatactagctgccaggtgtgggatttggtggccgggtgccctcaatccctcagtcggcgttcgccgacagctccctttgcacaagggagccgtctttgctaagtgaacacaaccggccttggctctattgcccagcgcgggagcgcagtatggccgtccggccaccggaccggtgttggctcgccagcaccggagcacgggggccaacaacgcatccccaccggagacagtatgccagcggaggcacttcgcctaggagcggaaacggtggaggagggaggaaaagaagcctggatgctgggctttttccgggggattctggctcttaggcggcgcgaaccttggcagatgggagataaaatgctcctgggcgcacagaggtgtttccccctgcggtggcagggcataggtgccgtcgggctgcagaatccgggccttctcatcatcccggaacatggtgtccagcatggacagaatctgacggcgcagatgctccggcaggatggggcaggcgatctccacccggcgctcggtgttccgggtcatgatatccccggaagaaatgtacaggcggcagttttccccctccccgaagcaatagacccgggaatgttccaggaactgacccaccagactgcggatatggatgttctcggtctccccgggcacaccgggcagcagacagcaaatgccccgcaccagcatccggatctgcaccccggcctgggaggcctcccgcagtttctggatgatgtccttgtcggtgacgctgttgcatttgaaggtcaggctgccgggaagtccctgctggcacaggcggatctgctcgtcgatgcccgccagaatgttgctcttgaagctcaccggggccacccacagcttctggtaaatcccttccagattgcccaggcccatgttggcgaaaaaggcggcggcatcggcgccgatcaccggatcgcgggtcagataggaatagtcggtgtagagctttgccgtcttttcgttgtagttgccggtgccgatctgggtgatgtagcgcacctggccctgttcccggcgggtaatcaggcagatcttggagtggaccttgaagccgtccatgccgtagatcacccggcatccggcctcttccagctggttggcccattcgatgttattctgctcgtcgaagcgggcccgcagctccatgagcacggtgacttccttgccgttttccgcggcggagatcaggtactcggccagcttggactggcgggcgatgcggtagagggtgatcttgatggagatcacatccgggtcaaaggcactttcccggatgagctggaggaagggctgcatgctttcaaaggggaaagacagcagcacatccccctggttttgcagctgctcggtgatggagccccggccggagaaggccgggctgttctgtggcacaaagggaggccgcaccagttcctggcgctgggccggggagagcacctttgggagctggctccagaaggaaagatccaggggggtctggctgtaaaacacctggggcggggtcagcttcagcttttggcaaaggaactttatggattcctccgccagagcaccctgcacctccaggcgcaccggggtgagacggcggcgctttttcagcatattgctcatgtactgccggtaatccaggtcctcatcgaacccggcgtcggtgtccaggtcggcattgcgggtgacgcagatcaccgccgcatggctcaccttgtagatctggaacacctgttccgcataaaagcggatgatgtcctcggccagcaggaaccggcgctcctcgccggagaggaagaagagccgctggatcatggacggcagggggatcagtcccagcagacggtggtccttctgctccagggtggccgccaccgtcagctgcttgttgttcaggtgagggaaggggtggcgggggtcgatgatctggggggagagcaccggaaggatggaggcattgaaatatttttccacatctttctgctcttcccggctcagctcttccatccggagagcggtgagcccatttttctccagctggcccatcaccgcggcataggtccggtcccgctccttataaagaggggcgcaggcctggaagatggcatccagctgatcttctgcggtcatgccggttttgttgtccacatagtcgggggcataggccatataatcggtgaggctgcccacccgcaccataaagaactcatctaagttggtggtgaagatattgacgaaattcagccgctccaacagagggatggtggggcagctggcttcttccagcacacgatggttgaaacggagccaggaaagctcccggttctgcatataactgcaatttgatttgagggtcatggatgttcactccttttcggctggattagctgcggaggattcggtcgaagagatagccttcccggatacccggtttgctgacgacgaaatgctccgggccgaatttcttcacggcctggtttaaaatggtcatgccgggcaggatggtgaacacccggtcgggcaccacccggtaaatgctttgcagctgccggaagtcctgggttttcagctttttgttgatctcccgcacatacccggcgtccacttcggtctggcacttgggcacattgtaaagctcacggcacagcttgaaaaagccccgggccgtgccgccgatgccgcagagggtaataggccccgggagaggcagccagtcgatggaggaaaactccttcttgacccgctggcgcatttgtttccggtccttttccgtggggaagagggaggaggagtactgggtatacaggttgagggagccgatgggaaggctgacaaggtgctgaatcttgccgtctttgaactggaccagctcggtgctgccgccgccgatgtcgatgagcacgccgctttgcacattgaggtagtgggaggcgcccacgaaatccagccgggcttcctcctggccggtgagcacttcggcccgtcttcccacggcattttccagggcggcctgcacttcttccaggttgttgatgttccgcagagaagcggtggcgatgatggaaatctgatccacttccaggttctgggccagcttcacaaagctgcggatctcttcgcagcattttttgatgcccgcctcattcagagcgcctttttccacatatccggccaggccggccatgctctttttgttcatcagcatatccagcttttcattttcgtgacggaaaaccgtcatgcggatggagttggagcctacatctataatggcatacagcataacaaaaccccctgttttaagtttggaacaagcagcagggccgctttttccagttttcccacgggcctgggtgcacgcctgcggtgcacactggccccgtgatcggtgcaaaaagccacgcacaggtcccggctttttgcggatggaaaaacggcagggacaatggtttttcccatttctgcgttttccccatctctccatggtattatctctatcatagcggaaaaaagggaaattttccagtgcatcctgtaaaatatccgtaaagtccagcgtgacgctggacccaaaactcgctgaaggctgtatgcgctgggatgcctcagtgctccggtgctggcgagccaacaccggtaggggccgggatgcaatcctggcaaagtgcaaacaaaaaagctcccacgcaggggagctttttcttttggcttggttgtttgactgggtgcggcagcaccgcctgccagtggcggctcgccaccggcagcgcagtatggccgtccggccaccggacctaggactgcaccaaggcttttcccgggtgatggtttatcacacccggagcagtaagccggacaacgcatcctcaccggagacaggaacgggtgcggcggctcgccgctatatgactttgttcagatacttgttctcatagagggaagtgaaagcctggaactcatcggtgcgcaggtctttcagaatctttcggtactcatgcacatcgaactggtttgcggtatcggccagcatcatcacatacaccgccacattggagcagtggtcggagatcttttcgtagtcgtggatgatatccaggaaggggataccggtgctgacggtgcagatgccgctttgcagacgggagatatggcggctcttgagggcttccttgatggagtcgatgacatcttccaggggttccacctgacgggccagggtggcgtcgttctgctcgtaggcctggacggtgagggagacgatctcttccaccgcctggctcatcacccgcagctcggagatggcttcctgggagaagacggtgccccgctcctgcatatcctcatagaactccagcaggttttccgcatagtcgcccacccgctcgaagtcgccgatggaatggagcatttcggaataggccttccggctgttttccgaaagctcgtcctccttgatgcccagcatataggagttgagccgtgcttcggcccggtccaggaagctctcggtgtccttgaaggtctccagccgggggggagtctgatccacgatggcggcgttgaccatcttcaggttggactgagcgctctggcccatggagatgatgatcttgttacactgttccagagcaacggccggggaggagtagaaacgctcgtccagacggctcaggtcgtgagaaatttcgttttccgtctgcttgctcttgacggtcttttccgccagggtgatgagcacaccccggaaggggatgaacagaatggtgaccactacattaaataaggtatggaagttggcgatagcggctttgtcgatggggtcgttccagaaggaaaaaccgatgacggcattgagggtatagatcaccacgataaagaagatagaaccgatcaggttgaaatagaaatggatcatggcggcccgcttggcgtttttattggcgcccagggcggacagcagggcggtgacgcaggtgccgatgttctggcccatgatgatggggatggcagcggcataggagatggcgccggtggaggccacggcctggagaatacccaccgaagcggaagaactctggatgatgccggtgaccaccaggcccaccagaacgcccagcaccgggttggtgaacagggtgaacatattctggaaccagggcaggtccttcagggaagtgaccgagccttccatcaccgacatgccgatgaacagcacgccgaagcccagcagaatctcgccgaagtcatggagcttccgctttttggcgaacatgaagatggcggcgccgacggccacggccacataggccagcatggagggcttgagcagctgcatgacgacgctgttctccagggtgccggaggaatccagacgcagcagctgagcggtgacggtggtgccgatgttggcgcccatgataacgcccacggcctgacgcaggttcatgatgccggcgttgacgaagcccaccaccataacggtggtagccgaagagctctggatgatgccggtgaccagagcgccgatgccgatggccttaaagatgttgccggtgacggtttccagggttttttccagtttttcgccggccattttctccagggcgttgcccatggtgagcatgccgtagatgaaaagccccaggccgcccaatagcttcagcagtgaaaaaatgtccatgtgatttcctccacttcccctctttgcgagagattcttcttttttgtcttttctgtcatgggggtgtaaagcttttgtaaattcatacaggtttatgataccaatgggaaaagatttcgtcaatgaaaaactggttgtgtaaaaggaaatttacacggcgagccgccgctcccaacctgcgctgccggtggcgagccgccactggcaggcggtgctgccgcacccggtcatgtatccaagcaaaatgacacgatcagattcacaatcccccctgcatggctgcgccatgctatcccccctttgcacaaggggggcttttctttgccttgcggcaaatgcaaccagccttcgttcgattacccagcgcggcagcgcagcatggcagcggcgacacgccgcctggttgtcatatgggggagaatctggtatagtaggggggaacaggtgggaagaccacctcagtaaaataaagcaggtgataaaaatgatcaatggtaaactggtgatcttggtttcttccgattcgggcgtactgcaaagcggagcccgtgagctgcgcagtcctgcggcctatacacgggccattgcgcaagccggagccgtgccggtgatcggcggggaacagtgccccgaagagctggccaatctgtgcgacggcctgctgctgtccggcggcccggacatcgagccggagctgttcggcgagaccatttataatgataccgtccatatggacaccccccggacaaagtacgaatatgcactgctcaaggcttttctggaaaagggcaaggccgtgatgggcatctgccgtggcgagcagctgatcaatgtgtatctgggcggcgatatgtaccaggatctggctcatcagaagggcgtgttccacagtagctatgagctgcgccacaaggtgaaggccgagcccggttcctttattgagaagctgctgggcagcgagttcatggtcaacagcacccatcatcaggcggtgcgcaatctggctcccggactcaagctggcggcccgttcggaggccgacggcgtcatcgaggcctatgagcacgagagcctgcccatttttggcgttcagtggcatccggagcgcctgaccaacattatgcgggacgaacgcactcccgatatggcgcccctctttacttatttcctggaaaaggtcaaagctcagtagcgtgccgctactcccatactgcgctcccggtccggtagtccggacagccatactgcgctaccgcgctgagcgacagaaccaagacaaaaagctccccctcaggggagctttttgtttgcacatggccaggattgcacccaggcttttaccggcggagccggagcagaggggtaaacagcgcagatagccagggagagtatgaccccggcgtcacgccggctggttgacggaaacagggggaaagggtataataactctgtatatcgtttgaatataccggtgaaaacccggaaaagcaaaagaaaaaggcgcccctgcggccgccgagacccggaggatagagatatgaaacgaaacatccaggccctgaccgcgctgctgctgttgcccgtctttttgatgtcggggggatgcagcgtcagccgtttccgccagcccgaggaagaaaagggggaagttgtgaagcctgccccccaggacacgcagcccacagacgaagagaccgtttacgaagccgatgagcttttgtatgaaaagcagctggacctgccttccggcggagtggccgccacctatcgggccgccctgcctcagttcaaggaggagggaagccaggggctgattctgcggaaaatcaacgaatattacgaaaccgagcttaccgcgctccagcaggactgcgacagctatttcagccagatccaggcctcctatggggatgcgtggcagacggcggtacagccggtggccgattaccatgtggatttttcctacgagctggtgcagcaaagcggcggccggatcagtgtggtgcgcacttatcggtatgtggacaccaatgtaaaggacaaggtggtctataccgccgagacctttgattgtcagaccggctggccggaaaagctccaggatctgttcatcgaggacaaggaaaaggcccagcaggccattgtggagcagatcgaaaagtggtgtggggagaatggcctggaatatagccagctcaaccccttcacctttgaaaagcaggatggttcctttgccatcagccaggacactctgtatctgtgcatggaggaaagcgccatcagcgcccagagcgccggcggccagttggtgaagatccctctggaaaatctggaaagcgttctggcttagcttcccgaacacaggaaaaaaagcctcccggaagggatgaactggaccagtaaaaccggacaatagacaaaaagccccctaatgtaggaaaa

SEQ ID NO: 2460 - DNA, 32759 bp, Unknown
  16S sequences of unknown bacteria
ttggcctcccgcgggttcccccgctcgagagcgcttgactataataccatccctcctcccctttgtcaactacttttttaatctttttttgccttttttcgaaaaagttgattttcctcagcgatttcccttgttttcgccgttttcctacagggattccgcccagcggctgatgccttggcggccgactgcctccagctgcgcggaaaagtccatccccagcgcatacccctcagggaacacatcagccagcggcaccagtacaaaagccctttcccccatgcgaggatgtgggagagtcagttcttccccctgcagtgtctgtccctcatagagcagcaaatccaaatccaaagtgcgcggcccgttgaccgccgtccgcacccggcccatggccgcctcgatccccaggcaggcgccaagcagcgcccggggagacagctcggtctccagcaacaccgccgcattgagaaaagccggctgatccacataccccaccggatcggtctcatacacgtcggacgtcttgagcacccgcgtgcggggcaaagcggctaaagcggccagcgcccgccggagattgtccatccgatcgcccaggttggcccccagcgccaccaccacccggctcacgcccgattctcccggcggcgggtaatctccaccgctacatagtcaaaatcggccgcaatgggcgcccggggctttttcagcagcaccgtcaccgcctccacggggaaatcagccagcaccgcctcggccacccgttgggcggcccgctcgatgagatcgttcttctccgcctgcatcaccgccagcacccgcttggttaccttggagtagttgacggtgtcgttcaggtcatccgtcgcaccgggccggcgcagatccgcctccagcgtgatatccagctcaaacggctgtcccttttccttttcggtctccttaacgccatgataggcatacacccgcagcccgcggatataaatcttatccatgtttttcctccatcaattcccgcagcattttctccggattctccagaaagcttcgggtaatccggtagctgtcggtctcccgataggcgcacggccggatcccctcgtcggaaaacgcataaatccgcgcccccggataggcggtcagaatcggcgagtgggtagcgatcagcacctgggagccgccccgcaccaactcgtgcagcctatataatagggataattgcctagccgccgacagggccgcctccggctcgtccaggatatacagcccccgtccgcggaaccggctgagcgccagcgataaaaagctttcgccatgggactgggcgtgcagggatttgccgccgtacccctccaggttcagctccagtttctccacctgggaggccacattgtagaagctctcggcccgcagaaaatacccgtcctcaggcaaaagcgccgatttctccagaacgatccctttgtaaaagtccgcatgagtctcggcagtggaaaaattgaaatccaccgagccgccttctgcgttaaatccccagttcaccgcaatggcttccagcaaagtggacttgccgctgccgttttctccgacgaaaaatgtcacggcttcggagagctccacctcgcgggtgttccggatggcaggcagctcccacacataccgatcccgcagcggtatctcccgccggaaccggacccggcggataaaccgccggtcgatcatctctcgcggcggcacgcgtccgccacacgggccgcctgcacggccggcgccacatcgtgcacccgcagaatatgcgcaccgttccattgggccagcgtatggatggccagcgtacctggcagccgctcctcaaaaggcggattgccgcaccacatgccgaccacccttttgcgggacgcacccaccagcacagcggtttccggcagaccggccagcacctgcggcagctgggcgatgagctgcacgtcccccagccgcggcttgccgaagccgatgcccggatccaggcacaccgcctcccgggccagccccgcctgttccgccgcttccagcgcctccaggaaataggcgcgcaccgcccctgccgcgtccgcgccgccctcgtcgtccgcgccgccgcctgcatgcatcatcaccagtcccgccccgtaccgggctgcgacgccgggcataccgttttgcagggagccggacacatcgttgataatgtgcgccccggcctccagcgctctggccgctacctcaggataatatgtgtcgatggaaaccgggatcgtcacccgcccactgagcacctccagcaccggccgcagccggctccattcctcctcagccgtcaccgggatatgcccgggccgggtggactgggcgccaatgtccagcacatccgccccttccgcttggatggccagggcccgctccacagcggcctccaccgtgtcgtaccgtcccccgtcagaaaagctgtccggcgtaatgttgagaatccccataatatgggtgtgctgcgtcaaatccaactccccgccgcgatagtgaaatctaggcatatgccgtcccctttccaataaaaaaccgcccccgcaaaacgggggcgggaataccctttcagtcagagccgactcatcgggcggcgtccctttatttcgcccgccgcttttccgcagcagccgccaccagacccttaaacaggggatgcgggcggttgggccgggacttgaattccggatggaactgacaggccacaaaccagggatgatcgggaatttccaccatttccacaatgtgcttgtccggcgaaatccccgcaagcatcatgccggcgttctgcatctgctcccggtagtcgttgttgaattcataacggtgccgatgccgctcataaatcaattcctcgccgtactgggcataggacttagagcggatatccaacacgcagggatactgccccaggcgcatggtgccgccccgctgatccacatcccgctggtcgggcatgagatcaataacattgtgaggagaggcgggatcgatctccgccgtgttggcgtcggcgtatcccagcacattgcgggcgaattccactaccgcgacctgcatgcccaggcagatgcccaggaaggggatctggttttcgcgggcatagcggacggcggcgatttttccctccaccccgcgggagccgaagccaccaggcaccaggatgccatccgcgttgcacagcaccagagaggccgtctcgtcggtgacggtctcggaatcgatccacagaatattcaccgcggcgcctaccgggatgccgccgtgcttgagagcctcggcgacgctgagatacgcgtcgtgaagctccacatatttgcccaccagtgcgatgttgacggtgacggtgggattgcgcaggcagtccaccatatgggtccactcggctaaatccggctccaggtcgcccaggccgaattccttgcacacgatggaggcgagcccctcctcctccagcaccagcggcgcctcgtacaacagactcacatcgcagttttcaatgacgcattcccgcttgacgttgcagaacaatgcgatcttgtcccgcaggtcggagggaagatgctgctcgctccggcagacgatgatatcgggctgaatgcccagggacagcaactccttaaccgagtgctgggtgggcttggtcttcagttcctgggacgcggcgatatacggcaccagcgtcacatggaggaacaggcagtcgcggcggcgctggctggcgaactgacggatagcctccaaaaagggcaacccctcgatgtcgcccacggtgccgccaatttcgataatatgcacgtcgtatttgtccgcgtccagctcgatgcggcgcttaatttcattggtgatatgcgggatcacctgcacggtgcccccgtcataatccccctgccgctccttctgcagcacgttccagtacaccttgccggaagtgaccgagctgttttgcgacaggctgacgtcgatgaaccgctcgtaatgccccagatccaggtcggtttccgcgccgtcgtcggtgacgaatacttcgccatgctgaataggattcatcgtgccgggatcgatgttcagatacggatccagcttcttgaccgaaaccgtcaacccccggcttttgagcagtcttcccaaagaagccgctgtaatcccttttcccagcccggaaaccacgccgcctgtgacaaatacgtattttgctgccatgtcgcatcctccaaaaatatcctcttgtatttaacttcttcccgtcagccctgtaccgggcgtatcggcacgccgtgcgccgccagatacgccttgagatccggaataccgatttcgtggtaatgaaacagggaggccgccagcacggcatccgccttccccttttgaaacgcgtccagaaaatgctccatagcgcccgcgcccccggaagcaatgacgggaatccccgcccgccccgatacggcggcggtcagctccaaatcgtagccggccttggtgccgtcggcgtccatgctggtcaacaggatttcccccgcccccagcgcctcgacccgggcggcccattccagggcatccagtcccgtgttctgcctcccgccggtcttgtacacgtcccagccggaaccgtccggtctcctgcgggcgtcgatagccaccaccacgcactgactgccgaaccgctgcgcggcctcccggataagctccggccggtcgatcgctgcggaattgacggaaattttgtccgccccctgcagcaggacggatcgaaaatcctccgccgtgcggataccgccccccaccgtgaaaggaatggtcagcttttccgcaacccgggcggccagctccgccgccgtggccctcccctcatgggaagcggtgatgtccaagaacaccacctcgtcggcccccgcctgcgaataggcggcggccacctccaccggatcccccgcgtcccggagatccacgaaattcacgcccttgaccacccggccgtccttcacgtccaggcaggggatgatgcgcttagcaaacatcagccgcccccctttcggtccagcggatgaagttcatcagcatccgttcccccaccggccccgatttctccgggtggaactgcatgcccgccacgttcccccgctgcacggccgcgtgaaagtcgatcccgtaccgagcgcaggccagtacgtcctccggcttgtccgccgcgcaggcgtaggaatggacgaaatacacatatggatccgccggcaacccgtcgagcagaaggctttccttggccggtgtcaggctgttccaccccatatgggggattttcagcccgcagtcgggcagccggcgcacctggccgggtatcagccccagcccccggatgcccgggccctcctcgctgccgtcgaacagggcctgcattcccaggcaaatccccaggaacgggcggccgctctccgcgaacgcgtacagggcgggcaccacgccgctgttctccagcgccgccatcgcgtcggcaaacgcgcccacgcccggcagaatcagcccgtcggccccggccatcacgtccgggtcgcgggtaatgaccgcctcggctcccaaccgcgccagcgccaggtcgacgctgcgcagattgcccgcgccgtaatccaccaccgcaatcaatcaccccgccccccctttcgcgctttcataaaacatacttatttattttaccatcagcgccctgtccggtcaagacggaaaagcgatttctccgcgctgtttttcctttttatacagacaagccgtcaccattgtcctgcccgcgcatacagtggaatagcgagccttctattcagggggaaatctgcgtacccacaccgtccccgccagcgacttttttcgcacgggggccttatcagaaaggaaccatattatgagcactgcgctatttattgtcatcggcgcggctgtggcacttctcctgggcttccttatcgttgtcattgtctggcaaatccgcacccaccgcttccgcccgaaccctgataaaaacgcccaacaggaacagcttaaccaggatttgaagcctgcaggcttcgcctacgaccgccgaaccgataccttctattccctcatggactgctggcagcgaaaaatgggttactgccggctgtacgacgaagccgcgcccggcttcaatatgattatgcactgcgaacccgtcccctttttctacgggggaaaacgctggctcgtcgaactgtggaaaggccaatacggcattactaccggcggcgaaatcggtgtgtacaataccacgctcgaagacgttcactcggaaaaattcatcggtaccttttacgagagcatctccgacgacgaacgcctgcccatggccttcgtgctgcgaaagaacggcaagcccatcatgcgccgcaaagggctgcactggtggctgaccggcttcaagctcggggagttctctcccacccatacgctgaccatggacgcgcgcatcaccttcccagacaaggccatgtgccgcgcttttgccgacagtctgcggggcatcggctaccagccgcatgaattctcggtgcggggccgcaccgccgtcgtgcattacaccacgccgcacacgccccagtccctgaatgtcgtacaggaagccgtcatccagcaggccaacgagaacaactgcggcctgtaccggatggccaccgccaaatattccgacacgctggataagctggaatacgtcaaggcagccatgcccgagctgtatgaattcttcctgcactccctgtatgcccgcggcctgttcgaggctttcgaatggctgattgacctggtgcacccgccgcatcctcagccctgtccgcccgaaccctgtccgccggatccggaacctccctgtccgcctcggccccggccctgcccggtggagtgtctgctgatccgcccggttcccggcgaaccgggcagcctgctggcctgccccgtgccctgcccaccggaaccagagtccccctgtccgccgccgtggccgctgccttgtccgccccagccctgccccccctctcccccctgcccgccggagccgaaaccgccctgtccctgctgcggctcccgtcactgccggcggcgcggaagctgcggcagaagcggcggtcatcggccagagggctgaggccatgttctccgtcaagcagcggctgctcgaggcctaccaggcggcaaaggtcatccccttcgacgcctcctccaagttcattattctcagcgactgccatcgcggccagggcaacagcgccgataattttctgcccaaccaggaggtctactgcggcgcgctcgagtactatctggccaacggctacacctatatcgaactgggagatggagacgagctgtgggaaaatcgaaatcagcaaaccatcattcagacccacaccaacgcctttcagctgttgtccaaattctatcaggccggccggctgcacatgatttacggcaaccacgacattgtcaagcggcgaaaaacctacccctgccaatgcgcgagctactattgcgactgcgaccgctgcgataagccgctgttccccggcctggaaatccccgaaagcctggtgctggaaaaccggcagaccggccagcgcctgctgctggttcacggccatcagggcagcctgctcaacgacgccttgtggcccctggctcgcttccttgtgcggtatctctggggcccgctggagctggtgggcttcctggcgccggtagggggcggccgcccccgccagaaaacggaaaagattgaaaaagagctgtgcgccttcgcggccagcgaaaatcaaattgtcatcgccgggcacacccatcgcccgattttcccccagcctggcgaatgcccctatttcaacgatgggagctgcgttcatccccggtgtatcaccggcatcgaaatcgccggcggcagcatctccctggtcaagtgggcggtgggcacccgagaggatcgcaccttgtttattgaaagggagatcttggagggtcccatccccctgtctgcctatcaagactagcaaaaaccggcgggtccctcataaaggggcccgccggtttttatatcagcggttttccttcctttttttcgtcaggttggtcgcgcccagcaccgcgcagagaatcgccagcgccccggccacaccaattgtcaccaacacccagaccggctgcttaggggcgggaatgtcgtcccggatcacgctgggggtcgcctgcacatcccagtccaccacgcagggaaccggctcgccggtataggcgaaatcgcagtacagcgccacccggtattccttctgggagtctctggccagggcatcctgccgcagccggatccccccttcgtccgccgcccgggtgtaaggcccgtcgtacaagaccgtctccccgtcggtgatccgcaggcgaagcgcgctcagataggccagcgcctcctcgtcgtcataaggcagctccaccgcccggatccagacgtccaccgccgccttgtcctcgttgacaaaacggaggatgccgtcctcccgagcctccccagcccgcagcacaggggactcccagaaggtgctctcctgtggctccttgaaaatctgcccgctgttgccctggctgactacggtgtaaatccgctgcgcctgcgccgtctcggccgagacagcaaaactcgcggggagcagcagcgccatcagcgccgcagcgaggcggacgcccttggaaatgtgcctcatgcccgtccgccccctttcggcccgccgttatttttggaagcccgcacgctcagcaggatggacaggcccgcgaacacgaccaccaccccgcccatgatcaccagccccgccaccgggaagccgaatacggtggccggccgatcatcctcatcgcccgtcccgctcacctcggaggagaccggcgccggcgcggtgggaatatacggcgcggtggacggcggcatggacgccccgtccgcaaagggatccacgccccccgccatcatgccgatctgatccgccgtcagcgcgacctcatacagggccgtgtcgtccagctcggcatgcaggcagcggccgccgtcgtatgccgcccctatcttcatggtcagcgcctgcagttccaccatgctcatcagcagcggatcatcaaaccacaaggtcccgtcaatgtacaccttcatgctgtgctcgtcggaaaccaccgccacatggtgccaggagccttcgggcagcccgtaggacaccccgtccgccgcagggttgaactgctcgaaatgcattccctcctgggtcttggtcttgttgaagcccagatcgagataaatgccgttcaggctcccgccctccttctgcttggaggcgtcccgggcaaaggggctgaaagccagccatcgctcttcccgccgggaataggtgaacagccgctgattgtaccgggcgtcctcctccgccccgtccggggcccccagccatttgatccaggtggaaaagctgaaccggttggtcttcagctgcgcgtagcccagctgaagatattccgtcttgccgtccagcagcagcgccttgccgtcgcgcccatccacccaggtcatcgcggacgccccctgctccttgccgtccttgtaaaagctcaccttgtcggagaccgcccccggctcggtgatgatggaaagccgtcccttggaaaagccgtccagcgccgccgccggcagaccgggcagcatccccgccagcagcagcgcgccgcacaccgccagcgccgcacaccgtcttcctcgttttgctgtatgcatggctctaagccctcatttcctgcttattggtatcctctctattctcttattttttccccctcttgtcaatcctattaaataaaaaagagacgccgatcgcattccctatccatttttcagtgtattctgcaatcggctgccgatgcgctccacacctctcgccgcatggtgatgcctcggtcatgaaaatccggcggccggctatggcaaaaaaattcccgccggcctatcgcccgcgggaatttttttaaaaccggcagagccccttctgctcaagcaacttgatgaacaggcctccctgcaccgtccggttctgaaagccgatctgctgcgaggtgacggtggaataccaatcggtcatgggcacccgggaaggagacacatggtaagccagccacagcggatggatgaacgccatgaactgctccttatcgggcgccaatgtcgccgtccagaccagccagtccgatttggtgtaatccgcccggttgtccagcggcatcccgtaggggttcagccgggcggcgtaagaggcgaattcccgctccatggccgccgccgggaacagcccggtgccgaacagcttatcccacaccgcattgtacttcatgctgaaggtacccggctgatcgaaggccaggcggaagctgccgtctccctcggcggcgcgatccaaccaagaggcagccatttcccgggcggcggcgtcgaaccgggccgcctcttgccggtctccccacatcccgcacaaccgggcgtagcccgccagccccataatcgccttgagggacaggttgcagttgtgggccagatgccccgcgaaatcgtcggtacacagctgattttccggatccaccccgtgacgcagcagatacccggcccatttggccagcagctctcggtgctccccggcaaaatccgcatccccgtcggccgccgacaccgccgcggccatcaccagcatgttgccgcattcctccaccggcatctgccagcggggatccgtccccccgccgtatacctgcccgttaaggataggataggttcccacatcgtggggcgcaaaatcaaagggccaccgctcctgcgccgcatagcggaaaatcggccgcatcattcccttgaccagctcggtgttgtacagcaaaaacagcggaatagacggatagctcacgtccaccgtggcggcgcacccgttgctgaagcactccttggagacaaacagcagcttaccttccggatccaccgccgccttgtgggccgcgatgctctgccgcagggcgagaagcagcagctcggcgtattcctcgccccccgcctgggcggcctccctggtcagcgtctctccgaacgcccggcaacgttccgccacatccacgtactccgcgtacgcccgcgcgattgccgcgccgatcgtcgtcccgtcctggttccacaccgacttgagcggcttcccgaaataggtcagggaatacacatcgtcgtaggcgaaggtgaacagcgcctgcgcctcccccgccgtatccagcccagccgttacatagacataccgcatgttcccgccggccggatcggccatctgcccggcctcccgctccccgttcaccgacagatagaaatagccccagtcgatccgccggtcgtccccggccttgcccagcaccgcctgctcctggccgtacagccgcatggtggtgacacccggcgcagcgtccgcccgctcggcgaagaccgggcactgccccggctcgttgaggcagaaggcctccgacgcccgaacggtgaccgccacccggtgcgccccgccgtccgtcgtccgcaccgctgtgcgcagataagacaccggccggctcagcagctgcaaatcatcaggcagaacgggggacagaaactccgccgtcagctccaccccgccggcctcgaagcggtaccgggtggcgaaggcctccacctccacgctcgtctgctccatgcccggcagccccagccgctcggcgtcccccatgaacacataggtctccccgtcgatgtccgccagcccgtccagcggcatgtcccgccctgtccaatgccggacggtcccggcgttcagccggtctcccatggaccaaacactcatataggggtcgatggtgatcagcggatacgcgggtgctcgcagcttcatactcgtcatcctttccgttgggattgcttttcccctttagttgtaatatactatttttatcccccgtttaccaggggaaaaaccggtgcaaaggtgtgaaaaacaagtgagagaggatattcactactttctcccctcctcccctctgccctttgtggtggagatgtgcggcatttcctactgcgatggcacctaccgccaggaacgggtgaattcccccatctgcgtgctggaatacgtggccgagggcaccggtaccgtcatcgtggagggagtggcccacaccgcctcggccggcgacgtctatctgctgcccatgggcagctcgcaccgctacttcagcgacggggagcacccctggaccaagctgttcatcaacgcctggggcccggttatccccccgctgctgaccgcctatgggctggacggacaggtggtcttcccctcctgcccgttggaagggctgttccgggatctgttcgccctgtcgggcggggcggggccgggcggcctgccgcaggagacggtgatggagcggtgcgccctgaaatttcacgaaatcctcatgggcctgtccgcctgtctcaagggccgggccgcgccccccgacgaggccgcccgcctgaaaaacctcatcgacagccgtctcaatcagacggtcaccatccgggagctggcggaggaaatctaccgttcggaggactataccatcaagctcttcaaacgccatttcggccgcacgccccacgcctatgccgccgagcggaaagccgccttggccgtcaagctgctgaccgaaacccgcctgccggtggctcaaatcgccgccggcctggggtacgaggatccgcagtatttctcccacgccttccggcggcagaccggcctatccccctccgcctgccgcaagaacgccgccgccccgaaaggagagcccccccatgactgaactgcaagcccgcctgcgggccctggccgagccggattaccaggccttcgcctcccgcctgctccccggggtggataacctcctaggggtacgcatcccccatctgcgcaagctcgcccggcagctcgcccgggaggactggcgcgccgccctgaccgccatgggggacggcagctttgaggaagtcctgctgcagggcctcctcatcggctgtgccaagggcaccccggcggaaatcctcccccacgtggccgcctttgtgcctaaaatcgataactggtcgatctgcgacagcttttgcagcagcctgaagctggccgcctcctatccggagccgatctgggactttctcctgccctatctgggcagcggccgcgagttctccgtgcgcttcgccgtggtaatgctgctgttctactacctggacgaggcccacatcgaccgggtgctgtccctgctggacggcgtcaggcagccggactactacgcccgcatggccgtggcctgggcggtgtccatcgcctatgtccggtttccggaaaaaacgttggcctatctgaagacctgctctctggacgattttacctataacaaggccctgcaaaaggccgtggaatcccgctgcgtcggggaacccgcccgctccgtcctgcgcgccatgaagcgctgatacggttgcgcccacgcccccgtttatgctatacttacccggaatccaaccgaaaggaggcggccgcttgcagtcgctgtcaacaccgcgtatccctccccgcgcccgggaagccggccgctatgccgccgcttttttgctgcccgcggcggtcatgctggccgtctacgcccttatcggcgtcgccccatttggtgagaaaagcctgctggtcaccgatatggacggccaatacgtcagctttttttcctatttaaaggatatggcccgcaacggtaacgactttttctataccttcagcaagaatctgggcggcgatatggccggcttcgccgcctattacctgctcagccccttcaatctcgtgctgctccccttttccaccgtccatctgcccgccggcatccttctgctcaccctcctcaaggtgggcagcgccgggctgacctgtgcgctgtttctctcccgggcagagcgggccggttccggcaccctgctcttttcctgctcctacgccctgatgggcttcgtcttcgtctatcagcagaatattctttggctggacggcatcattttcctgcctctggtgctctggggcgtccagcggctgatgagccgccgtcgtcccctcctgtttatcctcagcctggccgcctgcctgatcaccaattattacatagcgtatatgatatgtatcttctccgctttgtattttctcttccaactggcagtgatccatccccaatccccccggctgcacgggcgggccgtgcttatctcctgcgggcggctgctgggcgcgtatctggccgcggcgggcctggccgccttcgtcctggtgcccaccgccttttccctgatgggcggggacaagaatctagggctcctctcccgcctcggcctgggggtccggttcgaggccggggatctgttttccaagctgttcaccggctcctttgaaagccgggatatgtggacaagtcccctgcccgtgatgttctgcggcctgctgataaccctgctgctctttctctactttttcaaccggcgcatccgctttcgggaaaaagtggccgccgggatttggctggccgtgatgttctgcggctttcaggtggaggctctttatctcgtctggcatgcctttaattttcccatcggcttcccctcccggcaggcgttcctgttcagcttcaccatgatttacctggcctgccggggctttgtccgcctgcggggcggcgtgaagcggcggcacctggccatagccctcacgctgttcatgctgatagccgcgatggtcgcccggcaacagtatgggtacctgaccctggccgggatcggcttcgacgtcctggtggccgccgtcctcaccgtgctgctcggcgcgcgggcgcggctgtcccgcgccggccgccggcggttcggctccctggttctggccgctcttctgctggtcaacagcggcaatctgctgctgtacggccggcatgtgctgtcccagatgaattacatccccgtgaagacctacgcccgttatgtcagcgacgtgcagccggtggtggagcgggtcaagcatgaggacaaaggcttttatcggatggaacagaccttccaccggggtcgcaacgatcccatgctgttctcctaccggggcctgtcccacttcagttccaccgaaaagaccgccaccaaggattttatgggccggatgggcttccgcaacgctggcctgtgggccaactactgggaaggatccactgttttcgctgactgcctgctaggcgtgaaataccggctgtcccgcagcgaggcggatcccgtgtatccccggctgtacaccatgggcagcgtctccgtcttccgcaacaccgccgccctgcccatcggcttcgccgccgccgacgatgttctccgcgccgatatgggcggggacgatcccttcctgcgtcagaaccggatggccagcgccctcaccggccgggaggaatgcctcttctaccgggtggacggggcggaggagtccctgaccggtctgtccgccggcttgtccgatacggcgaccgtctatgttcgggaagaggacgcggaacaagcggaaatcgtctataccttctccgcgcctaccgccgatcctctctacgcctacttccccggcgccgctctgaagggggcggatatctcggtcaacggcgtcagcctgggccaaaccttcacctcgtatcggtacggcgttatccccctaggccggttccagcctggagaactcgtctccttccggatgacgccccacggagactccttggagtataaagaagcgcttttttactatgaggatttgtcagccacccgcaccctgtccaaagccctcgccgcccatccctatgcgctcgaatccttcaccagctctcgcctaaacggagtcatcgacgtgccggaggatcgcacccgcctgctgctgaccatcccggcggacgagggctggacgattctggtggacgggaagaaaaccgcgcccgacgccgccttcggcgcgctgctgtcggtgtccctgactcccggtcagcatcggatcgccctgcggtacgtcccgcccggcttcgcggcggggacagccgtcaccgcgggaactatcctgctgctgaccgctctcttcctggggagatggagccgccgccggcgcaaaaaccgacagaattcgccgcctctccccgcgccggcgtgctatactgaaccactgtgtccgggcgatacggacacacagcgttagaaaggaaggggaactcccatggtatacagctgcggcaaatgtagatttgcttttgaacgagtgtcggagccggagcggtgccccgactgcggctccctggccatccatccggccgacgaggcggagcgccgggactacgaggccgtccgccgctccctcgaagcggaagccgctggccgggaaacggcctgatcgccgccgaagccgcgcccaaacaaacagccgccgggcggaacagacagtctgttccacccggcggctgcttttatttgccgatccccatattcatttaaaacgccgccttgatgggcgcgcggcggatgaacagccaggcgaacacgccgaacgccgctgccaccgtcagcagccccgcgcccagatggaggggcgagagcagcaggaaatccgcggcggccgttatcgcgccgaaaatccccttttgggccgccgccgggagcagcatcaccaggatgggcaggacgacgaacaggaaggccggcaccccgatggacacccccaggcgcaggtacttgcccatgcggtaatacgcgcccccaatgaaatacccgatcatgccgaaggccagatgcgccgccagcaggcagcccatcaaggacagccgggtggtgagctggaggctgtgctcgtggccgaacagcaacagcaacacatcggtgctgttatccgtgaacagcgaaaccagaagctgcagcagcacatcccccaccgtcatgcacaccgaaaagatgccaaaaaacgctaaaaaactgaggaacaccgtccggcgggacaccccgttgcccaggccgaagcgcaggctttgggagaacagcacgatcccgtacaccagcatcatcaccaccgagccggtggacatgccgttgacgttgaccgtctccccgcccgccgaaacgttgacggcaaaggcgaacaggtacagcaggataaacaccccatacagcacgataagccccatatagctgttctgccagttccatttgatcatttgcttgattttcatggccagttctcctctttcaaacgttggtcagccggatgaacagcttttgcatgtccaggccggacacgtccagccccggggcctcctccgccttgcccaaaatgcaggcggttttcagcccgcccagcgtgtcgacactcagcacgtccctcccggtgcagtaggcgtccaccgcctccgccctgccagatacggtataccccatccgcttgacctcctcggccggccgatccagcaggattttccccgctttgatgatgaccacctgctcgatgatgtccgccacctcctcgatgaggtgggtggaaatgagaatggtccggggctgccggctgtagctctcgatcagctgccggtaaaacacctcccggtggttggcatccagccccagcaccggctcgtcgaacagggtgtagggtgcattgctggccagcgcggtaatgagcttggcgatggtcaggtagccggtggacaggtttttcagcttcttcttctccggcagcccgaaggtatccgccagctgtccggcatactcgccatcgaacccgggataaaaatcccctgtccagcggaacagctgggccaccgtggcggtgtcgggcagcagggtcttctcccccatataatacacccggcccagcacccggtcgttctcccgtgccggctccccgtcgatgaacacctctcccgccgtgggcagcagccggttggtcaccacgctcagcagggtggatttgcccgccccgttgcgcccgagcagcccatagattttattgtctccaaagcacacgtccaccccgtccagggctgtgttgttcccaaaccgcatggtcaggcctttaccttcgatcatggctcaatcccgtccttccgtccgctgcgaatcatctgcagaatctccccttggctgatgtccagcttctccgcttcgttgataagcttgacaatatacgtctcgtaaaattgccggcgccttttctgccggatctgtccggcggcgcctgggctgacaaacatcccgaccccccgcttcttgtacagaaccccttcctcggtcaacagggtcatccccttgagcaccgtggcggggttgattttgtaggtgaccgaaatctccgtggtggacggcacctgggtgtcctccgggaacgccccgcacaggatggcgtcctgtatttcctccgcaacctggagataaatcggcacctcgctgtcaaagtcgaatgtcacccgctcaccgtcccttccaagtcaattggttaattacttgtgtaactaaccatacaacattttaagccctatgtcaagagcaaaatggtaattttcaagcggcttctcaaaaagaggctggttcgactttcccggccggttatgctacaatggattcagaaaacaccgacaggaggggattcggacgatcgacctgcacatccatctggacggctcgctaacggcggaggaactgctggttctggcccggacggaagggatccgtctgccggcggagacgccggaaggactgcggcccttcctgaccgtgccgtccggctgcggaagcctgaacgactatctgcggtgctttgagacgcccctcgccgtgctgcaaagccccgaggccgtggaatacgccgccgcctcgctggcgggacgcctgcgggaacaggggctgctgtacgcggaaatccgcttcgctccccagctccaccagaaaaacggccacagccaggaggccattgtggaggccgcgatacgggggcttcgccgctccgggctgcccgggcagctcattctctgctgcatgcggggagcggacgaagcggccaatatggacaccctgcgggcgtcgcgcgcctttctgggccaaggagtggcggcgctggatttggcgggggcagaggggctgtaccccacccgggactatctccccctgttctcccgcgcgcggcaggagggcctccccttcaccatccacgcgggagaagcggcggggccggacagcgtctgggccgccctggaggccggggcggcacgcatcggccacggggtgcgagcggcggaggatcccgccctgacggcggtgctggcccggcgggggatcccgctggagatgtgccccaccagcaatttccagaccggggcggcggcgcccggcagttatccgctgaaggcctatctcgatcaagggatccccgtcaccctgaacaccgacaacactaccgtctccggcaccaccctggccggggaatacgtcctggccagagaacggctggggattacggcgacggacgagaggacgctgctggaaaacgcggcgcgggcggcgttcctcccggagtccgaaaaggcggcgctgctggcccgggtgcgggacaaacggacgtttttttcataatgcctgataaataatccccagttcagtgcggaagagggcgggaggtacgtcagaaaagccggcaggcactttcgtgtctgccggcttttctccatagtattttgcgttacccggggacgacctccacttcacagacggcggagccgctggcatgattatagtacgaatatttcagcgtggttttgcctgggcgcagcgctttgacaagtatgtccctgccttccgccgctttcccatattcgccgttatccaccgacttgatctccacgatgtccggcgtctccacggtccattgggattccacataatccggataagctaacccaccgagacagaccatattgaagcagccgccccgaatcaaactgtctacagcctttatctcgttaaaatattcggcctttttgagatataagtaccaagtgttactaccaccttcgtagctgtatcctttttcaacctgctccaattccaaatcggggaaatccgccgtggtaaaggccttggtctcttcggtcatcagagcaatcggagagctgcggtagggggcatacagatgcccgcccaggatgccgagttccatcgtttcccccacgcgcaactggatttttgtgtaggtgggaaccaggaaggattcgaacgggacctcccggttgggctggacggtctcgacgccggcgttttccttcagccggttggccgcggcttccagcgtatcgccgtcggcgagacggacgaccaggagcagctccaggctttcccccttcatataagaggtgtagaggatctgcgttacctccgcctccgggaagtcggccggcgaccaggagagcgtatcggcaacggccttcttcatcgttacgacaagactgttctcattagtccatccgccggattccaaatagcgtatgggcggcaccacgccgggggtacagggcagacgcggaagggtgggggcggtcgtggaagccgtggtggcggcgctcactttggaggtggtggtgcgtgcggcggtggtactcccacccggcttcgtaccagttgtgctctgccccgatgtggcggcagaggaggactcttgcgtggaggaggccgtctctgtgctcgtcggcggcgcggcgctgctgtctatggacagaggcggcagggtgctgcgggtgaatgtggtcagcagaacggcgatcgtcagcattaccgctgcggcggcgcacgcggctatgtacgctttgcgtcgatacccaagcggcttcacaggtgattttttctcctgataaggctgggtcagcaaaggggacgtccgcagggagcttccaagcttttcgcggaattcctcggtcagatgcacgtcgctcagggcccgcgtatatttgtttttcatatcgcatcctcctccagaatcgttttaagccgttttctcgcgcgggccagccgtgtgccaatcgtccgtttattgacgtgcaggatgtccgcgatctccgcgatttggtagccctcgaaataatacagatacagcacgtcccgatgatccggcgacagccgcttcagttcttcgagaacccaccggctttcatcgggaattccgggcagatcctgcgtcagcggctcggtcagccggcgccaggtgcttttctgatgatcccggcatagattaatcgtcacccgaatcagccacgccttctcataggccgcatcgtcaaaggacgggtgctgaataaaccgcagcagagcctcctgcaccacgtcctccgcctcttccctttgccccagatgctgccaggccacccgaaacaacatatccgcataggtatcgacggtttgctgaaccgtatccataggttccccctccctcctactgataaaacgaatcggccgcccagaattttcccatcgggacaaattttttcggatttccggcgtccggataggaaaaacgcccggcgggggctgccgccgagcgttttgcgtttactgctccgcttccacaccgcccagctcgtggaacaggcggtgataccaggcggggaagacgctgtttttccgccagaggaaggtgaaatcgtggcggtagcggaaatcctccagctcgatttcctgcaggcggccgtcggccagctcgcaccgcaccgcggcctgatacaggaaggtcacgccgcagccctccatggctagggatttgagggcctccaggctggagatttccatcacctgccggaaatcccccagcgtcagattctgcagctccagatgcttttccagaatcgtgcgcgtgcccgagcccggctcccgggtgatcagccgctcccccagcaaatcggccaggcgcttcgcctccgggggcagggggtagccgggggcacacaccgccacgaacggctccgacgcatagcgcagatggtcataggacgtcttgtcaaagaagccctccaccacggcaaaatccagctttccggcgtccaggcgacccagcagctccctggtgttggccacctccatctgcaccctcgcgtcgggatgccgcctgagatacgcccccacggcggccggcatgacatacgcgcccacggtgagcgtcgcgccaaagtgcagccgccggtgcccgtcctccaggcgggccagctgttcccgcaggaaggcgtcgtcgtgcttaaccgtctgcgcggcctccagcagcaggcggcccgcctcggtcagcaccgcctttttcccctcgtaggcaaacaaccggacgccgtatgcttcctcaagctgatggatatggcgggagacgccgggctgggtgatgtgcagttcctccgccgcccgggtgaaattcatatggcggcacaccgcgagaaaggtatggatacgaaaatccagcatagacgcggccccctttccttttaatgataacacaccattatggaaagataaagaatcatcattttacataatcttccttccgcgctatactggaggacgcatcatgcagaaaggcgtggaaaacatgaatgttgtcaagcaaaacgtgcgggggatccttctgtgcctcctcctggcggtgccggcgtggctgctgggaaaatggatccccgtggtgggcgggccggtattcgccatcctggcgggcatgctgctgaccctgtttctcaaggacaaaacccgctggcagccgggcgtcaacttcacctccaaaaagctgctgcaggcggccgtggtgctgctcggcttcggcctcaacctcaaggtggtgctggaaactgggcggaaatcgctgcccatcatcttgtccaccattaccacctcgctggtcatcgcctttctgctcaaaaagctgctgaaggtgccgagcaaaagcgccaccctcatcggggtgggctcctccatctgcggcggctccgccatcgcggccaccgcaccggtcatcgacgcggacgacgaggaaatcgcccagtccatatcggtcattttcctgttcaacatcgccgccgccctgattttcccgtcgctcggcgggctgctggagctgtccgacgcggggttcggcctgtttgcgggcaccgccgtcaacgacacctcctcggtcaccgccgccgcggccgcctgggacggcatccaccacagcaacaccctggaggcggccaccatcgtcaagctcacccggacgctggccatcatccccatcacactggtgctggccttcgtgcgcgcccggaaggaaaagaacacggcgggggccggtaaagtgagcctgaagaagattttcccgttttttgtgctgttttttgtgctggcgtcggtggtcaccaccctgttccagctcccggccgcagtgaccgcgccgcttaaggagctgagcaaattcttcatcatcatggccatggcggccatcggcctgaacaccaacatcgtgcatctggtgcgcacgggcggcaagcccatcctgctgggcttctgctgctgggtgggtatcgcctgcgtcagcctgggcgcgcagaagctgctcgggctctggtaaaccaagcccttcgaaataaaaaccgggagccagcggctcccggtttttatttcgaaagaatttcgtggcgcctttcattgcatccggggggcagacgggctataatgaaggcgttcgaacaaacccgcacaaaaggagaagaccatgacgctgaaaaaactggcagagctggcccatgtgtccccctcgaccgcctccaaggccttggccaacagccgggaggtcagcgaggaaaccgtccggcatgtccggcaggtggccagggaatccggctatctgcggcaatgcaaggagaggcggctttcctaccgcaagccgtccgcccccaccatcgccgtgatctgccccgaaatcatcagcgtgtattattccgccatcgccacctgcctgagccgtctggccgagagtcacgggggcaccagcgccgtgtatctgtccggcttcgagccggaacggcagagcgcgctgctcgaggatttggcggtcaagccgggggtggacgcggcggtgctgattccgggcgcggcgggggcgcttatgcgggaggatttctgtatcccggtggtgcagctgggcgggacgagctactcccccgccttcgactgcatcgatttcgatttagaggctgggctgctggaggccgtccgccacctgcaggggctgggccatcggcgcattggctatctgggcgaacggctggcctcccccaaggaggcccgtgtccgcgctgccatggcgcgggccgggctgacggcgcgggaggaggatttcttcatcgcggccggccgcttcgagcaggccggctacgccgcggccaaggaggccctcggccgcggggatgtaaaactgcatgttgttctgatagaggacggggatgatcttgtcatacaaatcctcccacgtctcgggcagactgagccccagctcggacaggatatccttgcggtagagcagggcggtgaatttcatggtttccggcaggccgtatattccgtcctgataggtcatggggatgaacagctcgggcaggaaccgctcccgcacctccgcgaatccctccagcccgctgagatccaccacggcgttgcgcagggcgaattccccaatggaattggtggaggtggccagccccacgtcgggggcccggccggaggagatggccagcagcatggcgttgacgctgcccgcacccagctggccggcgggcaggatgttcaggcggatgccgatgccggtcttgggggtgaaatcctcatcagccatctgcttgaggagcattccccagtccttgccccggccgatccacacgtcgatggtggtgtgcacctcatagtcgccggcgcttacacctagcacgctgtcgtaatccttaaagaaggaattgaagaaattgacggtggacacccacagccgctggaaaacattggagcgggggctggccacctctccgtcccccggcaccagctccaccgtgtccagcagcagcggatgctgctggaactgggtgacccattcgccgtaggtggtcaggatgttgttgagatcgtccaggcggcggggaatggtgaagggatccccgcgcagcgccgcgagctgggcgatcatgctttccatctggtaatatttcgagggccggttgccggacacctgctccataatggtcatgcaggcgcgcatgttggccgcaatttcgtccagggcgtccagcaggccggggattttcttatctagctcgtaatcgtaattcacgtccggcgtctggccggtgatcatggtgatattcagcagcagctcggacagccggagggaatcggccgtcaggatctgggtgatggtgttcagttccccctgcttgacggtcatggtcagggtatggggccgcccggcctccaaataaatataatagggcgtcccgttttcgtcagcgagcacctcggtgcgccagttcttgtcgtaggcgaagcggtaggactcccactccttaaagggcacctggccgtccacctcgatacgccggtaggagggcaggccctcgcagtagtcctgcttaagcctcagggccagccggtacaggccgctttgaggcacctccacctgccaggtgacggcgctgttgccgctctgccaggccgtgccgcccaggacgttcatcaccacgcttcccgtcttctgggggctggtcttggggtcgccgtcgctggtcatgcgcagggtgctgttgtttttgaagaggatccgctccccttccgcctcgaaggtaatcccttttccggcgggggtgtagcccttggcgtcatagtccgccttgacagcggcataggccggcggctcctcgggggcgtacagctcgagatattccagcagcagcggctcgtcgaccactgacaagcgcagggtatgggcccccttttccaggtagaagcggagcgcgccgtcatacatgccccccgcgtcgtacagcggggagaccgtccattccatggcctggacaacgccaggccgcacctcgtcgccaatgctgttgaccaccggcttgccgttgtccttccagcggcggtacagcgggatattggcgcactcgtcgaagggcacagccccgtcgatagacagggcccgcaccatgtccgcgccgttgtcatccgccgccttatagctcaggcgcaggcaatacagtccggaggccggcacttccaccgtccattcgagatagtcgttatcctcttcccagaggacggcctgtcggccgtcctccgtatgcgccgcgggcgtcttgtccgccttggtgaagctgccggccggcacgtgcacgggtaccgcctcggccggggcgtaccctttctcggcgtattccttcagccgggcctggtaattgtcctgcacctgataatcgaaggagacgccgtattccgcatcgggccgcagcttatccgccagcgtcttcgccccggctccccagccggaggcggggatcagcagacaggcggcgctgacgaccgccagcagacggatcccgccgggagttctctggcacgtgatcggctttgtcggcataatcgtcgctccatttccgcatagtaaacccatccggggttgtcgaaaaagcggggattctcccccgtcccataccgagtataacacatcggttttaagaggaacaaccagcggaggggttattaccaagttatacacttttttgagcaagatcgtgcctgcggttatcaattccgctttattcgcttaaaccgcggccttcacctgcgaaaaggaatttgctggatttcgacttgtttttcagcctgtgtacttgtattttaaggggtttccaacaacttttcacaagtcgtatcaaggggtacccatccaatcttgcaggggtgtctatgcaaaattggatggatcccgggcaaatatagacacataaaagaagccggaacagaagctgttccggcttagatcaggtgtccgccgccttatgaaaaggccgccagcagctcggcgggagagagggcgggtgcctccacgtcccgcagcagccacagcagggtataaatcgtcttggtataccgggcgtagtccacggcctggcggatccactcctcgccgtaggccgcgaggaattccccacgcccgtatcccatggacgcgaggatggccgccacgtcgcgggcggcaggcgcttcccggagaacggcgcggatgtcatcccatttttccgtcaccaggggacgcagatcccgctcctccagcccgccggcctgcaggcggcggatttccggcgcgccggcgccgaacacccgtccgacagccgcctcccaggcggcggcgtcccgaaccaggggggcggtgatgggccggccccgcagcgcctgctcccgcattcggcaggtcatcacggtggcatagcccacgtcaatgccgtgcaggagataggggcggcggcgctcgatacccgtcagctcgaagaaatgggacagatggtgctcgctgcccgaggcagggcgggaattgcccgcatagctcatggcgacgcccaccgtaatcagagcggccatcagggcctccacgctttcctcccggcgtgcggccaatccatcggccagcccgacgacctcgttcaccgcctccatcaccagatcggccaccccctggcagaagggctccccggtcagcaggctgcccagcttccagtcgttcagggcggagaacttgcctaccgtgtctccaaagccggcccgcagcatgtcgaagggcgcttcccgaagcaccgccgtgtccgcgagaatggcggccgggggccgggcgggaaccgtcaccttcatgccgtccagcaacagggcggcgccggacgaggcgtatccgtccatggagggggcggtggccacgatgacatagggcagcccgcgccgccagctgccgtgcttgcacagatcgttgatcaccccggagcctacccccagcaccagctccgtgtcggccccgatccgttcctccagcagggcgacagcggcgttgtccggcagcagcggatccgcttccttgtacacaagggtggagacagcttttccggcggcggtcagctgcttttgaacctgttggccgcatacccggtaggtgttggcgtccgccaccagcagaatcgttttatagggggcggtcagctcccccacggcggccagcgcgcctctgcccagtaccactcgctcgatgccgcacatgtgagtccctccgcaggcgcacggatagggaagcccaagcaatgtatcccaggatttcatcagtaattttcctcctcagggctgttttcccgccggctgcatccggctgtcagggacagcataccacacgaggaaccgccgggtaaacgggataagttgccctccgtcagggtcatcttgccgaaataaaaggggaagcccatgcgggcttccccttttatttcggccacagccgtctcaacacttccgcgccggcggccgcctcgacgtcaaacgcctggaactgcgcctcgatggtgacgcggcccgcgtagccgcagccggccagcccccgcacaaatggcgcgtaatcatagccgcccggtccggggcaccgccgccctagtggattgcagatatggacatgccacaagagagcgcccgcctgcgtgggcgcgtccggcgcttccccgttttggtgcatatggaacaaatccgccagcacgcccacgcggggatgcccgagggcgcggcagaacgccaccgtctcctcgacggtgttcaacaggttggtctccccggcgcaaaggggctcgatgacgacggtcatatcccgcgccgccgcttcgtctccgataaggcgcgccgcctgggcgaaccgctcctccgcctcgccgcgggtcatgtccgccgggacggcgcgtgcccggccgcttcccagcaccgtcagccgcccgcccagccgggccgcccgctccagcgcccgggcggtataccgccggatttccgtcagatccctctctctgctcaccagcggcatatcgccggggaaaaagccgttgaaggtttcctgccatatgccggcggcgcgcagctgtccggcgcggcgttccagctgcgcctcctccgcccaggccagttcggccaggtttccctccagataatcgtaacccagggccttcatcgcgaccgcctgatgagcgcccgcgcaaattccaaagcgcatggctgtctcccctttctccgccgccaggcggcggttcacccgacgacgatcgcccgcggcgcgtcctcgtccgtcagccgctcccgcccggggaacgggcagtaggccgtctcgcttccgactatctctaactcccggatatgcccgtccggaagctccagaacaaccggcgtcgggttttccgcctccactttcaggacgaacagcccgttttcctgccgccaatccacttgcagccgcccatagggggtcagcacactgccccggcaggaggccatccacagcattttcggcgcgatccgcaccgtgcgccagcccggcgcgccggggcgtacccccagcccgcaggccacgaattcatacaagggggtggcgctccacgcatggcagtcgctgcgccaattaatgtcgtcctccggccaggtgaacagccggtaatccatcagatcgcgccaccgcgtccattcctgctccacatacccgtacagcccggtcttctccaaggcccggcacagataaaactgcatgcagaaggagctgcggcacagggacggatccgccacagcttgtttcatgacggcccgggctctttcagggctggccgtgcccgacagaaccgcccaaatctgcgcctgctggcttttctgccgccgcccgatgacgtcgacatacaggccgtccgtctcgtcaaagcagcgggcgttgatcgccgcggccatgcgggcggcctgctcctcatattcccgggccacgtccggccggccgatacagcccgccaaacgggccgccgcgcggatggccgccgtgagcatcaggcaatacagaacgtttacctcgtcttccgactggatgggcacgccgcgatcccactgctccgtccagtccacgaactgccagaagccggtaaagcgcagcaggccgtcctcgttgagataccggcggaaatacagcaggatcttttccacgccggggaaacaggcgcgcaccagctccaaatccccgtgatagaggtaatagtcctccagcatgtcgatccaaaacagggcgaagcccggaataatctgcgtgaaattgcagggggaattgcacggcatcatgccgtcgggaagctgcgcgtaatagaaatccagaatcgccttgcgggcgagcctcccgtcccgggaaatcgcataggtgtacagagcctctagccgggtgtccatcagatactgcatctgctcgtagtgggggcagtccatgtacgtctcatacatacagcactgcagggtgtgcaggctgatggcccacatgtcctggtaaaccggccgatccccctggaaatcggtgtccaccgacagggggtaccccgtttcggtaatcggcagcacctgcaagcgcaggggttcgtctgaggtgacgatatccagccgtaggaagcggaaggcccggtaatgatagggcgtataggtctgaaggcccgacccggccacatagatgtccgcgtccccctccagatagcttcccgggcgggagcagtcgtcccgcacgcccttaatcccccggcggccgtcctgctcatacatatagctctccgcgtacagcagctggatccggccgccctctccgccgtccacccgcaggttggggaagccggtgacgtaattgcccgcgtccagctcggcaaacacccgggtatggggcggaatcaccgccccctcgcccagcagagcgccggcgccgtcaaaatccgcccgcttgacgccggcaaaccgactgtcccgctcaaaggggaaggggatactgcggggctgcgtccgccacacggaggccaccccgtacggggtggaggcagcgttgtctcccacggcctgggccgcccgccagccagccgcgcggaaccccggctcccgatagccgaaggggaaccgggagccgtccatttcctcgaaaaaacccagatagccggcgatgcgggcgggcagaaaacgatagccctccagcgccagacagtcgtagccctcatctgtgtcgaaccggggatcgccgtacagcagcagtcccccttggccggtggccagaatcgagcaggggccggccgaaaaccgggcggccgtctgggcgtcgccgacgtaatgaatcacgtcggcggcgaccacgttcacgccgggacgcagaaagggcgccgcgtccaccgtgtcgatataccggaccgcgccccctgcgcgtaccgggcctcgggatacccgtttgccgttgatccacaggatgtaccggctgtccgccgatatggaaagcggcagactgtccggcacgctctccagcacgatttccttgcggaacagcacatattccggctcgctgccgagtcctgcgccgtaccaaatccattttccgttccccacggcaaaccctcccctacggacatacgcctgacgacaggccggttatttgttgaacaccgcatcgatgtccttctgatagcggcccgcctgctccttgaccgcctgagccggcttgccgttgcgctggtacagggacttgcggacgatttcgctgtagaatttggtgcgcaggttctccacggtatagccgggatcgatcatgctgcgatccaggatataggtgtacatctccaggctgtccttgtcgcccgtcttgaaatagtccttagccacgtcatccttccagctgtctttctcataggactcggcgaagtatttgcccaggtagttgagcaccgggatgctcttgtcgagatccttgttggtggacgtgacacagaacatggggctgtaattctcggccggggacacgtaatcggacgcgccggggcccttgggaagcggcaggatgccgtagttcagcttgtcggccttgggcttgatggcctggacagccttccaggattccgcgacgtagaacgccagattgccgttgacgaacagggcgtccatatccacgtcggagttgccgccgtccttcttgcgcaggttctcggaaatcttggccaccttgtcctcgttgatgagcttgtcatagaaatccagggcgtacagcgttttggaatcggagaagctctccacggccttgccgttctggaacttgacgagaccgccgccgttggcctccacgaaattcagcgccgcgtaatccggatcggcgaagccgaagccgaaggtgtcgtatacgccgtcgccgttggtgtccttggtggtggctttcgcatattcccggaacttgtcgaaggtccagccgccgctcttgaccagc

SEQ ID NO: 2461 - DNA, 19341 bp, Unknown
  16S sequences of unknown bacteria
cacacttgcagggcgagaagagtttttcccgacgtacacgccgccggaaaaaacagattggactttatttgcgcctgcgggcgcaaactctgcgaggctttttgacagattgaatgccctaggcggttgtttgccgctcggggtgttgcgtttgtgtgggggggattttggaagctgtcgttgcttttttctgtagtgacagttataataggaagcagagagcgacccattccgcctgaggcggacagaaaaaaatcaaggaggataccagatgaaacgatggtgttatcgcatcgcgctgtgcctgtgcgtctgcttgctgacgctggggctgtgcggcaggatggaggcggcggaggtcgtagactccggctcctgtggagagagcctgacctggtcgctggatggcgacggcgttttgacgatccgcggcacgggcgaaatggcgggctatcaggcttattcgaccccgtgggagaataatagctggagaatcaaaagcgtcgtggtcgaatcgggagtcacgtcgatcggcgcgaacgccttttattatgcgcaaaatatgaccacgattacgctccccacaagcgtgacgaaaatcggggcaggtgctttttccttgtgcggtgcgctgacgagtatcacgctgccggatagtgtcacggagatcggcgagcgggttttttattactgtgaacatttggaacgtgctgcgcttccggggcgggcgacggagatcgctgcggggatgtttgaaaaatgcagtgcattgaaaaacgtcgagctcccggcaagtatcacaagcatcggcagcgaagcatttgaagactgcagcagtctggtgcagatcacattgcctgcacgtctgcgggagatcggcccgtacgccttttccgactgcagcagcttgcaaacgatcacgatcccgcagggcgtgacaagcatcagctctgatacattcagtggttgcagcagcttaacgaacgttacgatcccggatagtgtaacgagcatcggcagcgatgtgtttcggaattgcagcagtttgcaacagatcacgctgccggatagcctcacgagccttggctggagtgtatttagtcattgcagcagcctggagcgtattgtgatccctgcgcgtgtgaccggaatcccgagtgaagctttctgggggtgcaccaatctgaaaagcgttacactgtcggatggcatatggggtatcggtagtgccgccttccaagattgtgtcagtttggagcacattacgctgccggatggcctgtggtcgattgacagttctgccttccagggctgcagcagcctgaaaagcattgaactgccggacagcgtaacggatatcagcgaatctacgtttcagggctgcagcagcctgacggagatccgcatcccggacaaggttgtggcgatctggaaatcggcgttccaggactgcagcagtctgcagcgcgttacgctttcgcgcagcctgcagaagatcggcgaatccgcctttgaaggctgcggccaattgcagcgcattatcatcccggaccaggtgacgagcattggcgcttacgcgttctacaactgcaaagcgctcaaggccgccgggtttgccggcgacgcgccggagcttggcacccgcgctttctggatggacggggaggatgcggcagtatccgcgatcccgggcctggcgctctcctacatcgcaggcaaagaaaactggacgacgccaagctacagcggctacccgaccaccctgtgggactgcaaggtcttctcccactggtatctggatacggtaacggagccgacctgcacggcggaagggtatacggcccacacctgcgccgcctgcggcgatacgtatcgcgattcctatgtggcgaggacggaacatcactattatacggcagaagtgtgtagcgcgagctgcacagaggaaggctatgcgctcatggtatgcagcagctgcggcgatcgctaccgggatcaaatcgtcccggcgttggggcatcagtatgccgatggcttttgcatacgctgcggagcgcaggattcatcccaattctcggatgtttcggcaaacgcctggtatgcgagtgcggtgcagttcgccgtcgaacatggtttgatggcgggcgttgggaataaccggtttgggccggaggagccgatgacccgggcgatgctggtgacggtgctgtggcgctacgccgggcggccggaggcggggagaaatccgtttacggatgtccctgctgggcagtggtatacggaagcggtcacctgggcggcggaaaacggtgtcgtcagcggcgtcggcaatggcaggttctcgcccaacgggaatatcacccgggagcagatggcgtccatcctgttccgctacgcgaagctgacggggctggataccagcaagcggggcgagcttgcgggcttcccggatgaaggccaggtcagcagctgggcgcgggaggcactgtcctgggccgtcggcgaggggatcatcagcggcactgccgaaggcggccggacgatcctgaagccccagggcaacgcgaccagagcgcaagtcgcctccatcctgatgcggtttatccgaaacagcgagaaggcataacaaagcgcacgaaacaaagcacattcgaaaaaagaacgcccctgccggtcccttttacaagggtgcctggcgggggtgttttctgcgtgtgccaggccccatggaagggggttggtactgcggctgtgaattggcacatgggggacggcgaagatcgcggttcttgctgcgctggcaggggcatacaatggcctgaagggagatgacgctttgtggaggagtatccaatttacgcgttccgcacccgggtcgggacgatgacccggcagccggtggggctgtacgacgactggaccgcccagctgccggggcagagcggcctgctgcgggtctacctggtgggcgaggcgcagagcgctttgctggggacaccggccccagcggacgacgggctgcgctgctgccggaagctggccaggtccagccagccgcaggagatcgcctgcgcagcttgctgccgcccggaatgggccgcctggcagcaggacggagcgctgctgtggcgtatcgcggcaggctgcgtggaggtggcgacgcttggcggcgatgcgggtgcgccggtggaggattttccccgcctacagcaggcggagatcgacgggcgcgtctggtgggtgcggcagtggtccctggcagagttttacgccgggggcagcccggtggattgcgccgtgcccttgtccgccgcgccgccggagctgccggaagacccggaaatagcagaaatgccagaaatgccgggcgagtaaaagacagggcgcattcctagattcggaatgcgccctgttggcttatgtgggtgccccgggtgtggggcgaaggattgaaattagatgtaacccatcgggttcacggtggaaccgttgtagaagatggtgaagtgcaggtggttgccggtggacaggcccgtcgtgccgacgtagccgatgacctgaccctgggtgaccgtctggccagcggagacaacgtagcgggtcatatggccgtacaggctggagaagccgtcgccgtggttgatggtgacgtaatagccgtaaacagagttataggtcgcggttgtcacggtgccgcttttggttgcataaattggggtgccgccgggggctgccaggtccacgccattgtggaagctgtagttgccggtgaccgggtgcgtccgcgggccgtaggcacaggagacgtatgcgctgcctgccggaaggggatacaggaagccggaggaggccggagcgttggtgctggtgccattaccgggggaaccgccatcgccggaggaaccgccaccattctccggctgttgttgggcagctgcagcagcggcctgctcagcggcgacggcctgggtgtactcctgctctttggcggcaatctggttcagcagggccgcctcctgagattcgtagtcgtcatagagcttttgcatggcggccgtatcgctcaggagctgattgatgagggtgtctgactcactgcgctgggactccagggaggcttgtgtctccgtcaactgagcctggacagcttcctgcgcagtgcgctgggcatccagatccgaacgctcggattcgatctgcttggcgatgtcctgcagctgctgcatcatttcctggtccgaggaggcgatctcccggatcatatcaatgcggtccagcagatcggagaagctgctggctttgaagagaatggaccagtaggagacgtttccgttttcttccatggcccgcagacgctcgtgatatttctcgttgagctcctgctgctgggccagggactcgtccagctcgctctgcttttctgcaatcagaagattgtactgctggatgagctccgtctggttgtcgatctcctcttgtgtcagctcgatctgctggtcaagggcggctttttgggaaacgaggtcctgcgtcttggactggttggcggaaatgctgttttccagctctgtccgctgggaggagatgttctcctgctgctgctccagtgcgtcgatttgcgactggatggaggacgaggacgccgcactgacagaataggccagcgatgcgatcagactgacgatcatcgcaagggctaggatcccagcgacgatggctgcgataaaacgtttttgctttgacataggaatacctcctggattacacgttgaggaatttccggatggacataacgctgccgaaaataccaacaaacagacccgatacggcgtaggtcgcgaccatgacccagacgacgctcccgaaggggacgaactggaacagctgcatggagtcgacctcggcgatctttgtaacaagcagatcatagatgccccactcgacgaggaaggcaatcacggcactgaacgcgccgaggatgaagccctgcacgacaaagggaaattgaataaaaccattggtcgcgccgaccattttcatgatggcaatctcttctttgcggtcatacatggcaagcttgaccgtgttagagatgatgaagagggaaacgaccagcagcagcacgatgattgccacagagacaaattggacgacccgctccatggtgctgaagccctgggccaactcatcgtgtgccgtaatctttgccacgccttcaatggattgtaggcgctcaatggtctgctgcattttgctgttgtcctccagcgtgacaacgaagcggtcccggaaattggtggactggacaccgtcaaacagcgtcgcgtcgccctgctcttcaacaaagtgatccagcgcctgctcccgggagacaaattcggctttggcgacgttgtcgatcaaattaatctgggagccgacgctcttggcctcggcctcagaatagctttcgtcgatatagaccagaatctcgttttccttttccagatcccggaccatggtattgacattgtaaagaatcaaggagaagctgccgacaatgatcaggcaggcgacggtcacgcagacggcggcaaaggacatgaacccgtgttgaaaaatgccgcggacgccctcccggaccagataaccgaaattattgttcttcatagttaaaatacccgtccattccgtcgctgatgaccttgccctcgttgatagcgatgacccgcttgtggaagcggtcgaccatgtcggcctcgtgcgtgacgacgaggaccgtcgtccccagtgcgttgatctgctccagcaggagcatgatctccagggatttgcccgggtcaaggttgcccgttggctcgtcggcgacgatcatcgccgggttgttgatgagggcgcgggcgacggccacacgctgctgctcgccgccggagagctcatcggggtagcttttacttttttcaccgagaccgaccaggtccagcacatagggcacgcgcttacgaatctcccgctccggcgctccgatgacgcgcatggcgaaggcaacgttttgatagactgtctttttctcaatgaggcggaagtcctggaagatgacgccgacggtccgccgcagataggggatctgctttttcttgatcccttccagctcgaagccgttgatatggatgctgccgctggtgggcgtgagctccgcggtcagcaggttgatgatggtggattttccggagccggaggggccgaccaggaagacgaattcgccatcttcaatcttgaggtcgatgccgcggatggcttcggtgccgttgtcgtaggttttggtgacattctgaaattcgatcatactgcttctcctgtgcctgctgcgcttgggcagcgggcggtctggttatagcatttataccacccggttgtcccgggagttgaggtactttttgaccatcagcgcgaccttgaacacgatggcgtggtcaaattcccgcaggtccagccctgtgagctttttgatcttctccagccggtagaccagggtgttgcggtggacaaagagcttccgggaggtctcggagacgttgaggttgttctcaaagaatttgttaatggtgaaaagcgtctcctggtccagggagtcgatggagtttttcttgaaaatctccgagaggaagatctcgcagagggtcgtcggcaattggtagatcaggcggccgatccccaggttttcgtagctgaggatgctcttttctgtctcgaagatcttgccgacttcaatggcgacctgcgcttctttgtaagaatcggccagctcccgcaggtggttggagatggtgccgatgccgatggtcgttttaatgaagagctccgtgcgcagcgtatcttcgatgttctgcgccagcttgaccaggtccagatcctccccattgggggtgatctgcttgacgacggcgatgtcgctttcgttgatggagattacgaaatcctgctgccggtcggtaaacatgccctggagcacgtccaccgcggcgatgtccgcgcggctgttctgccggaccagcaggacggcgcgctgcacgtccgtcgcgaaatgcagctccttggcccggatatagatatcaccgggcaggatgttgtccataataatatttttgacgaaggtactcttatcgtgcttttcttcgtagtagatcttggcactgttgatggcaacataggccatcaggcacaggctccgggcggcttcgtcgtcgccggagacgtaaacggcatagtcaaaataggcggcgtttcccgtcgtcagcgctttgaaggtttttttgtcgaaggtgatcagagattcggaagagctgctgatccgaatggcaagctccgcccatttttccccgatgactgcaatatcggtacaggcaatcacacaaccttcggaatcaattacgccgatttggcggtttgtcgcctccttcatctggaggatgacattctggaacatccgattggacatatcgtgccctcctaactgtcgcattttttgcacaagcgcgatgctgctgcgcgtattgatattttatataaatataatacatgctttttcagcaatttgcaagagcgttttgacactttctttcaaaacgccactgcttttttgtgcctttttgccacaattttgtcactatatccaaaacagatgccgaagcggagaccgcactggcatttttcacgaagagaatgtttcgtcatcttgacgggattctaatgcggcaatctctggctctgtcagggggcggactgcgccgcgggggaggccctggagggtgaggccgccttcggcgtcccgccggagataggtcaccggcatgccccgggcggccagcatccggcgcacctggtggtattttccctcctgcaggatgacctcggagcggcccgggcccagagggcgaagcgctgccgggcggcagcgcgtgccgtcgcgtagggtgagccccgcggcgaaggcagcgacgtcagattccgtcgccgtgccatcatgctcggcgtaatagcgctttgcaacggcgtagcggggggagataagccggtggagcagggtgccgtcatttgtcagcaggaggaggccctcagtctgcttgtccagccggccgacggggcgcaggcccagggcggcgtaggctgggggaagcaggtccatgacggttttgtcctgacggtcttgcgtggcggtgagatatccggcgggcttgtgcagcagcaggacgacccgctgcgggcaggtcagggcctcgccgtcgatgcagatcgtgtcccgcgccgggtcgatctgccgggcggggtccaaaaccggcgcgccgttgcaggtgacgcgtccggcgcggatgcgctccttccactgcttgcggctcaggccgcactggccggataaaaagccttctaatctttgcacagctgctccttttgcatattctgcttcgaacaagcatagggtgtaacacgaatgaattccaatggattttaataacggaggtttcgccatggtcatcctaactgcaaaactcaataagggaaaattgcttgccgcgctgctgatcttagcggtattgatcgccgcgacgatcctcatctgctccggcggacagccggacgcggcagcgcctgcggacaatttgcatgccagcaataacgacgagcgggtcgcgttcctggcgagctttggctggacggtccaggcggacccggtcaagatgcaacaggtgcgcatcccggacacagcctcagaggtcttcgaccgctacaaccagctccagcagagccagggctttgacctggcccagtacgccgggaagacggtgcagcagtttgtctatgagatatccaatgaggcccaggaggggccggtctatgcgaccgtcctggtctacaaggaaacgatcatcgggggagacgtctcctcggcggccacgggcggggtgatgcacggctttgccaggacgtaagccggggctctcctgaaaatagttacagaattgataccgatttgtaactattatagcacgtgcgccgcgacttgtaaagggggattgtcatgcgaaaggattgcaaaaaagcgcttgcaatttgcgcgcgccgtgctataatagagaaaatgcagggcaaatgcgctgcggaacaactgaatcgcaatcttcagggcagggtgagattcccgaccggcggtatagtccgcgaacgcttgcaaaagcgccgaaccggtttgattccggtaccgacagtatagtctggatggaagaagacgaagcgccgcttttttgcggcgtcaagttagtattgcaatgcacctgaagacggattcaggtgcatttttctgattgaggtgaagagaatgaaaaacctgatgcaatccgtcaaagaaaatctgtcctttgtggccgtttgcttgctgatttttgcggcattggtcctggtcgcctggctctttgagcgctttgtgatcaaagagcgtcgaaaacttggcggcgctcgctatgtcgcgacgatgggcatgtgcgccgcgctgggcgcagtcctgatggtcctggagatcccggccttctttgcaccgccgttttataagctggatttcagcgagatcccgatgctgttctgcagcttctatctcggcccggtcgcgggggtgctggcggagcttttgaagaatctcatcaagctgctgctcaagggcacgtcgacggcctttgtcggcgaatttgcaaatttcgccgtcagctgcgcgctggtcctgccggcgtcgatcctgtatcatatccgcaagacaaaaaagagcgccctggtcggccttgccaccgggacggtcatgatgacggtctttggcagcgcgttcaacgcgatttacctgctgccgaagttcgcagccctctatgggatgccgctagatgccattgtcgctatgggcagcgagatcaacggggcaatccacagcgtttcgacactggtgctgtacgccgtcgcgccgctgaaccttttgaagggcgtcgtcgtctcggccatgacgttcttgctgtataagcggattgagcgggtgctgtttcgcaaaaagaagccggtgcagacgccccaggcgtcgaatccctgagggggatacattataaataatagaaaaaacaggcggctccggcatgagcggggccgcctgttttgcaatgtaattactttttcgcgatgcactcgcattcgactagcacgcccttgggcagtgcgctgacctcgacgcaggagcgggcagggtacggctcggtgaagtattcgccgtagatggcgttcagcttgccaaagtccgccaggtcggtcataaagaccgtcgtcttgacgacgttgcccaggtcaagccctgcagcctgtaggacggcgcggcagtttttgaacatctgatgggcttgcgcctcgatgccgccctcgacgatcgcgccggtctcggggaccagggggattgcgccggaacagtagacgaaatcgccgcaatctacggcctgggaatagggaccgacagctgccggtgcatgatcggtatggatgatcttgttcataataaagattcctttctgtattgcgtcgcatgggcagggcccatgcggggaatatgagtgcagtcaagcctgcgcgttctgctcggcgcgccaggcgaggtattcgtcataggagcagagcttatcgcggatcttgccgccgggcaggaattcaatgatgcggtcggccgttgtggccagcagctcgtggtcgtggctagctaggaagacattgccggggaaggcggccacgcccttgttcagtgcctggatggattccatgtccagatggttcgtcggctggtccagcaggatgcagttggcgccggagagcatcatcttcgagagcatacaccggaccttttcgccgccggacaggacctgcaccggcttgaagacgtcctccccggagaagagcatccgccccaggaagccccggaggtagacatcgtcctttttctcggaatactggcggatccagtcgatgagggagagaccgcagccgtcaaaatacggagagttgtccttgggaaagtagctctggctactggagacgccccatttgacgctgccgctgtccggctccaattcgcccatcagaattttaaacatcgtcgtctgcgccagctcgttttcgccgacgaaggcgatcttttcattccgcccggcgatgaacgagacatggtccagcagctgcacgccgtcgacggtcttgcagacatccgtgacaaagagcacgtccttgccgatctcccgctcccgggtgaagccgacaaaggggtagcgccgggtggagcagggcatctcctccaccgtcagcttgtccagcagacggcggcgggcggttgcctgtttgctcttggctttgttggcggagaagcgctggataaactgctgcagctcggcgatcttttccgcattgcgtttgtttttattgcggatgagctgctgcaccagctggctggattcgtaccagaaatcgtagttgccgacatatagtttgattttaccgtagtcgatatccacgatgtgggtgcagacggtattgagaaaatgccggtcgtgggagacggtgatgacggtgccggggaagtccagcaaaaagtcctccagccagtcgatggaggcgatatccaggttgttcgtcggctcgtccagcatgatgatatccggatgaccgaacagcgcctgggcaagcaagaccttgacctttaagcggccgtcggtatcggccattttatcctggtgcagcgccaccgggacgcccaggccctgcaggatctggctggcctcggactctgcctcccagccgcccagctcggcaaactctgcctccagctctgaagcccgcaggccgtcctcatcggaaaagtccggcttttcatataacgcgtccttctccttgccgacctcgtagagccgggggttgcccatgatgaccgtctccaaaacgctgtaggcatcgtactggaattggtcctgcttcaaaacggacatccggacgccgggctgaatggtcacatggcccttggtagactccaggtcgccggagagaatttttaaaaaagtggatttcccggcgccgttggcaccgatgacgccgtagcagttgcctgcagtaaattgcaggtctgcatgctggaacagcacgctgccgccaaactgaatgccgagatctgagacggtgatcataaaaagcggtttcctttcccataaattgatagacagaatatttccttgcccctatcctaccatatcgggccggggaaataaacccgccgttacaatttttttacaattgcccccttgcaaatgccgaaagatgcgctataatagttttagcactcgaaacaaatgagtgctaaacattttctgaggatgtgttttactatggcaaagaaacagtttaaagcagaatcccggcgtctgctggatctgatgatcaactcgatctacacgcaccaggagatcttcctgcgggagattatctccaacgcatcggacgccattgacaagttggcctaccgggcactgacggatgaaaacgtcggcctgaaccgcggcgattttgccatcacgatcacccgtgacccggaaaaccggatcctgacgatttcggataacggcatcggtatggattatgacgagctggagaagaacctgggcaccatctgccgcagcggctcgctgcagtttaagaatgaggcggagaagaaggacgatattgatatcatcggccaattcggcgtcggcttctactcagcgtttatggtcgcccagaccgtcacggtcgtctcccggaagtacggcagtgaccaggcgtttatgtggcaatccaacggcgcagacggttacacaatccaggaagccaagcgggatcagcccggcaccgacgttatcatgaagctcaaagacgactcggacgacggcaactacagtaaattcctggaccaggagcagatcaagagcctgattaaaaagtattcggactatgtccgctaccccatcaagatggaggtgacccagcagcggctgaaggagggcacggagaaatccgaaaagcccgagtgggagacgttcaccgaggccgcaacgctcaattccatggtccccatctggcagcgcccgaagaaggacgtgacggacgacgaatatacgaatttctatcgcgataaattcggcgactatatgccgccgctgacccatgtgcatgtcagcgtcgagggtgcggtgacgtataaggcgctgttgtatatcccgtcccaggctccgtatgatttctacacccgggatttcaaggctgggctgcagctgtattcctctggcgttatgatcatggagcactgcgaggacctgctgccggagcatttccgtttcgttcgcggcgttgtcgattcccaggatctgtcactgaacatcagccgcgagatgctgcagcatgaccggcagctgaagattatctccaacaatctggataagaagctccgtgccgagctgacacggctgcttaccgaggaacgggagaagtacgagaccttctggactgcctttggccgccagatcaagtgcggcgccgtcgccgattacggcgcgaacaaggaaatgctgcaggacctgctgctcttctgggcagacggcgagggtaagctggagacgctgaaggaatacgtcgccgccatgcccgaggggcaggagaaaatctattacgccgccggcgagagccgcgaccgcttgatgcagctgccccaggtcgagcgcctgcaggataagggctacgatgtgctgtttatgacggaggatgtggacgaattcgtcccccggacgctgcagaattacgacggcaaggccttctgcaatattacgaccgacgatctggatctggatacggaagaggaaaagaaggccgcggaggagcagaagaaggatctggagccggtgctggactatctgaaaaagcagctggaaggccgcatcaaggaggtgcgcctgtcacagaacctaggttcccacccggtctgccttgtcccggcgggcggcatgagctttgagatggagaagtatttcaagcggatgaacccggatatgccgatgatggacgccgggcgcatcctggagattaaccccgcccacagcgccgtggccgcgctgcaaagcgccatcggtcaggacgaagagaaggccgccaaatacgcggaggtcctctatgcccaggccctgctcatggcagatttgccgctggaagacccgacggcttacaccgacctggtctgcagcttaatgcagtaaaacaaagtgagatgggcgctgcaaaatttgcagcgcccttgattgtattcaattgaataaaaagcctcgcagagtttgcgccgcgcacggcgcaaataaggtccaatttgtttttttcggcggcaagtgggtgagactccaagagcgcgcagcgcgattggcaaaggcgaacccatgcagcgcatagtcgggaaaaactcttctcgccctgcaagttgggtgagactccaattgtgcaagctttgcgcagcacaattggtcaagtcgaacccatgcagcgctgtggaatttctgcgctggaagcgctgaaattatgcgcgcagcagggtgcactctctctcaaacgagagcccagcgaagcggtaagcgaaggtcaaaagcttaagcgaaagtcaaaatctctgattttgtcacttgagcttacacagcgtgctgattttgtcactcgagcttatacagcgttgtctcgtttgaatgtgcattatagcagcatcggttggagctgcttgccctgcagggccaggtcgacggtttcggggagctttgtaaaatctgccaccagggatgcgggctttttcgtgggactgtcctgcccgaagggtacgaagtagaagtaccgtcgggccagcagcttgccgagactggcggcgttgcccgccagtgcgtcgttggaggatatggccaggacgatgggccgctcattgcgcagatgcgccttgcaggccagggtcacggtggaatccgccacgccccgggcgagctttgccagggtgttgccggtgcagggggcgacgatcagcaggtccagcagcttctttggcccgatgggctctgcgtccgtcaggctgcgcagtgcgggcctgccgcagatctgctccgcccgggtaatgtgttctgtcgcccggccaaagcgcgtgtccagcgtggcgctggcttcggagaagatcggaatgatattggcatagcgccctgaaagcgcctccagcgcctgcaaggatttttcaaaggtacaaaaggaaccgcacagggcgtagcctagggtcaaggtctcgttcataatgcctcctgttctatcagggtgcgggccacggtctgggcgatgagccgcccggcagtggcaggcgcggttttgccggggagcccccgggcgtgggtaaactgcaggctgcggcgcaggcactgggaggcgtcgatgccacctggggcggacgccaggtcgataagcacgcaggtagggtcgatggtgtcatactgcgcgggcgtgaacaccggggccgggacggtgttgaagatcacccggtattgccccaaggggctgcggtactttgcgacggtatcgtgtgccaagcccagggcttccagcagcgcccggtccgcgtccttgcggacggcgacggtgacctgggcccccagccgctgcagccgcaggctcagctgcttgccgacacgtccaaagccgaggacaaggcagcgggactcccaaagtgtatcgggcatctgctgcatggccagggccagcgcgccctccgccgtgggaatggcgttggccgtcgtcagaaattcgtctttttcatagtccaggacctgggccccagcgttttgcagctgctgggcaaaggcgcctggtctgccgcagagaaagcggctgccggtgatgggcccctgaatcaaatcgctgcagtgcaggatcgtctcgccctgcagaaacggaatgtagccccgggcattgaacgcggggtaaggcagcaggtagtcacgctgaggctggaatagcccgggtagcgccatcgtatccgggctgccctgcacctgaaatgtatcgacctgccagccggcctggcggagctgctgcgcgcagtagctgtagcggacatcgccgcccaggattgtaatgtgtgcagacgtaagctgcaagaagatcaactcccgaaggttttttccatcctatgcacgtgacgcctgcccggtgcggcggaaaacagggcttgtgcgaaccggccaggtggggtataataaagaaaagctgtgcagccgctgctgcggcgccggtgaaaggaggcggcaggaatggagcgtcgcggttttattcatgatatgctggacgtaaaaattttgattctctacgtgatggaccgggttatgtacccggtggacgcgcagaaaatatatgagctttgctatcaggatgactgcctgagctattttgatgtcgtgcaggcaatcccgcagatggtagcctccgggcatttgctgcagcaggaagatggcagctatgccatcacggaggagggcaagcagaccctcgcggtgacggcggattctatcgcgtttccggtccggcagcgggcggaaaatgcggtggagcggttcaatcgccagattctgcgcaacaactatgtccggacggagatcctcccgcgtccggcgggggatttttccgttgtcatggggctggatgatgaatttggcaatttgatgacgttggagctggtcgcaccgacccgtgcccaggcacggaagctggagcaggcgttttcccaaaaagcggagcagctgtatcagtcaatcatgaacgagctgctggcgtctgaggaacgcaccgggacgcaaatggcctgttcacaaaaagtttacacgaaaaccggtacgcaggggtctattatagaaaatgcacaggaaaacctattgaaatctgataagtttatggtataatagtagacagcaaaccccctgaatcatccgaaaggagtggccaatgatgaaaattcaaatgcaagaaaagaaaattcgcctgccggaggatatccatgcatacgccagcaagaaggtgacgaagctggagcggtacttccgcgaggaagcagaggcttttgtcacgttctccgttgagaagaatcgcaataatgtggagttgacggtccatgcggccaatacttatttccgcgccagtgaatcgacctccaatatgtacgcgtccatcgacgctgcggtcagcaccattgagcgccagatccgcaagaataagacccgcctggagcgccgtctgcggcaggatgcctttgccagaacggtcgatatgcccaatacgtttgcacctgtcgagccggaggaggaagaattccgcatcctgcgtaccaagcgcttccccctgaagcccatgacgcgggacgaggcgatcctgcagatgaatctgctggagcacagcttcttcgccttccgcgatacggatgccgacggcgctttcgcagtcgtctataagcgcaacgacgacggctacggcatcattgaggacgtccagtaagttttccccaggcgcgttcagcgccgtgcaagtttttgtattcccgcgccgggccatcgctggtccggcgcttttttatcttgcattttttggtgaaattcagtaaaataaaccaaacgtacggtgcaatattgcgggggtccctgctgacgaaaaagggtggaacaatgaaaacaatgaaaaactggctgctggccgctgtactggtcgcggcactgaccgcagtggtcgcctgcggcggaaaatatctgagccatacgtatcgcgcggaaaaaacgctggagtgcagcacgcttgcgctggacgaccagaccgtcgcgatttccgagacgcagcagaaaaactatctgggcgaccggacgatccttcggcgccactaccaactgggaaacggagacaccgtgacgcaggcccgggtgcaaaatggcaactgggcctcccgctgggaagcggtggagacctgggacctgccgtcaaaggaagggacgatctggtactacgacccggcggtcggtgcatggcagcaggccgcgctttcgcccgcggtcctgtccgcaacagcggcttatctcgcaacgccggatgtgcaatattttgtgttcatcccctggggctatcgccaggtcgagcgcgcctgcctgcaggagacggggagccgcggctatttgaccattacgcagtcggcggatggctggcgcgtgcaggtgtttggcagttatctggatgcaggggaggtctgcgattacaccgtcgtgtgctccgacgatccgacgccattgtgggatacggcggaaaacagcctggccctgtgggcgacgtatgcccagccgcgggattggaagtggtgctacgatggctactaccgtccgtgcccggagacgtacgagccccacgggagcggcgtctatttccgcagtgtgatttcctatttgacaaaaagcttggaagccctgtcgggctccaaccgctgcgctgatgacctgacggtcgcgatgctagacacggtctcgcgtctggcggaagccgacgggagcatgcatacgaagacccgcagcggctggctttgggaagattacggcatcggcgcggattattacgatacccgctggaattcggacgcgatgctgctctatctgaccttcgcgcagcggcacggcggcttccgggatgtgatggagaactatctggcgttctatcttgactacgccgaaaaatatcatcacaccacggcaaacggcggctggttcgtctacgattactgcaatccggatgcggatgtgccggtgcacacatcgctcaaccaccagctggcggagatgcaggtgctgtatgactatagcaattatctgcaaaggccggatctggccgcgctggcggaccgcatgctgctggcgattgaggacacttggccccagtggataaagcccgatggcgacctgcactattgctattacggggagggcgtctatggaagaacggattatccctacctgacgtataatgacctgtttgccatgcaaaagaccctgcttgcccgcaatggggcagagaacacggcgcttcgcgcactgatggaaagcaagctgcgctggatgacgcagcagggaattacggggtattttaaataattttgaaaaaaactgaaaaaagatattgacaaaagtgcggggagctggtatactaacgaagcgcattacggaagcgcagttaataccaggcaga

SEQ ID NO: 2462 - DNA, 28859 bp, Unknown
  16S sequences of unknown bacteria
tcaagccgttccggcggttcattcggctcgtcaagtttcggcggcagccgcagtggcggatttggcggttcgtcaagccgttccggcggttcattcggctcgtcaagtttcggcggcagtcgcagcggcggattcggcggctcatcaagccgttccggcggttcattcggcggcggaagatccggcggcagctttaagcactgataacatttaaataagcggatttaagacagtttaggccatgtggcttagactgtctttttttatttgccccggtgtaacaattaccccggcaggcaaatataataaaccgaaggttgaattaaaagtgcgggtgatgtaatggcaattttacagataaataatttaagtatgatatatcaaacagaacaggcagagacaaaggcaatagaaaatgtgtctttttccgtggagaaggggcagtttgtaagtattgtggggccctccggctgcggcaaaagcacactgctttcatgtattgcagggcttaccctgcctgccgacggtgaaattttactcaacggcaaggagattgacggtatcagccgtgaaataggttatatgttgcaaaccgacaatcttttaccatggcgttcggtttataaaaatgtgcttttaggccttgaaatacaaaataacataaaacccgaaaccgtggcttatgccgcagaactattgaaaaaatacggtctttgggagtttaaagacagttttccgcggaatttgtccggcggtatgcgacagcgtgcagccctgatacgcacccttgccacaaggccggagattttacttcttgacgaggctttttccgccttggattatcaaacaagactgactgtaagctgtgatgtgtggcagattttaagacgggagggcaaaactatggtaatggtaactcatgatattcccgaggcggttgcaatgtcggataaaattataattctatcccacagaccggctattgtgaaaaaaattttaatgccggaatttggtgataaaaaccctacacggcgcagggaaagcccgatgttcagccgatatttcaacgaggtttggagggagatgaccccgtgaaaaaagcatatacaagagaagaatttctaaaatccgttagaaattttaagaccagggtaaaaataactcaaatatttaccgttgttcttattttggctttttgggaacttgcgggggttaccgggctggcagacgcatttatagtttcaagcccggtaagggttgtaaaaacatttatctccatggccggcaaagggctttttgtccatgtggtctataccgtggcggaaaccgtaatcggctttttaatcggcgtggtactggggtttataatatccgtcgggctgtggttttcaccctttttcaacagggttttcgccccgtttttggtggtgcttaacagcttgccgaaaatcgccttagggcctgttataattgtttgggccggtgcaggtgcgggagctataattacaatggcagtggctatatctttaattgtaacgattattcagcttaccgagggctttaattacaccgacgaaaaccttttattgaccgtaaaaagtatgggagcaggcaagtggcagagcttttgcaaaattgttttgccgtataatgtgccggtgtttttccaaagtcttaaagtcaatataggccttagccttgtgggggtaattgccggagaatttttggtttcaaaggcggggcttgggtacttgatagtgtatgcaggtcaggtgttccgaatggatcttgttatgatgagcgtggttcttcttggggcaatcgcttttgcaatgtacgccgcagtaagccgtttggaaaaatgggttacaaagcaaataaatcacaattaggaggctgttttgagaaagaaattttttatcgctgccgcattggccgctttgctgtgtttggcaggctgtgcgcagacagaggaacaagaacttgaaaaagtgacggtggcagaggttacacattctattttctatgcgcctatgtatgccgcaataggcaacggatatttccgggaaaagggcatagagccggagcttataaactccggcggtgcagataaggttatgacggctcttttaaccgacggagcgaatataggctttgcagggccggaggcggttatatatgtgtgcgctcagggcaaaaccgactacccaaaggtttttgcgcagcttacacagtgcgacggctctttccttgtgggcagagaaaaagatgaggattttacatggcaggacttaaagggcagcacaattttgccgggccgcaagggcggaataccctatatgacattgctgtattgccttaataaaaacggtatggaagttggcaaggatgtattttttgacgataccgttcggtatgatgccatgacaggtgcgtttttaagcggaacgggggattatgtaacggtatttgagccgggcgcttctgccattgaggcagagggcaaaggatatattcttgcgtcggtaggtaaagagggcggtaaagtgccttacacaacctattttgccaacggggattatatagaagaaaatcgggatttgatacagcgatttaccgatgccatatatatgggtcaacagtttgtaaacagccacagccggcgtgaagtggcggagagcattgcctacgctttcccggatacggacatagaaacaatcgaaaccgttgtaaatagatacaaagaaataggcgcttacagtgaaaacggcattatgaccgaggaaaatttcaatcgcctttgcgatattttacaaaatgccggggaacttgatactcgggtaagttacacagacattgtggacagtacatttgcacaaaaaagcataggataaaaatttcccgcagccgctttaaaacggttgcgggaactttgctgtacagccgggtttattttaaacatattttaccggtgtgtataaatgtgaaaataattacaaaaatcggacaaagaaatttaacatttatttaacaagccttacacaaacagcggctataatagtacttgtaaaagataaaagaaacaacatttaattcataatgtttttcatttttctctcctcttaataaatatacttttccccgaaagacggccgcataaagcggtcgtttttcattatatatttaaaaacagacaaattagaaaaataaaaagcggccgctaagccgctttaaataaatatttagtttgatgtggattctatcagtttaaccgttaccgcaaaggtttctccgctttccgggcggtaaatttcaagttccatgtcatcgccggggctaaactttgtcagttcggtcaaaagcacctgagtagatgtaactgtggtgccattggcctttacaataacatctctttctcttacgccccgtgcaggcaacgggctgttatcggtaaatgacgcaatatatgcaccgtagtttggcaagccgtttctcgggccgtttgtggagttaagctctataacgcttacgccgagaacagccctgcctgtaacataaccgtttttaataaggctttcgataattggcagtgcatcgctgataggaatggcaaaacctatgccctcgtagtcaacattggctattttagatgatgtgataccgattacctgaccccatctgtttacaagagggccgccggagttacccgggttgattgccgcacttgtctgaatgagagccaaacttctccggcttgaatctacattacggttaagaccggaaacaataccctgtgtgcaagagcctgaaaggccgcctgcattgcctatggcaacaactctttcgcctattttgagctgtgtgctgtcgccgaaatccgcaactgtcaaatcagatttgttaactttgataaccgcaaggtcggtgtctgtgtcatagcccacaatgtccgcccttacttcatcgccgtcgctgaaaacaacattgagatatgttgcgtcggagataacatgggcgtttgttataatgtagccgtctgccgtaagcacaatacctgtgccggaggcggaaggtgataccgaattaccggtgtatgtgtttatgcaaacaaccgacggcaaaactttttcgtaaatttcggtggtgtcatatccctcgtcctgattttccggaacaggctgaatttcaaccatactgctgtcaaaagaactgtcggtgttgttgccgtctttgtcggtttcggaaataaggctgtcaatccgtttgtacaagccggtgtcctttcccgatttacctatataataaccgcctgcaagtgtcaaacataagcaggcaaccataaccaaaataagtggtgtctttttatttttcatcgcttatcgcttccttttttgtatttctgttgatatgataacctttaattgtgaaaattatttgactatatatgtaattttaaatgtatttcacctaacattcagacaaaaaacacacggaggaagaacctccgtgtgaaatgtgaatatttattttttcctgccttttttctttacggtgacatttctgtttgcgcttttgtcccgtggcaaaataattgtttgttttgtccgttttttgccctttgcacaaggcagtgtaaatataaattcggtgtagcttttgccgtcgctttccacccaaatttcaccgccggagcgagttacaagggtgcgcacgataaacaggcctattccggcaccttttacatgaacgctacgagaggtatcttccttgtaaaatctttcaaagatgtatggaagagcttcactgcttacgccgtcgccagaattttttatttttacggtgactataccggcagatttatcctcagttacactaaaagcgatataaccgccattcggtgtaaattttaaggcgttgtcaaatatattgtaaaccacctggtgtatcaaatcccggtcggcatttaccattattttttcaggcttaaagtttacaagctggatgccggcgttttctatcctgctttcaaagccgaaagcaaccgttgcgatagtgtcccaaatattgtaatcccgaacattcataacaaactcgccgctttcaagtttggaaatatcaagcatgctgtttgtaagtcttgcaagcctgcctatctcatcgcttatgactttaaggtatttttcctgccgttccggcggaattgtgccgtctaaaatgccgtcgacaaatccttttatactcgtcataggtgtgcgcagttcatgtgcgatattggccacaaaactggagcgagatttttcgtttttctccacgaaagccgccatttgattgaatgtggaggcaaggtgagcaatttcgtcatctccctctatggcaacacgggcggaaaaatcaccttggctgaactgctttgccgcatttgaaatattgctcaaaggagttgtaagcctgtcggttacaaaaaatgtcacaacaccggagattgtaagcatagacgccgcacataaaaagaatatggccataaggttattcataaaagcggcggtactgcttgcgtcggaaaatgcgaacacataaccgtttatattgccgtaggcgtcccttgcggacagacctacggtgtagtagctgttttgatacatattggcaaaaccgccgttaagtaccaacggattttccgttgcggaaagttgccgcataatgtcgtccggcagaaacataccctcatggttgcactttgtctcctcggtacaaaccaaaatcttgcctttttcgtctgcaagtaaaacccttgtagatgttgtgtttgatataaggcgcagattgtcacgaagtttattgcgcttttccgtacttgttaaatcttcgtaatcccccagggaaatcctgtaagcttcccgaccgttgtttacacaaagatttaaggtgtctattctgtcatctgccaaatatcgctgggtgaaaaacataaaaattatacccaaagtgcctattgataaagttatcataaggcttatggcagaggaaaagcgagaggcaatggtttttctcatatttaattagccgtgcaagccctgttcctgcaattccatattttcaaccacaatgtcgtgaatttcgcccaaagaggcacagtattccaaaacaagccaaggctcgtttgtgtggtaatgaattttaatcaaatcgctgtcgcctactgccaaaaggcaatcgcctttaaagtgctctacaaaataatcgtagatttcgtcctcgtctaaatctgtgccctcaatcaagagctgtgtgtcgaatttgaattcaagcatattgttctcctttaaattaacttttttgattattctttgacctcgaatttgtagcctacaccccaaaccgttttaaggctccactggttgcttacgccctccaatttttcacgaaggcgcttaatatgcacatcaatggtacggctgtcgccgtagtattcaaagccccaaacttcgtcaagcaaggcgtccctggtaaacaccttgttaggatttgaggccaagtgatacagaagttcaagctctttcggcggcgtgtcaacaacttcgtcttttacacgaagttcgtattttgttatgtttacaaccaagttatcgtaaaccaaagaaccgtctgttgcgggccgctgctccgtctgtctgccggtgcgccttaaaaccgctttaattctggctacaacctcttttgtgtcaaaaggttttacgatgtagtcgtctgcgccaagttcaagcccaagaaccttgtcaaaggtttcgcctttggcggtaagcatgattataggcacattgccttttgcccttatgcggcggcaggcttcccagccgtctacacggggcatcataacatcaagcagaaccaagtcaaaaccgccgttttcaaagacttccacagcggcttcgccgtcgtgggctatggcggtttcataaccttctttttcaagatacaaacgcaaaagttcgcagatatttacatcgtcatcaactattaaaattttgtccttatccattttttaccccctaccgtcgggcggtgttttacaccatcacttgaatgaattatacatgaaaattgtgaataaataaaggggaaaacacggctctttgtaaacattttaataatttataggtgaatagataagttttatggcttgattcggcaaaaaattaaaaaatttcttgacaaaagtttgttgctgtgctatacttaacaagcattaagttgctggtgtagctcagccggtagagcagctgatttgtaatcagcaggtcgggggttcgaatccgtccaccagctccatttttattaaacttaatacatgggagagttcccgagcggccaaaggggacagactgtaaatctgctggctatgccttcgatggttcgaatccatcctctcccaccaagagaagtacatttttgtacttctctttttttgttttgccgtttttaatattactttatttatcattcggtgcattttcaatactcagaaaaagaaaacacaaaacaaaagtgtcacgccgtcggcgtgacaccggttattctgtattgagaaatattctttaaaattactttttatttctcagttttttaaaaaattcgttaagcaatgcaaggctttcctcctcgcacacgccgacaatggtttcaacaggctttgtaagcataattgcggcggcgtctgccctgccccccatggcaccggccttaaaatcaatacaggagtacaccacaagtggtattcggctgttaattatcgcccctgcgcacattatacagggttcaagatttacatacaaaacgcagtcgtcaaggcgccatctgccaagggtttggcaagcctgcctgatagcgtttatttcccggtgaccaagggcgtcttgctctgtttcccttgtattgtaacctctgccaacgatttctccgttatgcacgaccacagcccctaccggtacttcgcccacatcggcggctttttttgccaattttaaggcctcggccatataatctctgtgtttcgacataaaatcaccctattatcaagtcgccgtaaagccgttgcaaaacagctgccaaacagcccagcattgcaagtacaaaaacagggcttttaaatatcacgctaatttttgggcttttaccgccgtgagatataacctgaattgcatttttgtgatttcttttcaaatatacagccgaaatagcccctaaaacaattattatacatatcataaacgtggaaaaactcacagccgaaacgccgttcatattttcgtttgcataaagggttaaaaaagaataggtgttgtttgtgaaatgcaaggccattgacacataaatacaatccgtatatacatatacacagcccaaaatcaaagcgctgataaatattgatacaaaattttgcccctggcagtgcatgatggtaaaaactatcgcagagactataaccgcaaatctgtggccgtagtcactcaaaaggtttaacaccgtacctctcaaaaacagttcttcgcacacagccggcacaaccgcagcataaataaaatagacaacagcctgtaaccccttgcccaccggcggcatgtacacacctttaaaagatatgccgaattttgccaaaatgcccataaaaagccgatttaaaatcatagcggctaaaaaaagcagcatgccggcgcctacataataccggccatccttgggaaactttttgttaaagagataagggtggaaatcacacatactctcaataaaagccacaggcaaaagacaggctgccgcagacagcaggcagtaaacactaagccaaaccgtcatgttagaattaaggccgaattttgccaatacaggcggaacataagtccttataagtaaaaatattatcaccgcaccgcctatggtgttaagtttatatatcaatggttgctttttcatatatctccgtcgcctttattaagctcctctgtttgagccaaaaaatttttaaaattattccggctttcctctctgcacttggtgtacattttatctataatgctttcaagccgctgtttttcccgccgggttaaatcctcttccagccaaccgtaaaacaatgcctcggttctcgcctttgaatctttaagtttatccgccttttcggtggcgtacaaaacctggctgcggccgtcccgaggattttgcctgcgtataatatacccctttttttcaaggttcaccgcctgccttgccacagcccccttatccgccgacaaaatatctccaagccgcttttgggttatgcccggatttttgcggacaacatgaataaagtcaatttccgccgtgccgacgccgctgttttttattacctttgcggttaagcgggatacttccctgtttatttttgttatttttctttttgttacatctatcgtcatatcactttatctccttacttaattttatcttttataaaatcttatgtcaagtaaccaaagacttttataattcataaaatataacgaaaccctgataggaggattttatttatatgtttcatggaaatttacaggtaactgttacaaccgggcaagctttacccttaaaagatgttaaaattaccgttgcggatgcccaaactttgcaaaccttaaccgacaaagaacggtcaacagatgaaaacgggcaaacacctctcatagagcttgaaacggtagataaaaaatatacattttcaaaagacaacaccgaaactctaccttacaaaaactacattgtaacggtggaaaaagacggctttatcaaaggcagattaagcggtgtacagatatacgacggcgaaaccacattacagcaaatcgaccttttgccaagacccgtagattacggcaacgattacgagcttgactattccgtaaccgacactcaaaatctttttgaccacagtgtttatcacgaccaagagggcgaagaggggcgagttttaaaagaagtggtaatacccgaatatatcaccgttcatttgggcaagcccaaagaaaaagtggcaaatgtgcaggtgccgtttataacatatctcaaaagtgtggccgccagtgaaatttatcccacatggccttacgaggccttaaaagctaatatctactgccaaaccacatttattttaaacagaatttacaccgaatggtacaggagccaagggtacggatttgatataacaaattccacctctttcgaccaaaaatttgttttaaaccgtgccacatttgcctctaccgaccgggttgtagaagaaatttttaacaactatgtgacaaaaatttacaatcgagacccatactttaccgaatactgcgacggcaaaaaggcaagctgtaacgggcttaaacagtggggttcctacgacaaagccaaggcaggggaaaccgcccttgaaattttaaaagattattacggcgatgtgcagataaatcaaactgacaacatcagcacatcttatgcctcttaccccggctcccctttgaaaaacggttcaaccggagaaagcgttcaggccatacaggctcagttaaacagaataagcgacaactatccgtcgataaacaaacaggttgccgacggcatctttggcgggaataccgaaaaagcggttaaggcttttcaaaaggcctttaaccttacgcaagacggtgtggtaggcaaaagcacttggtacaaaataagctatatttacactgccgttaaaaaacttgcggaacttaccagcgaaggagaagcacttgcgccgggggcatacccgggatatgttatatcaagaggtgccagaggactgaatgtgcttataatacagttctacataaatcagcgggcagtttacatttcttccgttgacagagtggaagccgacagcattttcggcgccggcttggaaaaacaggttaaaaacttccagagatatttcaatttaaccgacgacggcaaagtaggccctttgacctggcacagaatgcacaatttttacaaaagtatttacaacggcacagcgatgccaggtgccacacctcccccggcggatgcctatccgggttatcttctccgccgtggttccacagggcggaatgtcacaaaaatacaacaatggcttaacggtgtagggcaggtttacacacaaataccctatatagcgccggatggcattttcggggcaaaaacccggcaggcggtggaaagcttccaaagagaatttaaccttacacctgacggtatagtgggtaaaaagacttggaatcggctttacaaccaatggcaaacccttgtggcagaaagcatgatataacttgtaaaatataaaaattaaatattgcaaaatatgtccttttctattataatgtttaagttattgtatttttaagggggaggacagtcaatgaatttcaaatgcacagattatcatattccctatgcgcaaagtaaaggacattccgactattttaacagcacataacacaaattgatttttatttaatatgtttatgttttgttaattacggaggaatttaaaatatgtggtttatttttacgatttgtactattttggcatggtcgggttccgaccttatgagcaagatgggttcacgcccggacgataagctcagccatttgaaaatgcttatggccgttggttttgtaatgggtattcacgccatttaccaggtgacaatcggcggcgtaagctatgatttacacaactttatagcatacatgcctatttccgcctgctacattatatcaatgatgttcggctacataggtttgcgttacattgaactttctatttcatcgcctatatgcaactcatcaggggctctcgttgcacttttgtgctttgtattacttggtgacagaatgtcgcctttggccctcattgcggttttgcttatttctttcggtattttcttccttgcaattatcgaaaaacaggaaggtgaagaggcaagaagtttgcgtgcacacccggatgacataaaatacgaaagaggctttttggctatcttgttcccggttttgtatcttataatcgacgctatgggtacattccttgacggtatgttctttgatttccaatttccggattggttttacatcggcgtaacagaggacacagttgaacttgtatgtaatatctcttatgaatttacatttatgattgtgggcattatttgcgcaatctatgttttgggcataaagaaagaaaaattgactgttgaaagagataaattcaaactcctcggcgcttgctttgaaactctcggccagttcacttatgtgtttgccctttccggcaacacaatagttgccgcaccggcaatcggttcttacactgttttctcggttatttggtcacatattttcttaaaagaaagacttacaaagaaacagtactttgttgttggcatggttttgatcggcgttataatgctggcatttcttgatatttaaaagataattttagtaacagagcctttacaggctctgttatttttttgtaaccgatttttaattatttttaattattatgacatacattttacacataagagaactatattgtaagtatccgaaatggaggtaataattatgaaaaagattttagcagttatattggcttgtgttattgttgccgcttttacggcatgttccacaaattcttcatcacagggcggagagacatcttcctctcaaagcgagagtgaaagttctgcttccgaccgggtaaaggttgaagacgaagaacttacaaatttgattaaaaaccttaacgatacagtacagccgggcagcgccggttcgtcacttaaagcaacaactgccgcaagggattttattcggtgggcagacggctgtgaactgacagacggcgatatagaaaaggttgttgcggaggctttgtcatcctatgacgacaccgaaaaaggcactttctttgaggcttggtcattggtaaaaagctcctacgaaacaatcaaggccggcggtgacgatgccgcagaacttttgcagtccgcaggcgttgagggcgaagttacggtaagtgaaaatgccgataaagctttttcagcacttgacagcgcaatcaacacagtcgttgtatctacggaagaataatcttgtttttctccatctctataaaacaaaatatttataaaacgaaaagtctgcttcggcggactttttgttttgccctttaatcgggtttactaagccgatttgcagattgtatagtttaccgtttaataaccgggaattttgtacaaattgcctgtaacaggcttttggttgtgccgacggtagggaacagtcagtctgttaaattaaatataaatagccataagaaagaatatattatttcacaaaacaaaaacaaaaacgccccgaaaatcggggcgtaattttttatgatagcttttgaagattattcttctgtttcttccttaggagcttccaatgtccgtttaattgaaagtgaaactctcttagcttcaaggtcaacatctttaagtttaaccttaacttcctgacctactttcaataccttgttggggtcgtcaactctttcgtttgaaatttcggaaatgtgtaccaaaccgtcaatgcccggcaaaatgtttacaaatgcgccgaactttgtgattgaaacaaccttacctgtcatgatagaaccgattgggtattcttcttcaaacttcttccacgggtcgtcgttaggatctttgtgaccgagactgattttgccgttttctttgtcgatgctctttacataaacatcaatgtcatcgcctactttaacaacctctgcagggtgtttgatcttttcccatgtgagttctgaaaggtgaacaaggccgtcaacaccgccgagatcaacaaatgcgccgtagcgtgtgatgctcttaactttgcctacatagtgcttgccttcttcaactgtttcccagaatttatctctgagttccttagccttttcgtctttaacggcacggattgaaccgataacttttctgcgtgcgccgtctttgcttgcttcgataatcttgatttcctgttttgttttaacaagtgcttcaagtgattcgtttcttgccgctgccaatgttgcagggataaatacacgaacaccgtttacaaatgcaacaacgccgcccttaacggcttcaacgatagttgcaacaactgtttcgcctgtttcggctgcttttgcaactgcgtctgcaccttcgatagcatcatatctcttctttgaaagttcaacggttccgtcctgatcgttaggcttaataacgataagattcaactcgtcacctttcttaacaatgtcttcgatcttagcgcttggatcgtctgtaagctcgtcaagtttgataaaacctgtgtgctttgtgcctatgtcaacagtaacttcattgccctgaatacctgttacaatgcctttcacctttgcgcctctgaaaactctttgttgatttgcataagactcgttgagcatttcttcaaagctcttgccgtcttcacgaatttcttcgctcatgttattaagtacctcctgaattatgaacgccggtgtacttgctcctgccgtaacgcccacatttttaatatttataaacaactccggtgagagctctttaaccgtttcaatactgattgtcttgcaatattcactgcaaacccgaaccaatttttgtgtgtttgaagaatggcggccgccaataacgatcatcaaatcgttttgctttgccagctcagcagcttcagtctgcctctcctcagttgctctacatattgtatcaaaaatttcgcagtttgtacatagtttttttacaagaaatgttatttcgtcccactttttgagcatatatgtggtttgtgcaaccagatttgctttttttgttctattattggcaatattcagccattcttctaattctgccggctcattaaaagtgaacacttccccgtcagtgtagcttacaatgccctgtacctccggatgtgctttgtccccggccacaagtaaaactctgccgtccttaccggttttttcggctatgcgatggatttttttaacatagggacaggttgcgtcatggacggtgatcccatgccgccgatagtaatcgcaaacggatttttccaccccgtgactgcgtaaaacaacttcgtaacccgccggagcttccacgccgtcaagggttataacacccaagtcttccagggccttaactgcctgtgtgttatgaataagagggcccattgtggccacttttgctccgctttttgcaagttcttccgtcatattaaccgcacggcttacgccgaagcaaaatcctgcggtttttgcctttgtcactttcataaaatcacctcaaacaattattcttccacaggcgagatcttctctttctcaatctctctcattttcggcacatagccggtttcccggcaataccgccgcaaaacattttccatgctctctttgtatttgatgcgccgtacacggagagagcgcttatcctctgaggataaattcatatcctccgcctttatcggttcgccgaattttacaaccaccttgccgaaaaggcgtggcttgcaatttgtattggggaaaataattcgcaccggcactatatccgcaccggtagcccgtgccaccacaaaggcgccggatttaaccttttgcatttcgtcccgatcgcctcttgtgccctccgggaaaatcatcatgcccctgccggacttaacatcctcaatgcctttttcaagggcggaattgtccgccgtgcccctctcaacagggaaacagcctacccaccttaacaatgtttttaaaacaggcactctgaaaagctccgccttgcccataattgacatctttttgcctacgccgtaggccataaccacaaaaacagggtcaatcatgctcaaatgattgacgcagacaacaaagggtctgccgttggttttataggcggtaagatattccctgccctgaactttaaaattaaacactatgcggaaaactatggaaaccgccacaaatacaatacagtaaaacatcagtctttgcccgccttgttttcgattatatcttttacagcctttaccgccgtgtcaaaatccatgtccgaagtatccagtaaaactgcgtcctccgcctgttttaacggagccgcccgacggtgactgtcccgataatcacgccgctgaatatcccgcagaaccttttcataggtgatttcctcgcctctttgcaaaagctctttgtatcttctctcggctctcacccggctgtctgcggtaatgaaaattttaacggttgcatttggcagcaccaccgtgcctatatctctgccgtccataatcacgctttgcgttttggcaagactgcgctgtgtttcaagcaaaaattgccttaccaggggataggcggaaacggtacttgccgccatggaaacttcgtttttccttatctcggcggaaacatctttgccgcacaaaataatgcgctgtgccccgtctgtgtactccagctttatatctaccgccggcaatgcggcgcaaaccgcccggctgtcgtttatgtcgataccgttgcaaagcatatacaggcctatggcacggtacatggcgccggtgtccacatatactatgtttttttgctttgctatttcttttgctattgtgcttttgccggctccgccggggccgtctaacgctacggaataaatcataatatattctccaaacttatatgttttcagctatcccactgccacaggcataggcggtagcaaaggcgatttgcaaattgtatcccccggtataccggtcaacatcaataacctcgcctataaaatacaaatcctttttaattttggattccattgttgccgggttaatttcttttgtgcttacgccgccggaagttataaccgcaacatctattttatattttgaatttaacggtattgtgaaatttttaagcaatttcacaagcccatgtctttcctctttggtaatttggtttacctttttctctctgtcaattccccatctgtccaaaaccacatcaatcattgacttaggcaaaagcaaatccaaggagtttgaagcctgtttaactgccaatttttcaaagtcggtgcaaatgcgcttatagagagtttcctcgcttaaagccggttttaaatctatcacagcaacgcatttttgtatgtcgctgtcctttatatggcaggatgcggaaagaaccaatggccccgaaatgccgaagtgagtaaacagcatttccccctgttcgctgaaaagttccttcttgccgtttttgattgtaagatttacatttttcaaagacaagcccatcattctgcggcacacactgccgttttccaccaaaggaacaaggcttgcggtaggagtaaccaccttgtggcctgcctctttggcaaatttatagccgtctccggtactgcctgtctgcttgtaggaaagcccgccggtggcaaccaccaccttgtcggcatacaaaatcttaccgccggccagttttactccggccacacgatcgccatcaaaaacaaggcctgtggcgttaccatatatgattttagctttgccggcatatttttcaagtgcctgcttaatctcccctgcattgtcggacacagggaaaactcgcctgcccctttcggttttaaggcgaacgcccaaattttcaaaaaatgtcattgttgccgacggaggaaagccgtatatggcagagtacaaaaactttggatttgtgcggacattttttaaaaatgtctcctcatcgcagttatttgtaacattgcatctgcccttgccggtaacaagaattttaagtccggtttcctttgaatgttctattattgtaacatctgccccggcctgtgtgagtttgcctgcgcagaaaagtcctgcggcgccgccgcctatgataattactttcatttaagcctttcgtttaatacttaggtaataccttgctttcggaaaagtcctccatatccaaggtcaaatttgggttgtagaacgggtcatgtaacaaactgtcgccaaagcggtttttaagcctctgtctctctctttcaaacctttcttttttctccccggatgtgtccgcacctcgggaaacagactcgtgatggtagcactgtgcataaggggtaaagagaacctgatagccgcaatttctcacacggagacaaaagtccacatcgttaaatgccacggcaaattcctcgtccatacctcctacggcttcaaaagcctgttttgtaacaagcaggcaagccgccgttacacaggacaggttttgcacgcaggacaggcggaacatatacccgcttttaccccttgggtgatacttgtggctgtggccggcatagccccccaagccggttataaccccggcgtgctgtactcggttatccgggtagtagagcatagcccctacaatacccacatttttctgaattgccagggacaccatctcccccagccactccgggttgataatctcgatgtcgttgtttaacatcagatacatatcgccccttgcccgggaaaccccaaaattatttatctttgaaaaattaaatccgcctttgtaatacaaaacccttaaattgtcatgggcgttttcaatctcattgtagtattcaaaagtttcattttccgttgagttgttttcaaccaccaaaatttcaaaatttttgtacagagttttttcataaatagaatcaatacactgttttagaacttttacttggtctttatttgggattatgattgaaacaaggggcggattttcaatctcgtagtcgattttataggtgctcgggaacataccctcccttgccttgccttttacacctgttctttcaaggtgggcgtcaatggcggctattgcgttttgggtaacatatggctttgcgcctacgccgccgctggtggagcctgaatgtacacgccagtaatacagcacctttggtatgtgcaaaattttaacattcggtatttcggacacctttaagaataaatcatggtcctgtgcgccgtcatattcttttttaagtcctcccagctccgtaaaaatgcttttcttcatacataccaagtggcatatatagtttacatttgtgagataataatagctgtaatccggcttaaaatggcccacaatcgggtttttatagtcggtgtcaaacagtgcctcgtcgctgtaaacaaaatccgcctttttttcaaaaaccgccgttgccatttggtacaaagcgtcggcggaaagaatatcgtcatggtctgccagacaaatataatccccgtcggcaagatttacccgccgatttgtgttgtcggagatacctgagtttttctccagcttgacatattttattttgtcgctgttaaggccttttacatattcccccacatagccgtgccgattgtcggatgcgtctgccaaaacaagctgaccgaatctataactttggtttaaaaagctgtcgatatactgggccaaaaattttttgtcggtgttgtacaaggcggttataacggaaattgtcttgttttccctattcggcacatatgttttttgcttttcaagctctgattgagggggcaaaaatctgcctttcttccgtttcattctgcggcggaaaaaccccgttgcacgctttaccgtgccggaaaaaccctcttgttttacatattggaagaaaagagccacaagctctttaaaacgcttaatctttaacattatttatacccgtaattttcgtacaaaagtgtaaagtgtgggttgtagtatgggtcgtgataattaaaatacttgccccatctgtcttggaaatttttcttttccctctcatatctcgggttcggtttgtcggtttcgtccaagcccctggatttgctctcgtaatggtatgcctcactgtaaggggtaaacacattaagatagccgtcctcgtataatttaaggcagaaatcaatgtcgttgtaagcaacggcaaaattttcctcgtccaaggggtgctttgcgtaaagttccgcctttgtcataaggcaagccccggtaaccgccatatagttttgtgttgttacaaggcggtacatatcccctgtggtgtccccttgcaatcccttgtgactgtggcctgccgaaccgtttatgcctatgattaccccggcgtgctgaattgtgccgtccggatagtagagctttgcccccactgcgcccacatctttgcgctgtgaatatgagagcatctcttttataaatccatctgaaataaattcaacatcattgttcaaaagcagaatatgctctccacttgccctttcaaagccgaaattgcatattgcggaaaagttaaaatcgcccttataatacacaattttaacctttggattttcggcggtgattttatcgtaataatcgaatgtccgtttatcctcggaattgttttccacaactataacttcgatattatcccagccgccctttgagaaaatgccctttacacagcggcttaaatcatcaatatggtctttgttgggaatgataaccgaaacaagaggattgccggaaatctcatactgggttctgtaactgccgttgtatttttgtattgaaaccttgcctttaagcccaaccctttcaaggtgggcggcaacggcttttctccctgcctcaaaggcgtagctcttggcggacatatccttggcggtggaaccgctgtggcctcgccaatagtacaaaaccctgggaatatggtagattttctttgccttttccgacaggcgcaaaatcaaatcataatcctgtgcgccgtcatactccgggttttccctccgacctgctttttcaaacagttcttttgaaaacaccaaaaaatgggttatatagtttacccctcttaaaaaatccggggcgtagtcaactttaaagtggaactgtataaggtgctttaattggccgtcaagggtgatttcgtcgctgtacagcatatccccaccgtattggtttatcgccttgacattttcgtacagggcgtttggcaaaataacatcgtcatggtctaaaagggctatatagtccccggtgcatttttcaaaagccctgtttgtgttttcgcttattcccttgttttcagccagcttaaaatagactattctgtcatcgttgtagcttttaaccgtctgctctatatatggcaggtctttgtccgaggcatctgccagcacaagctgccagttgccgtagctctgattaaccacagagtctatcatatctttcaaaaactttttgtccgtattgtataagggcaccgctatgctgatttttggcataaaggggaaaaccgcctttttctgccgggcaagttccttttttaaaggcaaatcgctgcgaaacttccacacatcgcccttggtcataagtttaattctgaaatccacttttcgccaagtggcctcaaagccctgttcttttaaagaatttacccctcttttggcaagggagcatatgcgggcaaaattcatatttcgccttaaaaattttaagggcgtatcttgtaaattattactcataaatcaatattccgccgtgtaagcgtcacacacttcttctgttgcccctgtcattattacatcgccgtgagaaagccatgtggctttattgcacagtctgcggacctgttcgatggaatggcttaccaaaataaccgttgtgccgccactcataagttctttcattctggcctcgcacttttcctggaatgcatagtcgcctaccgaaagcacctcatcggctatcaaaatatccggctttgtggttgtggcaatggcaaaggctattctcgccaccataccggaggaatagtttttaaggggcacatcaaggaaattgtgcagttcggaaaaatccacaatatcctgaaaatgttcgtccataaactgttttgaatgtcccaaaaccgcaccgtttaaatagatgttttcccttgcggtcaagtccatatcaaaaccggctccaagctctataagaggtgcgatagaaccgtttacttctattgagccttttgtaggtttaagcaccccggctattgtctttaaaagagtacttttgccggagccgtttaagcccacaaggccgtaaatatcaccgggcataatgtcgattgaaacatcttttaaagcccaaaattcttcaaactgcaaattgcccttaaaaaatttaattacatattcttttaaattgtcaaccctttcggttgccatattaaagcgcatacttacattttttacactcaccataggttccataaacttgcgcctcctcaaatataaagaataaaattatcctgtgattttttaaacaccgtgccgcctatgaaaagggatacaatcgcaaatgcccggcaaatagccacggaaccgaggcttggataaaccccgtcggcaacacaacccctgaatgtggtaatgtaccagtacatagggttcattctgccgatatattgcaaaattgtgccgttccaaattgtctccgggtagaaaatcggtgtggcgtacataagagcctgtaagataacccgccaaaaatgcataacatcacggaaatatatggccgccgatgccaaaaacagccccacgcccaggcagaagaaaaacagaaagaaaataggtacaacggcgaaaatcgtactgccgtatataggcgcttttgttataaccataatcaaaataagtgccaccaaagagaataccaagttcacaaaggaaaaacagcttttttccaatgggaaaatatactttggcacataaacctttttaatcaaagcggaagaaaacagcacactgcccatggcacttgttgtggattcattaaaaaatgtaaacagaagctgaccgcagagaaggtaaaccgggtagttgggtatatccgatttaaaaaatcgtgagaaaaccgcagccattacaaccatcatcaaaagcgggtttaaaacgctccacaaaatgcccagtttagaacggcggtattttacctttatatccctgcctataaggtttgagagaagaaagcggtacttccaaaatgttttaaattcctctttcattatcaatacctttcaaaaaattcaaatttctgccgagcaaacggaatgtgttttttgtccttttcgcttgtctttatttcgcagtcaacttccggccactgtacatttacagtcgggtcatcgtagggaataccgccctctgcattggggttgtaaacatctgtgcatttgtaaacaaattctgcctcgtcggacaaaaccaagaagccgtgggcaaaaccctcgggaatataaaactgcattttgttttcgtcggtaagtgtaacgccgtaccacttgccgaatgtctttgaatttgggcggcagtcaactgcaacatcgtaaacactgccctttataactcttacaagtttgccctgagtgttttccgtctggaagtgcaagcctcttaaaacgccctttgagctcttggagtgattgtcctgtacaaattccttgtctatacctgcccgagcaaactcgtctttttgatatgtctccataaagaagcctctgtcgtcgccgaaaacagtgggttttattacaacaagaccgggaatttcatttttaataaattcaaactttgccatttttaattttccttttcattatatttatggggtgaaatatgccttcaccctgtatttggtcataattaaacactgtaatcttaccacaaaatagtatccttttcaacaaaaaagccctgtaaaccgcataagttcacagggtgttcatatttatgggggattataccccaagaatttggtcgggatttacatattttccgtcttttataatttcaaggtgaatgtggctttcatcatttacttccattgccacctcgcctgcggtgcctatggtctgtccacgggtaacggtgtcgccggcttttaccgctgtatttttatcaagtccgcaatatcttgcggtaaagccatcatgctctatttcaaccaccgtgccaagcaagccgtcatcataaaccgcagtcaccgttccggcggcgccccgtctgacccggtcccctttcggggttcttatgtcaacgccgttgtgggtgcgccaatcgtcaagggtgcggttgtaaacaagctcatctccggaaaaggctgcatatattttgccgccctctgccggcaataaaaatttttcctgccgccgtggttgtgccgccctttcgctctcggctttcggcggtgttacaggcttactttcaacaggtacatcatcttgcttgttttccgtttccaccgtttcatcaggggtttttggttcatttttttcttgttgccgtgctatattttgctgtctttgccgttcaagcctttcgttgatgttttttacggtgccgtagcaaaaaatgccggcaagggcaacgcaggcaagcatggcccgtgcaacgcctctgccctttattttttcgccaagttgcccgaatagttgtcttttcatatatttcctccgaatatcactgtttggtaatgtagatttacttatattctttgcagagtttaaagttttatacagaaatttaacaaaattaggttatacttcattcacaaggacaacaatatttaagttcatactttaaagggggattgtttatgtacaactgcggactaattttagagggcggcggtatgcgaggagtttacaccgccggagttatagattactttttggaaaagggattggaattttcttccgtttacggtgtttccgccggaagtataaacggcttgaactttgccgcaaagcagaaaaagcgtggggtgagagattttatatggttcagagacgataatcgctactgcggtttgaactattggcttaaaaccggggattatttcaacaatgaatttgtctacggggaagtgccaaatgccgtcgacccggtggactacgacgccgttaagaacaacccgatgaaattttacgccgttgtgtccaacaccaaaaccggccggcgggagtacattcccataaccgacgctaaaaaccaagtggactatataagggcttcgtgcagtttgcctattttgacaaagcccgttgaaataggggataaaacttacatggacggcggcatctgcgacagtattccccttgaaaaaagcgaatttgacggcaacgaaaaaaatgtggtaattttaacccaacatcgtgaatttgttaaaaagcctactgaaaatatgtcggtaatacgcaaaatgtacggcgaatacccaaatttcattcacgctttggaaacaagacacgagatgtataaccgtcagcgtcggcatgtatttcggcaggaggaacagggcaaggcatttgttattttgccaagccacccggttgatatagaccgtatggaacatgatgccggtaagctgtggatgtggtacgcagagggcaaaaaagacgctgcggcaagttatgacagattgattgagtatttaaacaaataaaacacaacgcaccacggccgtttaaacaaatccgtaaaaacgaacaacagaaaagtgccctcttgatgcagaatgtacatcaagagggatttattatgccgagaaatcatcaaaacccaagcaattaaatcggatttaccccatattaaaggggctcaaagttttattttgccttttttaatcgtgtatcaatatatactattgttgcataatatatactataaaatcaaattttgtggcaatctgtgaataaacggtaaataattatcattattgtttgcaatggccgaaatttggtgttatacttacatagcacaaaagaaatttatacaacagcgccagaccccacagggggtgacgaggactgcagttatcgaatttttcggcggatgctgcaggggccgtacggtccaaggtgtattttaaaatcctaaggtaacttggaaacagaggaatacaccgtgtaccttttgtgtttacaatacaaaaggaggtactttaccatgtgtggtatagtaggatatgtgggcaaacataatgcccagcaggttattattcaaggcctggaaaaacttgaatacagaggttacgattcatcaggtattgcggtaataggcaagaacggtatgcagagcgcaaagttcaaaggcagactttcggttttgtccgattatctcaaagatcacccattccggggcaatttgggcataggacacacccgttgggctacccacggcgttccaagtgatgaaaacgcacacccccattttaacgagaaaaagacaatagccgtaattcacaacggcattatcgaaaactatattgaacttaaaaatatgcttcttgaaaaaggctatcatttcagaagccagacagatacagaggttgttgctcacctgtttgacctgtactacgagggcgatttgttgaaagccgcctttaaagtggaaagcgtaatcaggggcacttatgcccttttggctattcatgttgacagccctaaggagtttgttgctctccgctgtgaggctccccttgttataggctacggcgacggtgaaaactttgttgccagcgatattccggctgttttagaatacacaagaaaagttgcattccttgaaaacggcgaaatcgctcacgtaacggcagacaatgttactgtttacaacacaaaacatgaaattgtcgaaaagaagccttttatcgtagagtggactctcgatgccgcaacaaagggcggttacgaccactttatgcttaaagaaatatacgaacagccacagggcattcgtgatacaataaacacccgtcttgacgagaacggctatatcaaactggacgacatcaagctgacaaaggatgacatcaataaatttgacaaaatttatgttgtggcttgcggtacggctttccacgccggctgtgtgggcaaatatgccattgaaaaattggccagaattccggtaatgtgcgatattgccagcgaattcagatacagcgacccatttgttgacgacaaaacccttgttatagttgtaagccaatccggcgaaaccgccgacacactgcgggctctcagagaggcacgccgcaaaggcgcaagaattttgtccatcaccaacgtggttggttcttctatcgcccgtgaaagcgacgatgtattctacacatgggcaggcccggaagttgcggttgcatccacaaaggcatacacaacacagcttgttgcattttatatgattgcccttaaccttgccttggcaaagggcacaataaccgaaaagagatattttgagcttatcgacagccttaaacaaactgcggacattttggaagaaatgcttaaatgcaccgatgacgaaaaagctgttgcccaaataatcaaagacaaaaaggcgctgttctacctgggcagaggcgtagatatgcagactgccaaagaaatggctttgaaattaaaagaaatttcttacatctatgcagagagctttgccgccggtgaattaaagcacggccctatcgcccttattgaggagggtacgccggttattgcggtttccacacagacgcctatggtggaaaaaatggtttccaacattcaggaagttaaagccagaggcgcttatgttatcggcataggctgtgagggcgacaagcttcttgccagcgtttgcgacaaggttatttacattcctaaggttgacgaccttcttgctcctcttgtaagcgttgtgccaggtcagcttattgcttactacacaacctgccttaaaggtcttgacgtggataaaccgagaaaccttgcaaaatccgtaacggttgaataatttataaacacactcaccccgattttaaaagtcggggtgattttttacggtattttccccataaaattaacggaatgttaattgcaaaattcgccgtaattctgtataattttatcaaaagatattttatttttaatgggagttacggaattttgaagaaaaaatttttgattttactttttgcactgacatttgccttatccgcctgccaaaaacagcctaaggaacaggaagtttacaacccatatatagaagtgcctttcggcaacgagggggtaatttccattttgccacaggaaggagttccccttgcaaattacaatcgggaaagttttaaaaaggacgataccacaaatgttataacctacaccggcaatgaataccaacagttaaagggaattgatgtgtctttccaccagggagatatagattggaaccgggtcgccgcagacagcgttgattttgcctatatccgcatgggctaccgtggctataccgagggaattttacatacagatacaaagttttacgacaattactacggcgccaaaaatgccggtctgtccaccggggtttacttttacagccaggctttgtccgtagaggaagcccgccgggaggcggaatatttagccgatgtaatggcggatatacccgttgacctgcctgttatttttgactgggagataaactataacgagggttcccgcacattggaggcggatatatcccaagtaaacgattactaccgggcttttaaagatgttttaacagccaaaggctatgaaaccggcatctatttcaatcggtttttaggctattactcccttgattttgcacctttgcagggagatgttctatgggcggca

SEQ ID NO: 2463 - DNA, 6524 bp, Unknown
  16S sequences of unknown bacteria
ccatcgtggtgaaaaacatccaccctgtggtacgcacctggaaagcgcccatcaccattgcccgccatgcctacggcgacatctacaaagccgctgagtaccgtgtgccgggggagggaaaagcggagctggtgttcaccgataagagcgggcgggaaaccttccgcgagaccatttacgatttcgagtgccccggcgtactgcaggggacctataacaaggatacttccatctgctcctttgctcatgcctgcttccagtatgcgctgaacctgaagcaggatctgtggttctctgccaaggacacgatctccaagcagtacgaccaccgcttcaaggacatttttgctgagctgtatgagcaggaatacaaggcccgctttgaagcggcgggcatccgctataagtacatgctcatcgacagcgcggtggcgggcctgatgcagtgcccaggcgggatcctgtgggcctgcaaaaactacgacggcgacgtgatgagcgacatggtgtcctcggccttcggcagcctggccatgatgacaagcgtgctggtgtcgccggagggcaagtatgaatacgaggcggcccacggcacggtgcaggatcattactaccagcacctgcaggggaaaaagacttccaccaacccggtagccaccatatttgcctggaccggcgcgctgcgcaagcgcggcgagctggacggtctggacgctctgtgcgcctttgccggccatttggagcgggcggctctggacacggtggaggacggcgtgatgactggcgatctcgcgccgctgtgcgatacgccggtggaggctgtggacacggacacgttcatggcgtctatccgcacacggctggacatgcggatgcagagcgcctgaagctgggaaaggcgcacgctttctcagcggaaaacagggtaaaacgggggacagcggtcccccgttttaccgtaggagtgttgtatggaacggaatttgaccaacggcagtatctgggggaatattgtttccttttcgctgccatacctgttttcttattttttgcagaccctgtacggcatggccgatctttacattgtcggccagttcaatggcaccgctcagatcacggcggtgtctgtgggcagtcaggtgatgcatatgctgacggtgatgatcgtggggcttgccatgggtactacggtgtccattgcccgggcagtcggtgcgggagagagcaggcgcacctcggccatcgtcggaagtacgatcacactgtttatggtggtggcgctggcggccatggcgttgctgctggtatgtgtaaaccccattgtgacgctgatgtccacaccggaggccgctgtggcagggacccggcaatatctgaccatctgctttgtagggattccctttatcacggcctataatatcatcagttcgatcttccgcggcttgggggattccaaaagtcccatgtattttatcgcggcggcgtgcggtgccaacattgccttggactacctgttcatcggcgcgttgggcctgggcgcagcgggggcggcgctgggtacggtgctctcgcagacgctcagcgtactcattgcccttgtgacgatccggcggcgcagaagcggtctgcagttaaaaatgggggatctgcggccgcggaaagctgtgctgcgcccgatcctccgggtgggcattcccgttgcactgcaggatggttttattcaaattgcgtttattgtcattaccatcattgccaaccagcgtggtctgaacgatgccgcagcggtggggatcgtggaaaaagtgatcggaatgctgtttctggtgccttcgtccatgctttccacggtgtcggctatatcggcccagaacattggtgcagggaggcatgaacgtgctgccaaaacgctgcgctgcgccattctgatctgcgttctgtttggtgctgccgtggtggtgctggtgcagaactcggccgaatccattgtggcgctgtttgacaggagtccggccgtggtgcttgccggtgggcagtatttccgcggatatgtgtgggactgcatttttgccggtattcacttctgcttcagcggctatttctgcgcctatggccgttcggatatttcctttttgcacaatatgctttccatcgttctggtgcgcatccccggttcatatcttatgtctgccctgtttgtcagcacgctgctgcccatgggctttgcggctccggccggctcgctattgtccgttttggtctgtctgattgcttttggctggctccggcggcggcataaactaggatagaagatgaaaaagcaagtgcgcggaggcccatatggacctccgcgcagcctgtttagggaattctcagtgcccgcaatatttctcgcgtttcttttgctgctttttggaagtgaaaagccgcctgcaccgttttttcagcagctctttttcgcagatttccaggtgatgtggagcaccttcggtatgaagattcgctgtttgccggatcagggcagaaagaagcgatggtttgagcgcatagtgctgtgcggttttattcaaaaatttttcaaaaagtacgctgcctttttcggccggaacctcccgcagtgcgcccctcagaaccagcaggttctgaggggcgcactgcgcgcggcagcgatccgtgcatttgtttgccatcgttttcgatgtgcctgttctgaggctcattcttcacagagagtatgatagtaaacgataatatcttcgtattccccgcgaatattaaaaaaaccgccgggaatccgacccagctggacgaagttcagcttttcatacaggtgctgtgcgccatggttgctggccactacagcgttgaactgcaaaatatggaaccccaatgctttggcatggtgcagacagtcccggaccagggcctcaccgatgtggttgccccggtgcgtgctgcttactgcaaaactggcattggcaatatggctgcagcggcctatattgttggggtgcagaatgtaaagccccacgaccgcgccgctttcggcctcctgtgccacggcgcagtgagattgttctgcgaaaaaggatgctgcgtttggggcttccagcgtttcaagctgtgggaaagcctcgccctggcgcacgacttcgttccagatttctgccatagcggacaagtccgcagtacggtacgggcgtatgtaaatctgcatcattgtatgcctcccaatctgtgtaagttgatttatgaaacagtgtaacgcggtcggaaaaacaggtgcaatgagaaatgccacagaagaaaaaagcgcccgtctgcggaaagcaaacgggcgcggggaatcagagaaatccctctcagcccagcagcgctttgtcgctggcaaaggcttcgccggaaatcttttcaaattcatgcatcagatcttccacggtcaatttctgtttttcatcgccgcggatatcgaggatgatacggccgtcgtgcatcatgatcaggcggttgccgtgggcgatagcgtcacgcatattatgggtaatcatcagcgtggttaaatgatctttgctgacgatacgatccgtggcgttgagcactttggcagcggttttgggatccagggcggcggtatgctcatccagcagcaggagcttcggcttgatgagggtggccatgagcagtgtcagtgcttggcgctgaccgccggagagcaggccaaccttgctggtcagccggtcttccagaccaagccccagggttttcagcaattcgcggtattcgtcgcgttcggcctttttgattccgggcatcagcgtgcgcagcttaccgcggcgcttggccagggccaggttttcttcgatgcccatggtggcggcggtgcccatcatcggatcctggaacacacggccgatgaatgcagcgcgcttgtgctctggtaaatgcgtgacgttagcgccatcgatgagtatagtgccctcatcgatgggccacgcgccggcaatggcgttcatcaaagtgctttttccggcgccgttgccgccgatgacggtgatgaagtcgccgtcttccatggtcagattcacaccgttgagagcgtgtttttcattcaccgttccggggttgaaggttttgtagatcccttttacttcaagcatggttcaccgctcctctctttgcgcctttggtgaagaatttgctcttccagtaaggcagcgccaagaacagggctaccacaatggcggacagcagcttcaggtcgttggagtcaatcagcttggtccagaggattacctggatcacgacataatagataatggagccgaatgccacggagagaagtttcagcgcaaaattgcggaaaattttgctgaatagtacttcgccgatgacgacggcagccagaccaatcacgatagagccacggcccatgttgatgtcggcaaagccctgatactgcgacagcagcgcgccggacagtcccacaagaccgttggacaccattaaacccagcaccttggtgaaattagtgttgatcccttgggcgcgagccatgttctgattggcgccggtggcacgcagggaggatcccatttctgtgccgaagaaccagtacagcagcgcgatcacggccacgaggaaaactgtgattatgaccagcgggtttttccagaaagggatttcggtgttggtcagatagcgcaaggaagtcagtagatcatatttgtctgcactgatggccaggttggctccacccagaatccgcaggttgaccgaccacagagcaaactgtgtcagaataccggccagaattgcgggaataccgaaagcggtgtggaacaaaccggttaccagaccggccagcatgccggcgatcagcgccatcaggattgccagccacatgggacaaccaccgatgatcatcaccacgcacacagcgccgccggtgcacagtgtgccgtccacagtcaaatcggcgatatccaggattttaaaggtgatgtacacgccgatggccatgataccccagatcagtccctgggatactgcgccgggcagcgcgttgaaaagtgatgcaatgttcaagaaaaggccccccttggtgttgatgttcgtttgcgggaaaagcagcgcgagaggatttaagcccttcgcgctgctcttgcgttttcaggtgttttccggattatacttcggtttccaaagcggtatagtcatcgggaacagtgatgcccagctgttcgcagacagaaacattgtacagcttgctgacattgggagcatactctacttccttggtggtgatgtccgtgccgttggccaaaatgtcgtaggccatggtaccggcctgataaccaaggtcatagtaatcgatggagagagtggccacaccgcagccgttgcagataccctgctcgccagcgattacgggtactttggcggggagaaccacattggcgatcaattcggtgttggaagcggcggtgttgtcggtggggatgtagatcacatcagaagcgtcgcaggcactttgcgtaactgcagccacatcgttagagtcggtgaaagagaaacgctcacaggtataccccatttccgtgaggtagccctcgatggtgtccacctgatatacggagttgggttcggcggagcagtacaggaggccaaccgttccggcgtcggggaacagttcctgaatcatctcggcctgctggtccagaggagcaagatcggaagtgccggtgatgttgcggccggtggtgccggtccagtcatcaatggccagcgcagtggcatagtcggtgacggaggtgccaataacgggaatcgtgtccgttccggcggctgcagcctgcaggggtgcggtggcatttgccaggatcagatccacattgctggacacaaaaccattgataattgtagcgcaggtgggggagtcgccattggcattctgctcggtgaactccacattgccttcacccagcatgtcggtcagagctgctttgaagccttccgtggcctgatctagggcggggtgttgcacatactggcaaatgccaacggtatagtgctgtgcgccgctgtcgctgccggcattggaagggtcagtattgttgttattgccgcaggctgccagggacagcatcatggctgctgcagaagcagttgcaagaatgcgtgtggatgttttcatcttttcttcctccaaacaagtattgcaagctttttcactttgcgttgttaaagtgtattataagagccttgtatccaaaagtcaagctgttccaacaaaaaagttcatgctccgggagatcaggcagcccatgaaaaaaagtccttgacaaacggacccgctctgactataataatccaagtgatcagttgaactaaaaaatgcgagtgtgctggaactggtagacaggcacgtttgaggtgcgtgtggcgacgccgtacgggttcaagtcccgtcactcgcaccagctgattcttcaatttatatatgcgcgagtggtggaattggcagactc

SEQ ID NO: 2464 - DNA, 19096 bp, Unknown
  16S sequences of unknown bacteria
gcggtcgctttatataaaaggaaaaatcgacgaaagagaaacgcgataatccgagaaaaggagaactgaaatcgacattttttatcatcttcgacaaacctcgccttaaatgcttgctaaacagattggtttttgttataattattttggtatatgaacaaggtgctgttttgtccgaaagcgtcggctctgaaaagctcgctccattttccggataaaaaagttccacatatacttatttctatcgaggattgacgcttaaagtggattgggaaacaaagcggactaattttctatattcatagagcgatgaaaaaagacggggcaggtacctgccgttagattactcgtacccgaacccatgttcccgcgcttcaaagaggcggataacaacggaattggaggaatctcatgacgaaacgaaaaaaggatattacgggatacgagtacgatgaactgatgagcactctgcgggtgagcgtcagtaagcatttcttggacgaatcgttcagcctggtatgggcaaacgattattattatgagttgattcgttatacgaaagaggaatatgaagaaaaattttataataatcctcagctctattatacatatcatcactttgaaagcgaactggaaaagatacgagaagccgtaatagaggcactcgcggcgggaaagcacggctatgctatcgtgacgcgtatgccgacaaacggcggcagctatctttgggtgcgtttaagcggcagctttacggacgaatatatcgatgggaagcaggtttcctatacggtcatgagcgatattgacgatctcgtgaggatgcagaccgagcaatcgatcacctacaataatattcccggatttgtcgcgcgctttgcggtcgatgaagaaaagcatttaaagctcctgtatgcgaacgatcattttgtcggattcttcggctgcaataaacctctcgacgaaacaaacgacgtttttttgaaaaatatcaaactgaacgccgaaaaaatcgatgaattgtggccgctgatcaaagagggaaagcccattcgttttctcgcccgcgttgaaaaccgaaagggggatactctttggatgcaaatcagcggcgaatgcgtggaccgaattgccggtcagttcatttatctgcttatctatatcgacgtgacggatgtgacgggtctgagggaaatgcagaaaaaactggaagccgccttagcggccgaggaaaaggcgaatcgcgccaagacggtctttttatcgcatatgtcgcatgacattcgcacgcctatcaacgggattatgggaatgacggatattgcgctgagaaatatagacgatcgggcaaggatctccgattgtcttgctaaaatcaattccgcctcccagcatttattggggcttgtgaacgatgtattggatatgtcgagaattgaaagcggaaaagtgcagatcgacgggaagcctttttccgttctaactttgctcgacggatgttgcagtgtcatcatggggcaaaccataaaaaaacaaattactttacagacggatttctctcgtttacagcaaacactgctcaaaggggacgagctgcatttgaggcagattctcatcaatattctcggaaatgccgtaaaatttacgcccagcggcggaaaagtgatgtttacggcttcttctaagaagatttcggacgcggaggcggagttcattgccgtcatccgcgacaacggcatcggcatgagcagagaatttcaaagcaggatattcgagcctttttctcaggaagaggaaaacggcagcagctatcgcggaacgggactgggaatgtccattgtcaaacagctcttggaactgatggggggaaagatagaagtaaaaagcactcccggcgagggaagcacctttacggtccggctgcttttacccgttgacaccgaagaaagaggtgaaaagggagaaaagaattttgctgaggatctgacgggaatccgtatccttttggcagaagataacgaactgaatatggaaatcgctctgtatcttctcgaagacagaaaagcccgtgtcacgcccgtgtccaacggcagggaagccgtggatacgttcgtcaaaaatccccgcggcagttttgatattattttaatggatattcagatgcctgtcatggacggctacgaagcgacccgaaaaatacggagcgtcaaccgtcccgacgcaaaaaagatccccatcatcgccatgacggctaacgctttcacggaggacgttcaagcggctttggatgcggggatgaatgcgcatattgccaagccgatcgatgtcaaggctctgtatgcggaaataaggaaatttatttcggaagaagattataaagagtgaatttattgtttaaaaaggcgtcttatttcaaaagacgccttttgtatgttataaaagtacaagttcgtcgattacgcagatccccttgcggcgcaattgattagccataaaacgagtttcggtaatgataagcgtttccagttgcgtcgaaaaggcttccgcatcggattcttccaaatgcttatataaattatctaagccgacggaataataggtttccttttggcgcttctcttcatcgggtcggcggagcggatacccccaaaaaagaagttttaacagctgcccgtaaatttgccggagcgcgcgacggggggccagctcggagagggactttatacaagtgtaaatcatcagatcggggcgattttgacggcgaatcccttgcagagtctgtttaaagtcgttccaatccttttcattggccgacgacagcgagagttttgcgacagatttacaggagagcgacaatagatgcaagctttgcaggcattcgagcaaacgattttgaacgaggggattagcgaaatcgcagacgatagcaactttttcggacgccaccacttttgagccgtagccgttaatcgattccaccacgcccagacgattcaacaaagaaatcgtccttcgcacggtactgacggaaatgccgtttgtttttgctaaattttcaagggatggcagtttgcttcccgcggggtaaaaatttttcgcaatggaaataagtaattctaagccaagagaataacagatctgagaagtctttttatgtacagaccatcgaaaaggaatttccgcttctttaaaagaagtgtgaattttctctcgataaaatttatcgatcgcccgggcgagttgatcctgagagttttctaccgcctcgcgcaatccctgccaatcctcgcgacgcttaaaagaaagcatattggaaatcggtgaattatttttcgcgtcaagataatcgagattttcgacaaggcttaaaaacggcgcctgacgaaacataaaaatttgccacacaaggcgcatcaaaagttcgtttcccaaattgccgtaaatgatttgaaggatctgcatatttgcttgcggcgtatcgtactttccgctgtgcgcgagaagctcgattttatccagttgaacggacgaggcgatcttcaatcccagccattgagctttccccaataaagggcttacggacgaagcgacgtccggcaaagaaacgcggcgtttagcaaaaaaatcttgtatattttcttcgatttcttcttgcgtatacttcttttgaacgacggcgcccgtcttttttttcagagtgatatagccctcttgctgcatttgaagatacgcttcgcggagtgtatcgaaagacacgagaaaacgggtgtttgcctcttcgagaagggggagctggtcgcccgctttatagacaccgaattttatttgagtcgtgagtacactatatacgacgcgatacaaacttaattctttaaacaacggcgacctcctatgagcagatgcccgatttttatgatttcattatagcacggtttaaaaaaaatttccacattttcggttggttaagagcaaaaatcttaaaagtggtaataattagaaaaaatatttttcaactcttgttttacagaaatatgataaaatactcctccgcgtgctatgtaggcggaggagtattaaaagattttttagagttgaggaaaagaaaaaacaatccgaaaccattataaagttactaaatggttcgaattgttccgatttggtgccgctggccggagtcgaaccggcacggaggattagtccaatggattttgagtccatcgcgtctgccaatttcaccacagcggcataaaattgaatggaattgtgaaacattaatattatatatgataccgaaaaaaaaatcaactgttttccttattcttttttgactttttttcaatctttttctctttcccttgcgattttttttatttcgtggtacaatgataacaagaaatttaaggaattctttttatggataaattagtattgattgacggcaatagtttactcaacagagcttactacgcaaccccgctctttacggcaaaaaacggactgcccacaaacggcattttcggcttcataaaacttttattgaagctgatttccgataaaaagcccacctatctcgtcgtggcattcgatctgcacgcgccgactttccgccacgaaatgtacgccgattataaagcgggaagaaaaccgatgccggaagatctcgtcgtgcaggtcccggttctcaaagaagttctttccctgatgaaaatcaaaatctgcgaaaaggaaggctacgaagcggacgacgtcatcggaactctggcaaagcaattcgatcttccaacgtatatctatacgggggacagggatgcctatcaactcgtggacgacacgacgagcgtgtgttatacgcgcaaaggtgtcagcgatattttggaactgaatcccgaaaatttttatgaagaagtggggttgacgccgccgcagatcatcgatttgaaatctttaatgggcgataagtcggataatatccccggcgtaccggggataggcgaaaagtcggccatgcagctcctcgcgcagtatcaaaatctcgacggcatttatgcgcacctcgatgaaatcaagggcgcattgaataaaaagttatccgaaaataaagaatccgcttatttttcgcgcgatctcgccaccatcgacacggcggttccgctcaaagtcactttatcggagtgcgtattgaaaatgcctttttcgcacaccgttcgggaaaaatttgccgaactcgattttaagagtatggttacattgtctgtcttcgaagacgaaaaaacgcaaagtcagcccgacagaaaagaggaggaacaaatcgaggcaatcgcagaaaagttccccgcgaccatcgaagaggcaatcacgcttttccaagcctccgaagccgacaacgtgacctgttgctggaacaacgagggattccgtttcttttttgacgacggaaaaaaggaggaaatcgttttgccgattaaggaaaatctcctcgatatcggcttctttcttcattcggtaaaacccttgctcgaagctatttttttgagcgaaaaaacggttgttctctataactccaaggaactcaggcatcgcttagcggagctgggaatagaattttccgcgccgttcgaagacgtttccctgatgaaatatatcgccgaaggaatcggcaattccgatacgctggacttttgcctcaattattattctctgcccgtgcagaacaaggcgtacggcatctttcgtctttaccgcattttctgggaaatgttgaacgatgccgaaaagaagctgtaccgcgatatcgaacagcctctttcagtcgttctgttcgacatggaacagacgggagtctgtgtagacagagaaacgctaaacgaattttctttaaaatacaataccgaactcaaacagctcaccgaaagaatctataccttggcgggggaacaattcaatatcaattcgcccgcgcagcttggcaaaattctttttgaaaaactgaaaatcggcaacggtgacacccaaaagagcaaagcaaagaaaaattacagcactacggcggaagtgctggaaaaatacgccgaggactatgaaatcgtgcgtctgctcctgcgttacagacagattcaaaaactcaattccacctatgtggagggattcaagcctttgatttccgaaggaaaagttcatacgacctacaatcagatgaatacttccacgggacggctttccagcgccaatcccaatcttcaaaatatacccgtccgcaacgaagagggaaaagagcttagaaagctcttcaaggcttctcccggcaatgtactcgtggatgcggactattcgcagatagaacttcgtctgctggctcatttttccggctgtaaagagcttatcgaagcctataaagcccataaagacattcattctattaccgcttctcaggtcttttccgtgccaatcgaaaacgtgaccgcgcaaatgcgcaggggagcaaaagccgtcaatttcggcattatttacggcatcagttcgttcggtttgggaaaagatctctctatcagcgcgaaacgcgccaaagagtatatcgataaatatttcgaaacttattccgacgtcaaaaattatatggacaagaatgtggaaacggctaaacgggacggctatattaccacgctatttgggcgcaggcgggtgataaacgaattaaagtcctccaaccacaacgttcgttctttcggggaacgcgccgcaatgaatatgccactccaaggttccagcgccgatattatcaagatcgcgatgatcaacgtctataaaaaattgaaagacaaaaaacttcgcgcaaagctcgtactgcaagtgcatgacgaattggtcatcgactgcccgacggaagaacaggaagtcgtatccgaaattttacaaacggaaatggaaaacgcagtcaaattgaaagttcctctcaccgtagaggtcggcatcggtaaaaattggtatgccgctaaataactcgtcgaaaaaggcttaatgtttcacgtttattgtttcccgattctatttatgaaaccatactcgtgaaacataattattaactgtttatcttggggggattccctatggaaaaaatctatattgccattaccggcggaatcggaagcggaaaatccagcgtagcggagataatccgaacgatgggatttcccgttttttcctgcgacaacatcaatcgggaattaatgaaagacgcgaagtatatcgaagaaataaaaatactttttcccactgcaatcgaaaacggaaaaattgtcaaagaaaaactggcaaaactcgtatttgacgataaacaagctctaaaaaaactgaacgccttatcgcatcctctgattatgcaaaaactgcgagagcaaatggaaaaagaagactccaaattcgtgtttgccgaagtgccgcttctcttcgaaagcaattccttaaattattttaaccgcgcgatcgtcgtcctccgaccaagagaagagcggatacgttccgtaatggaaagagataagacaaaacgctccgacatcctatctcgaattgaaaatcaatacgactacgaatgtttttattcacctcagtataaagaggaggataaaattcttttattgaaaaatgacggagatttttcatttctcaaaaaacaaacagagggaatcctgcgcactctttttaagtccctcgcgtgaaactatacttgtgaaacaaaataatagcgggatacgcaagaatatctcttcactgataaaaggaggctaaaaacctccttttagtatgcatggcataataactatgttaggcatatgttaaaaactactttatacataatatctacttctaaaatacctatattactacttcacacatattatatatgccacgcatagtaatttgtgacagtcgcctgctcctcgcattttgcgtgttatctttacacatactgataggtagtggctaaatatcggagaagggtagacttccgagtaagtgtatctctatttttttcataagcgtcggcaaaaaaacattttgagctgaagagagcaaaattgatacgacgtcatctttcgagtaaaaaatgcgcaattttttagtttttccatttaagtttccgatcaattcggtttttcaggaatagttcgggcgatttttagaaaatttttaaggcttgccgtcggaattgataacgcacgtttttgcgcgtttttcgttcttaaaaaaagagaagaccttttaaaaaatgtaaaaacgccattccttgacaattatgtggaaaaaaattgtaaaaaaattaaaaaatttttcattttggtcttgaaataatgaaaaaagtgtagtataataaagcctatgaaaagagtacgccgttttccgctctgctttggaaattaaatgcgtaccgaatcgctgcttcttttttcaaatttttgtcattatgatattcattcacaattttcgaaaaatgaaacaagctttttccttttttcggtcttagcccttcaaaaatccaggagatattgaaatgagcgaatcccagacaagttttcctttgcatctttttcatcacggaactaattttaaagtttacgaaacgatgggggcgcatcccgccgtccacaatcggaaacacggttatattttccgagtctgggcgccgcacgcgaaacgcgtttccgtcgtcggtgacttcaataaatgggataaagatactcacgtgatgcaaaagctgattgatcaggaaacgtttgagctttttattcccgatttaaaacagtacgatgtttataaatattgcatcgaaacacaggacggacgctttttatataaagcggatccgtatgcttttcatgccgaaacgcccgggccgggttcgccgaacgcgtccaaattatacgatttgtccggtttcaaatggacggataaggaatatttggacaggctggggcataagaatatctatgcttctcccctcaatatctatgaggtgaaccttgcgtcctggaaacttcacgaggacgggcatccctatacctatcgggaattagcgaaagatctcgtggaatacgtgaaatcgatggggtatacccatgtggaatttatgcctgtcacggaatatcctttcgacggttcgtgggggtatcaggtgacgggatattacgccattacgtcgcgccttggaacgccgcacgattttatgcatctcgtcgacgcatttcacgccgccgggatcgggattattctcgattgggttcccgcgcattttcccaaggacgaattcggtttatacgagtttgacggcgagcctctgtatgagccgtcgcagtgggacaggatggaaaatcgcggctggggcacgagaaaattcgattatggtcgggaggaggtgatgtcgttcctgatctcggacgcgatatttttctttgagaaatatcacgtcgacggactgcgtgtagacgccgtggcgtctatgctctacctcgattacgacaaaaaaccgggcgaatggataccgaatatctacggcgacaataaaaatctcgaagcggtggcgtttttgcgccgtcttaacgaagccgtattcgggtacttcccgcacgccctgatgattgcggaagaatcgacggcatggcccctcatcacccgccccacggacgtaggcggactcggcttcaatttcaagtggaatatgggctggatgaacgatgttttatcctacctttccaccgatcccatctatcggcagtacaatcacaacaaacttaccttttccatgatgtacgcgttctcggaaaattatattctgcccatttcacacgacgaagtcgtacacggaaaagcctctctcatcagcaaaatgccgggtagttacgaggacaagttcgcgggtgtcaggtgttttatgggatatatgatgtcccatcccggaaaaaagctcaactttatgggcacggagttcggtcagttcaaagaatgggattacagcgaaggcgtggaatttttcctgaaaaagtatccgcttcacgaaaagctctccgaagcgatacgcgatttgaatcgtttttatctcgatacgcccgctttctatgagatcgaggattcctgggacgggtttgagtggctcgcacccaacgacgccgacagaaacttcatctcttatatccgcaaggacaaagcgggaaatcagatcgtggttcttctcaatttctccggggtggaattgaccaattacacgctcggcatcgaaaagggcaaatatagattgattttcaacaccgattccgtaaaatacgggggcagcggtacattgaaaaaacgtatttttacaacgacgaaaacgccgagtcacggcaaggaatattccattcgtatcgatgttcccaaactgacctgcgtgtatttgacaaaaatagattaaagtatatccgggggttttatcatgcagagaaaaaaagaatgcgtcgccatgcttctcgcgggcggacaaggcagtcggcttttcgcgctcaccaataacatcgccaaaccggctgttgctttcggcgcgaagtatcgtatcatcgatttcccgctttccaattgtatcaattcgggaatcgatacagtaggcgtactcacccaatatcagccgctgattctcaacgaatacatcggcaacggacagccttgggacctcgacagagctttcggcggcgttcacattctttcgccttatcaggcaaagtcccgttccacttggtatcagggtacggcaaacgcgatctatcagaatatgcattttatgaaaatgtataatcccgattatgtgctcgtcctctcgggggatcatatctataagatggattatgccgccatgctgcgggcacatatcgaaaagggggcggactgcacgatagctgccatcgacgttcccttaaacgaggcgtcccgcttcggaattctcaataccaatcccgacggctccatttatcaattcgaggaaaaacccaaagcgccaaaaagcacgctcgcctcgatgggaatttacatttttacggcaagtaagctttttaaatatctcgaagaggacgacgccgatcccaattcctccaaggatttcggaaaggacgtgctgcctgcgatgctgaacgcgggcgaaaaaatgtattcttaccttttcgagggatattggaaggacgtgggcacggtttcctcactctggcaggcgaatatggatctgctcggcgagccgccggcgttcgacgtcaacgataaatcctggaaaatacattcccgcaacccgctcgccccgcccgaatatatcggcgagaacgcggtggtaaaaaattcgatggttgcgctcggctgcgaaatagagggaactgtggaaaattccgtactcggcagcaacgtcgtcgtcgaggcgggcgcggtcgtcaaagacgccgtagtgcttgccaacagcgtcatcaaggcgggcgcctccgtttcctattccatcatcgacgaaaacgtgattgtcggaaaaaacgcggtgatcggcgtcgaaaagaatccgaaggcggaaatcgtcgtgctcgggcgggaaattgccgtgggcgacggcgtgaaggtcctgaacggacaaaaaaacgaaaaagacatcttggcataagggaggaacatatactatgtcagcatcggcagtcggcgtcatcttttcaaatttgcacgaagaaaacgtgcccgaactcgtccgcagaaggacgatggcttccattccgttcggcggaaggtaccgcctcatcgatttcccgctctccaatatggtcaatgcgggcatcatgacggtagggcttatggcaaataacaactatcgctccctgatcgaccacctcggcagcggcaaggattgggatctcgcccgtaaagacggagggattattttgctgcctcccttttccgacgagagcgaaaagctctacacgacccgcctggaagctttgaaaggattgacgagctttttgaacaggcgtcaggaaaattacgtggtcttttccgattgcgacggcgtcgcacggatgaacatatcggatattctcgcttatcaccaaagcaagaacgccgacatcacgatggtcactcattacgaggacgtcgtaaaaacggccaattacatgattatcggcgcggacaaagagggacgggtgaacgaagtcaaaatcagtccccgcatacgcagcaaaacgaaggcggacgtctacgtaaacgtaatggtgttcaatcgccagttcctgttgaatctcgtcgaggatgccgtcacacacggatatacctgtttcgagagcgacatcgtcgccaaacagctggacagtctgaaaatttatcgttatgatttccgcggctactacgcgggcatcaattcgatggcggcatattataaacacaatatggagcttctcgaaaagaccgtccgcgacgagctgtttggagcgcgcgatatctatacgaaggtgcgcgacagcgcgccctcgaaatacggggaagaaaccgtcgtcaaaaattctttgatctccgacggctgcgaaatagaaggacgagtggaaaattccattttgttccgcggcgtcaaagtcgcaaaaggcgcctgcgtcagaaattccatcatcatgcaggataccatcataggcagcaacgcttctctcgactgcgtaatcaccgataaaaacgtcgttattgccgaccgccgcaaactcagcggctgcgagctgcttccctattttatccaaaagggaacgatgctgtaagctttaaaaaatctaaacacaacattttatgtcagacatatatattatgtctgacataatgataaaagttttaaaagggaggaatacaaatggccgaaacgaaaaccacaaccgttaaacccgcagcgaaaaaaaggacgaagaaatccccgatagaaattttggcgaaagaaaaggaagcggaatttccgataaaggacaagaaagaggaactttgtgtgcgaccgaagaaaaagatccttttcgtcgcgtccgaagccacgccttttatcgcaacgggcggtcttgcggaggtaataggctcgctctccaaagcgctcgcaaaggatccgatttacgacgtaagagtggtgctgcctctctattcggacatcaagacggaatatcgtcgcaaaatgtctttcctcggaaatattttcgtaccgttatcctggcggaatcagtactgcgggatcttttcttatgaagaaaacggcgtcactttctattttctcgacaacgaatattacttcaagcgaccgggctgttacggatattacgacgacggcgaacgctttgcgtttttctcgcggagcgtcatggaaatactgccgtttataaagttctatcccgatgttctgcattgtcacgattggcaggcggctgcggcaatactctatctcaaaacgatttattgctatcgtcccgagtatcagtttatccgcgccttgttcacgatccacaacatcgaatatcaggggaagtattctctcgacattttggaagatctgttcggaatttccaacaactatcgttatcttttggaatatcagggctgtttgaatctgatgaaaggggcgatcgagtgcgcggagaagttttcgacagtcagcccgacatacgcgcaggaaatcaaatcggcgcagtatgcgcacggtctggaagacattatccgaaaaaacgcgttcaagctttcgggcatcctcaacggcatcgacgtagattcctataatcctgccacagacccttctctgttcgccaattacgacgcggataattttaccaataaagcgatttgtaaagcggaacttcaaaaaatgctcggtcttcccgtaaagcaagtgcccgtcatcgccatgatttccagactcgtttcccataaggggctcgatctcgtcaaagcggtgatagaagacgtattgcaggacgacgttcaattcgttcttttggggacgggggatgcgatttatgaaaactatttcaaggatttaggacgcagatacacgggaaaagccgtttccgtcatcgcctttaacggcgatctttcgagaaagatctattcgggcgcggatattttcctgatgccttccaagagcgaaccctgcggattgtcccagatgatcgcttcgagatacgcgacggtgcctctcgtgagagaaacgggcgggttgttcgacagcatcaagccgtacggctcgggcggaaacggattcacatttgccgcttacaatccgtatgatatgttatatgtcatccgcgaagccataaaagtgtatagaaatcccgacgattggcaatctttaatgaagagggcggcaacgacggacttttcctggcagcattctgcggaacaatacaaaaagctctacgacgatactctcgttttgaaaaagtaacgcgaaatcgccccgacgctcatacggcttgacaagtacattcccttgtgttataatactgcggaatgaatcaggagtgaataaacggacatgaataaaactgaaatcaccgaactcgacgccaaggagctgataaagggaaagctgtcccgctatttcggcgtggcgccttcggaggcgagcaaagaacagctctacaaagctgtcgtgatgagcgtgcgggatatcatgctcgaaaaaagacagaaattccacattgaaaccaaagcaaaaaaagcaaaacgagtctattatctgtgcatggaatttctgatggggcgttctctgaaaaacagcgtgttcaatctcggcgtcaaagaggcgttcgacggcgcgttgaaacagtacggaatgactttgcccgaattgtacgagttggaacccgacgcgggactcggcaacggcggcttgggcagattggcggcgtgttttctcgacgcgctggcgacgggcgattatcccgcgatgggcttttccattcgctacgagtacggcttattcaaacagaaaattatcgacggctggcagacggaactgcccgacgtatggcttcccggaggcgaagtttggctcacgcagcgaagcgataatatctacacggtaaaattcgacggctttgtggaagaaaaatggacggagcacgggcttgaaaccatttaccgcaacgccaaggaagtgcaggcgatcgcctacgacatgatggtggcgggataccacagcaaggcggtttccgtcttacggctctggaaagccaaatgcgttcagaattttgacatgaagctcttttcccaaggcgattacaacgcggtcatgcaggaggataacgaagcggagctcatctccaaagttctttatcccgcggataatcacttagaagggaaatccctgcgcttgaaacagcagtattttctcgtttccgcctctctgcaaaatattttatgcgaccataagagaagatacggttctttaaaacttcttccgcagttagctgcgattcatctgaacgatacgcatcccgcattggcgattcccgaattgatgcggcttctgatcgacgaaaacggaatgacgtgggaagaagcctgggggatcacgacctccgtctgcgcctataccaatcataccgttttggcggaagcgctggaaacttggccggaagatctcatcgcgcgcagattgcccaggatctactctatcttaaaggaaatcaaccgtcgcttctgcgaagatttatggaagaggtttccgggggactggaacaaaatttcccgcatggcgattatctcttataacaccgtaaaaatggcgaatttgtccgtttacggttctcatcaggtcaacggcgtttccaaactgcacagcgaaatcattaaaaagagcatcttccgcgacttttatgactatacgcccgcgaagtttacgaacgtcaccaacggcatcgcgcacaggcgctggctgaacgagtctaaccccgaactctgtgcgcttttggacgactgtatcggcgaaggatacgcgaaagatgcctccaaactgtcggcgttcaaaaaatttgaaaacgacgacagcgtgctccaaagattggatgagatcaaggcgctgaaaaagcagcagtttgccgattatgcctataaaaagcaaggggtgatcatcgactccaatacggttttcgacgtacaggcaaagcgtatgcacgagtataaacgccagcttctcaacgttctgcatattattacagattatctggcgctcaaagaaaatccggatttgcctattcttcccaaaacgtatatctttgccgcaaaagcggcagcgggatattatatggcgaaaaaaataatcaagctgatctgtttcctttccgatgaaattcgccaaacccccaaaatccgcgaaaaactcaacgtcgtgtatatggaagattataacgtcacgatgtcggaaatgctgatgcccgcttcggaaatttccgaacagatctctttggcgggaaaagaagcgagcggtacgggcaatatgaaattcatgatcaacggcgcgcttacggtcggaacgctggacggcgcaaacgtggaaatgtcggagcaggtcggcggagaaaatatctttattttcggcttaaaagcggacgaagtgacgcagatttggcgcaacggttattcttccagcgtctattataatcaggatgccactttgagaaaggtcatagaatctctgatcgtcggattccgaggcgaatctttcgcggacattgccaactatctgcttacgggcgcgcccgttgcggatccctatatgtgtatggcggattacgagtcctatttaagcacgcagcaaaaaatatccgagctttacgcaacggacaaacgcagctggaatcaaaaggcgcttaggaatatcgccgcggcgggctatttctccgcagacagaagcatcagggaatacgcagaaaatatttggcatctcaaagcgcttcattaaaacggaatataccaatttttaccgaaaagctgtaaaattattttacagctttttatcggtgttaagctatttttatcaaatcgggtcaaacgtatgaatatctattttaaccccttggataccgcttgtaaaagtataacaggaggtatttatcgggaagaggaattgcagctgaatctcttttttttgagcgaagaatacgcggaaaaggaggtttcgaaaaacacttttttgaacctttcaccgacgcaatgccgacctccctcaaaggaggcttgtctggttttgggcaaagacggggaagcgcggcaacgctttccgatgcaaaaaacggcatacgggtggactatctcctttaagatagcggaaacagggctttatttttatagctttaccgtcgaagacaacacacctatatttatgggtaaagaccgcagaggagaaacgggggaaccctttgaaaaagaatttcaactgacggtttcggcagaagactatcgtactcccgattggtttaaaggtggcatactctatcagatttttcccgacagattttgcaaggtgggaactatgccagacataaacggaagaattccgcgttcggattggggtgggattcccgcgtatcgaccgaacgaaaaaggaaaaatcctcaacaatgattttttcggcggcaatctccaagggattcgaagtaaactttcgtatctcaaaagcctaaatgtgtcgacaatttacttaaatcccatttttgaagcggcttccaatcatcgttacgacacgtccgactatttgaagatcgatcgaatgcttggctcggagtctgacttgcgggaattgacggaagaagcgaagaaatacggtattcgcatcattttagacggggttttcaatcatacgggcgataatagcgtgtattttaacaaatacggtacgtattcgtcgctgggcgcctatcagtccaaggattcgccttattattcctggtacacatttcaggaatttcccgacaaatacagcagttggtggggaatcgatattttgcccgaagtaaacgaagaatcaaaggactatcaggattttgttttcggaaacgacggcgttctcaaacactggctttcctgcggaatcggaggatatcgtctggatgtcgcggatgaactgccggatttctttttgcaaaaactccgtcaatgcgtaaaagaaacggattcggacgcaattattatcggcgaagtgtgggaggacgcctccaataagatcgcatactccaaaaggcgggaatacttgcagggatatgaattggacagcgtcatgaattatcccttgaaagacggaatcattcatttcattttgacgggaaatgcagaaaccttggcaaacgtgatgcgtatgctgcaagacaactatcccaaacagacgctggattgtctgatgaatattctcggcacgcacgataccgcgcgaatacttaccgtattgggcgaaaaaaattgttacacgaaggacgagatggcgtcaccgaaaatgttgctcgatgaatgggaaaaatcagtcgccattgaaaaattaaaaatggcggcattactccaatattcgtttccgggcgttccgtgcatatactatggggacgaaaatgctgcggaaggatatatcgatccgttttgccgaaaatgttttgattgggagaatcttaacgaatccctgattgaatattatcgtcaattaggcaatctgcggtcggaatttttcgaaatttttaaagacggcggctacgcggagatttttgtaaacgacggctgcattctttttcaacgagccaaagacgataaacgtgtctatgtctacgcaaataacagttcggagggttatttcgtgacttttgacggccgataccgcgaatacctgcaagatagcgtctttgattccgttttagaaatcaaaccgtattcttacgggattttttcccatgaagattctttaaacgttaaatcgaaatcttgaattcacggaaatttatcgggatttttcgctatattcttcaattttgtttgtttttagtattaactattcgtaaaatgtgcattttgcagttatcagggaaattcacccgatactattcgtaaaactcgcgtt

SEQ ID NO: 2465 - DNA, 18719 bp, Unknown
  16S sequences of unknown bacteria
cgggcttcggacggtactacggcacccgccataccaatgaagatgagcactcggatattctggtgcggctggaacgggcagaactgcgctactgcaagaccttctggctctccaaccggcctgaacagtacggcagccggggactgctggctgcctatccccggatctgcactgtggcggagatccgtctgcaggattcgggacgctgcatccgggtattcaatacccacttcgaccacatctccggcccggcccggaacctggcagcccggatcattctgcagtatatgcaggagctggatctccgggagcccatgcccaaactgctcatgggagacctcaacgcctcctatgacagccgctgtgtccgcattctccgggaaaacctgcaccagtatccgttccggctccaggacgcctatgaaaaatacgacggcgtgcgctccaatacctatcaccgctttgccgggcggatcaaggcgggcaggagccccatcgactatatctttgcctcggaggagttcgagatcctctcctcacggatctccaccttttccctggacggggaatatccctcggaccatttcccgctcattgccgacctggtactgaaaggagatgccgaatgatgaaaacgctcattgtgctcaacggtcccatgggagtgggaaaaaccacagtgggaaaggagttgtgccggcggctgacccccagcatcttcctcgatggggactggtgctgggatctgcaccccttttcggtgaccgatgccaccaaagcgctggtgatggacaacatccgggcgctgctccggcgggacctcgactgccccgaagtggactatgtggtatttgtctgggtgctgcagcaggaggaaaccgctgccgccctgctggacggtctggatgagaaggcccgaatcctgcgcatcaccctggatgccagcgatgaatccctctcccggcgggtacagaaggatattgccgccggtctgcgcgccccggacagcctggaacgaagccttgcctatcagcggttctatcccggacagggcaccctgcacctctccaccgatggacgctcccccgcacagctcgccgatgaaattgccggtctggtccggaatcgtgcagaatcctgagttctgccgagcaaatcgccaacttccatgcaaaaccaatgtgtttatcctgcaggcggcagtttccacggtttgacagccccattgcctcctgatatacttggaatcgtaattcgaactattacatcaatgaggtgtttgtatggaaatcaaaaaggtcacccaggtgcatttcagtccctccggtaccacacggaaaaccgccgaagccctgagtgagagcttcggtctgccggtggatgacgcagatctgctgcatgacccttcggtcacccgcagattcggcgcggataaactggttattttctgcctgccggtctttgccggacggctgccggaattctgtcccaagctgctgagccagttcaccggttcggacacacctgccctggcagtggttgtctacggcaaccgggattatgaggacgccctgctggaactggctgacctgctcaaaagccggggctttgtactggctggcgccgcggctgtggtggcacagcactccatcttcccggcggtcgctgccggacgccccgatgctgccgacatcgaaaagctccacagctttgccgcctcagctgctgagaagatccgtctggctgccgggccggaggatctgggggaattccccattcccggcaaccatccctaccgcaagctgaccaatgtacccatgcacccccgcgcgacttcggcctgtattcagtgcggcacctgcgcatcggtctgccccacaggcgcgatcccgctggaaaacggccggatcaccgaccggagcctgtgcatctcctgcaccgcctgcatcaaggcctgccctgtggatgcccgtggattcggcggaccggtctttgccatcggcagcaaactcttcgcccacaagtgcgcccagccccgtcagccggaatttttcctgtaataacagcgcctttttctgatactttgcttcaaaagcgtcgggtttccggcgcttttttgctgtaaatcgaggtttttatggattttcccttgctatctgcccaaaaagtggtataaaatgttcgtagaaatgctctcagaaaatgagtcgggaggacaatatgaagtacattacatttgcggtaccctgctataactccgaaagctatatggaccgctgcgttgaaacactgctcaccggtggaaaccgggtggagatcgtactggtggacgatggttccagtgaccgcactgccgagatcgcagaccggtatcacgaaaagtatccggacatcatcaaggtggtgcatcagcccaactcgggtcacggcgaaggcgtgaaccagggactgcgcaatgccaccggcaaatacttcaaggtggtggattcggacgactggctggatacccgggccctgcgccgtctgctggattatctggaatactgggacaaccgcggcgaacaggtggatctggtggtctgcaactacatctatgaccatctctatgagaattcccgccacactgtcaagttccgttcggccttccgtcccggcgagatctgcacctgggacgatatgggcttctttgatccgtcccagtacatgatcatgcatgcgctgatctaccgcaccgaagtgctgcgcaagagcggtctcaagctgcccaagcacaccttctatgtggacaatatcgtcgcctatcagccccttccctatgtggaaaagctgtgctatctggatctggacctctatcactacttcatcggtcgggagggccagtcggtcaatgaaagcgtcatgatgaagcgcatcgaccagcagctcaaggtcaccaagatcatcatggactgcgtggatctttccactgtgaagagccgcaagctggaacggtacctggaacggtttctctccatcatgctggcagtgtcctccatccatctgctgatgatcggcgattccctcgccatgaagaagcgccgtgccatgtggcgctatctggaacagaaggacccggctctctaccgccggatgcgcctctcggtgggcggattcacctacctgccctccaagctcggcaaccggctctcgctggctggctaccgccttgccaaaaaagttgtgaaattccagtaaacccgaaggaggttactcagctatgcagaactcccctgctgcacgccaggcagtggtggtcggagctggctttgccggcgctgtcaccgcccgggaactggctgaccacggataccaggtcaagatcctggaacgccgggcccagatcggcggcaatatgtacgactatccccgggacggggtcctgacccatctctatgggccgcatatcttccacaccggcaatcagaaggtgtttgaatacctctcccggttcacccgctgggttccctatgaacaccgggtgctgggacggatcaagggaaaatatgtgcccatccccttcaacttccgctccatggaggagctcttcccctcggaggaagcggctctgctccgggaaaagctcaccgctgcctatcccggacaggacagggtatcggtgctggatctggtacacaaccccgacccggacatcgcccggctgggtgaatttgtctttgaaaatgtatttgtccattacaccgccaagcagtggggcatgccggtggaacaggtggacacctcggtcatcaaccgggtaccggtggtgctgggctatgatgaccgctacttccgagaccccatccagatgatgccggaacagggctttaccccgctctttgaggcgatgctcgaccatgagaacatcacagtggagctggacactgacgcccgctcccggctgaccctcaccgaggacggcagaatcctgctggacggcgaggcgttcaccggcccggtgatctataccggcgcccccgatgagctgctggactgccgtctgggggccctgccctaccggtcgctgcgcctggactttgaaactctggaaaccgacagcttccagcctgccagcgtggtgaactaccccaacgaggaggacttcacccgcatcaccgagttcaagaagctcaccggacagatcctgcccggacggacggtgatcctgcgggaatatcctgccaagtaccagccggataccggcatggaggcctactatcccattgactcggaggagagccatgccctgtaccagcggtaccgggaggaatttgcccgctatggaaacctctacttctgcggacggctggcagaataccgctactacaacatggatgccgctgtggacgcggccctgcgtctgagcgccgagcttgtaaagtaaaaagccttacacagactgcattcccgggaggaagcccatgaaacccacagaacacaacgaaatggaaaacaaggcgctgaaggagcacctggcctctgctgccctgcagatgctcgccgagggcaccgactatgagaacctcgccggaaccacctgccggttcgggtacctgttccagattgacggtcatggcctggaggcactcttccagcttgtaaccgacaaggggacagcctacttcgccgcccagggcgaccagctcctgcggctctcgatcaatgaggcgctctttgagggcctgaccgccacctttctggagctccacgcctgatatttccccgcattcagcagacagcccttcgcacgggctgtctgtttttttgcggggcggtgtgcggtgcccgccttccctgtccatggcggcccgctgattttatggcgggtgcttccctgctccggctgcacactctgttcccctgggcagaggaggctctcgttcgccgcactgcgggcgctccccagctggtacggcatatcagcactcccaagcagccacgggcataacaaaaaggcagaggatcactcctctgccttttcctgtatcaggattgctttttactttttccgtgccagaactgccttggcctttgccacaatgttggcagctgtcaggccgaaccgctccttgaggtaagcctcgtcgcccacctcgccgaactcgtcctgtacacccaccatctccatgggaacgggggtattctgtaccagcacttcggctacggcactgcccaggccattgatcacgctgtggttctcacaggtgacgatggcgccggtctcagcggcagccagcttgatgagctccgcgtcaatgggcttaatggtgaacatatcgatcacacgggcggaaatgccctccacagccagctgttcagcggcagccagtgcctcgctgaccatgatgccggcggcaatcagggtgacatcgctgccctcccggatggtgatgcccttaccgatggtaaaggtggtgccttcctcgtagaccttgatggcagtcttgcgcttcaggcggatgtagtgcaggccacgcttttccgagagatcccggactacactgcgcagcatcgtggtgtcagtgggctccacaatgattgcggtgggaatattgcgcataatgcccacatcttcaaaaggcatgtgggtaccgccgttgtagagagcggtaatgccggggtcggaaccgatgacattgacggtattgcgtccataggccaccgacaggaagagctggtcgaagcagcggcgggtggcaaagggaccaaaggagtgaacaaagggagtcttgccggtggcggacatacctgctgccacaccgatcatattggcctcggcaatgcccacgtcaaaggcacggtcgggataggccttggcgaacttcttcatgccgctggaaccgaacaggtccgcatccaggtagacaatatcctcccgggtttctgccagctgcatcagggtttcacacagtgccgcacgcatttccacggcttctttttcatgcttgtttgcaagtaccactgccattattcagccaccgcctttgcaagttcttcctccagctcggcaagtcctgctgccagctggtccgcactgatggttacatgatgattgctgtctgcatcggatacaaagctgcagcccttgcccttgatggtatccagtacgatgcagtgaggacgaccgtcatccagacgcttggcattctcaatggcgtccgcaatggctgccacatcatgtccgtccacggttacggcatcccagccaaaggctgcaaaccgctccgcaatgttggagaagtcattgatgtccgagatatagccatccagctgcttcttgttccagtccacaaaggcgatcaggttggagagcttctgctgggctgccagcgacgcggcttcccagacctgtccctcctggatctcgccatcgccgaggatcaggtaggtggtattgtccttgccgctgatccgcttgcccatggctacacccactgccagcgacgaaccctgacccagcgaaccggtggtcatatcaataccgggggtcagattgtggtcacagtggctgggcagatgagtaccgccctggttgatggtcagcagctcctccttggggaagaagccccggagtgccagtgtggcataaatcgccggaccagcgtggcccttggagcagacaaggaaatcccggtcctcccagttgggattggcggggtctaccttcatctccccggaatagagtactgccaacagatccgcaatggacagcgatccacccagatgaccaaagcccagatgacccagggccttgagggtttcgatccggatctgtgcggcaaagattctggcctgcttctgacgagcaagttccataatgcacacctccaaaaaagtaaaaagcctgtcgagacatttgtcacttatcagtatagcacaaatccaccgggatttactaccatccgctttgagaaaatctcccgttccagcctatggaaaaagggcagtttacccaatccggctttccggaccaggcaaactgcccctttgaaatgattcctatgacaccgctcaggctgacggttcttcagctgccggtgtttccggctcggtgggcgcggtttcctctgccggtacctcagccggttcttctgccggtacctcagtggattccggctctgtcggagctgcggcttccccctgggtaaaggcgaggttatcaaagctctccaggccgttcacatagctgccgttctcccggtattccacccggacccggtctccggcggctgtgatgggcagctcggcactcagcgaggccggtgcggtaaagatgcggttctggtcgctgtccagcaggatggagtagactgtgatgccctcctccacatgcgaggagatacgcagcacattgccctctgcggataccagttccccggttgcgctgccgatggagctgctgccgctctgggagagtacattggagtaatcccgcagggcatcctgaaccgtctcacccacgccgacgctggagtagttggttaccgatacaaaggcatactgcttgatcaggccggcggagtccttgagcggcatgaagtaggtgggaatgccgtccacattgagaataatcgggaagtccgctttatagccctggtactgcaccttgccttgggccgactgctgggccgacttttccgtggcgccgttcatctggtagaggatcggctccttggtgaccatatccaccatcatgaagccaatggcactctcgtcctgaccgatactggtcagaccggtgaacagatagcagtcgccattgttgtagatgatggcctcaccctcggaagtacgatacttgtccttatccgagaagttgaagataccatggacatattcgcccttgttgttgatctggttgacaatgaagtcctccggctgaacacggtccacccagtccggcacctcatcgatggagtagtactgtacatcgccggtggaggcattcactgcatagatgcccttggcctccggcagggcaaagccccgggtattcttgtaggaagtggcgatccagtagggctgaccgctctcgtccagctcgaaggaatagtcggtgatgccgtcaaacagggcgccgttcagacgcagatgacgctgcaggtcgtccagcagataggagttgggctggtacttgatcttgtagtcctccacatactccacatcgttggtattggtggcggaaaccaccacatagccgggtgtaccgctcatattggtgaaccacttgaacaggcccgagtgatgcagcggcgcaacccacaccagcttgccgttgaccagctgcttggtgggctcgcccagatacacctggctgcccagcgaaggacgctcgcccagcttcttatccgccaggttggctgccagcgccttatccacaatgggaagctggttctgatccatgacctggatgtcgctggagaaggtgcgcacttccgggtcacccagctgatcccgataggccttggagccaaaaatcggcgacgacaacagcgaaaccaggatcagcagcacccacggcacagcgatcacagtaaagagctttttgggagtgccgccggtgaactccaccgaataccggcggatgccgccatagctgatgggaatgatctccccgtaacggaacaccgcatagacgcccagatatacggtgatgaggaagcaccagaacacagccccttcaaagtacatggggttgaggttgggtgcgttcaccagcacattgagcaccaccaggacggtgaacaccaggtagatcagattgcgtatcttattcttgttcatatcatttgatcctttcagcgggaaaatttccctgcttttcaaacgaagtgttgccggacttcacagagattatacagcttccggcagggtacagcccctcccctccggaaaggctgccttggaatacactataccatacttcggcagttcctgcaatatctgccaatttggctgtctttcttttacagtctgtacacaaaattcacaaaaaagcggcctgcggaaaccaggtctccccgttccgcaggccgctgcatatcagtccagatagatcattttcttggtcataccgccgtccactaccagatcctgcccgttgatgaagtcgttcttctcatcggtgaggaagaagcaggccgaagccacatcctccggctttcccacccggccggacaggtgctgccggtgatcggcgtatttgagctggtcatagccgtcgcagcagatccagcccgggctgatggagttcaccgtcaccgcatagggcgcaaagctcactgccagcgcatgggtcagcgcagtgacaccgcccttggaagcggtataggcctcagtgccctcctcgctcatcaggctgcgggtactggagatgttcacgatgcgtccgtaccgctccttgtagccctttttgcgccggttgatcatgtattcccggctgatgaggaacattgcccggagattggagttgagtacatagtcccagtgctccactgtttcctcccacaggctgcagaactggctcacaccggcgttattgatgatgatgtccaggtcgtcaaactgttcgaagatgctctgcatcaggttttcacaggcggaggagagtgccaggtcacagtggaaaaaacagcactcaggcatgatcggacgcagttcgccccggacaaaccggtcaccttcatagtccttgtccgccacgatcaccagtgcgccggcccgtgcatattccagggcgatctcccgaccgatgccggaagctccgccggtaaccagaaccttttttcctttgtaatccatacagctcccccttttctcacagtgtctgtgccgttacagcttgcttggatcgtccgcgtaggcagctgtttcgctggggagacccttcttctgcagcttgatggcaatgaatttcttgatgaccgaatagaccaccgcaaataccggcacaccgatgaacattcccgcgaagcccaggaatttgccgaagatcaggatggcaaagattacccagaaggccgacagtccagtggtatcgcccaggatcatcgggccgaggatattgccgtcaaactgctggagcagcagcacaaagatggcaaagatcagtgcctgcagggggctctcggtgagaatgatgatgatggacgggatcgctccgatgaacggtccgaaatagggaatgacattggtcacgcccacaatgacgctcaccagcaccacatagggcatcttgagaatccacatgccgatgaagcagaggattccgatgatgagcgagtcgatgatcttgccggtgatgaagccgctgaagatggcattggattcactggcaagatcgatcatgaacttggcgttttcctcattgaagagggcatacatcaccttgcgggactgggccaggaaccgttccttgcccatgaacatatagatcgagatgatgatgccgataatcaggctgaacaggccgctggtaaagttcatggcatagtccagcacatggggaaccgagttgagcaccagatcatagatctgattgatgacattctccaccgacatttccatggcatggacgatctccggcggcatgccgtccactgtcaccagatgggtgatcatatccagcagctgctggagtgaatcggcatagctgcgcagattcccgatgatgctgctgacactgatgatgatctgcgggaacaccagggccgaaaacagatacagcactccgccggtcagtgcgtaggtgacgatgatcgccaatccccggcaggcgggcggattgatggtgttgttggtcagccagggcaggaacttcttatccaggaaaacatagatgggattgagcaggtaggcgatcacaaagccgaaaataaagggccgcagggtcaccagcgccgcgctgaaccacgccttgacttcccggtagttctgtaccccatagaggaacagtactccgaataccaataccagaatggcatagaccgcaatggtggtatagcgtcgattccattcaattttcacattcttcactcctttgagaatcagatccccccgatccgttcccaattccatttttgacaactgctattatactggatatttccgcggatttccacaaaatccttgtaaaatcctcctattccgaaagttccgaccattcctcatacttggcagtcagaccctgctgcagctcctccatgcggttggctgcttcggtgagcttttcatagtccgatgcggcctcctcccctgccatgaattcggtcagacgctggatctcctcctcatcggcagcgatctccttctccagagtgtccagacgcttgcggcgcttggcatcttccgcccgctgcttcttgccgcggtaataggtcgtgctggcctcgctcttcttctcgggcacggcgggaaccggttccggctccggctgctccggcgtgagaatgggacggtctccccgggcataggccgcatagccgccctgatagatggtcatgccagccggggtcatctcagcgatcttggtgggcaccttgctcagcagataccggtcatgggaaaccatcaggatggtgcccgggaactcgcccagcgccttatccagtgcctccttggtgtccagatccagatggttggtgggctcgtccaggatcagcatattggacttgcgcagcatcataatcgcaaacttgagcttggcccgctcaccgccggacagcgaccccaccttcttatagacatcctcgccggtgagcagtacattgcccagcacggtgcggactgtcacctcatagagccggggatagcggtcccacagctcatccagcgctgtcttttcatcgtgcaggccggtgttctcctgctcatagtaggagagatagacattctttccccagtccaccttgccctcgtcaatggggaacagcccctggatggctttgagcaatgaggacttgcccacgccgttttctccgataatggcgatcttttccccgcgcagcacatccagccgcagccccttgaacagctgacggcgttcgcttccctcgcccaccgaaagggccaggtcccggacatgcagcacctccttgaccggctccacatcgtagctgaaggaaagatgcgcccgcttctggggcgggagcggcttttccaccagctccatgtgttcaatggccttgcgcttgctcttggcgctcttggctgaggtggcccggacgatattcttgtccacatattcctgcagccgggcaatctcctcctgctgccgttcgtagagcttgagctgccgggcataggcctcctcccgcagctgggtgaacttggtatagttgccgggataacgggtgagccgggtgcggtccagttcacacaccgaagtcaccagactgtccaggaagtaccggtcatgggatacgatgagcagtgcgcccttgtaccccttgaggtaatcctccagccagatcagggtcttgaagtccagatggttggtgggctcgtccaggatcagcagttccggttcctccagcagcagcttgcagagagccagacgggtcttttcaccgccggacagcgccgagatcagggtttcccggtcccgtcccgcaaagcccataccgttgaggatggtattgatcttcacatcgatgaggtatccgtccccggcctcgaattcggtatgcaggcggttgtattcctccagcagagtatggtcgtccgggaactgccgcatacggatgcgcatggcttccatctgccgttcgatctcatagagcggcgcaaagacactgcgcatctccgccaggatggtactgctgcggtccaggccgctgttctggcgcaggaacccgatgcgtaccccggaagtgatggcccgttcgccgctttcaaattccaggtcgccgctgaggatattgagaagggtggattttcccgctccattgacgccgatcaggccgatccggtcctgatcttctattttgagcgaaacatggtcaagaatcagttccgcaccgtaatatttcgtgatctgttccagagaagctatcatttccagtaattctcccaaatactaaaaggttatattccattttatgataccacatctcctgaaaaaagaaaactctcctctggaaaatatcccctctcttgcagagtccggcagctttgtgctacaatgccagcagagaatttgaggaggttttctgtatggcgaaactgcgcaagacccttggtgggatcgactggcctgtctgcgaagccctgatgcgccagatcgaaacccagagcactgtgaccctctcccgctgggcagtggatcatgcggcccgggaatatctgcccctctgcggggaagccccggccctgacggcggctgtggagggctgccggaaacacctgagcggacagctctccctcaaggagctgaaacccctgctgcgggaagcctctgccgccgcccgggataccgaaggcgctgtggagcaggcggcagcccgggcaactgccacagcctgtgcggtgatccagacccccaccaacgccctgggctatctgttctacggagcagcagcggcggcatacagcaaggccggcaccgaggacgcctcccggtgggacgaccttgcccgggctgagctggaacaggccctggaagaactgcgtgccgtttcggtgccggatgagccgaaccccgccaagatcaactggaactgctgacccccctccccctaatacgcaaaaagccgcacaccctgcatcgggctgtgcggctttcttcatgtgatttactttttggtgttctccagcagacggcaaaggatgtccacatacttctcccggtctgccttgagggctacccggcagttgggagccttggcttcggcccgaccgttgcggatgtcaaagagggtcacgccataggcagcgccccgtccgcagtccactacgcagggggcgtcctcaatgtcagtgatgacagtggggtccaccagataggcgatggtcagcgggtcatgcaccggggcagccggtacatccgctaccttctgccactcgccatagccggcgatacgctgctcacagagcgatgccaccacctcggcaggccgggtgccgatggcacggaaccgggctgcgtcctccatggtcacataggcggaatgggtggcgtccagggtcacgaaggtgaacggaatattgcagtccagcacggcctgggcagcctcagggtccagccagacattgaactctgccagggcagtcttgttccccacccggaacccgccgcccatgtagacgatctccttgatcttgggaatgatccggggttcgatgcgcactgcgtgggcaatgttggtgagcggtcccagcgggatcagggtgatttcaccgtcctcggcctccatcagggtgtccaccagccagctgaccgcattcttcggctgggccttgatggtagccggcgggcactggtcgatgtaggtgccatggatgttcttgtagagtgcctcctccggggcgttgtacatgggataatgccggcggaagcccagcatacaggaagtccacggtacagcacagccctggaataccggaactgtaccgcccatcagctcactgatgcgcaggctgttttcggtggtgatgggaacggcacggttgccgttgactgccataatgcccagtacctcaaaatccgggttcgccatggcggcaatcagtgcgattgcgtcatcggaaccggtatccacatcgaggatcaccttgcgttttgccattgtaacactctccttatctcaggccggtaccgcctggacagctcagtgctgcccggcagaccgtatcatgcatttccgggctgcgcagagcccacttgaatccattatagcacgcagcacgtcccggcaaaagccggaactgtccttccagccgggccagcccaggagaaattcccagcagaattttaggcaaaacgcaaaaagagctgccggaccggcagctctttgtttttctgttaagcggatgcttattccaccgagatggtgaagtagtagatgggagttccgccgttgaccagggcaacttcgatgtccggatcgatcttttccttgatctccagttccaccatggtagcctgctcctcagtggcgtcctcaccgtagatgatggtgatgaagccggcctcgcccttgcgcttcttgaccatgttcttggtgatcttcaccgcagccttgacgatgtcgctctccaccgaggtcaccttgccgttttcaatggcaagaatgtcgccttccttgatcttgtgaccgtcatattcgctgtcccgggccgcaaaggtcacctgaccggtgcttaccttttcagcagccttggtcatgttcatctggttttcctcagcgtcgatggactcatcgaataccagcatagccgacaagccctcaggaatggtcttggtgggcaggacacgcacttcacggtctgccaggttgatggcctgctccgctgccatgatgatgttcttgttattgggcagaacaaagactgtcttggcaggggtggcatgaacagccgacagaatatcatcggtggaggggttcatggtctgaccgcccttgaccacattggtcacgcccagatccttgaagagctgctccacaccgtcaccggcacatactgccacaaagccataggcattgctcggatcaaccggagcatactggaaaccggcagtcatggcttcccgtactgccttctggttgtcggcatgctgctcccgcatattctcgatcttgatcttggtcagcgcgccgtgccgcagagcgttctgcagggcatcgccggggttatcggtgtgcacatggcacttgatgatgtcatcgtcgtccactaccacagcgctgtcgccgatgctctccagataggagcgcagagcctgggcgtctgcccgctcggcgtccttgagcacgatgaactcagtgcagtaggtgaaggtgatctcaccctcataaagaccggctgcattgcgctcgtccgggatctcggtgggagcctgctcgccggattcctcctgcagctccacaatggcgccgccctggaatacctgctgcatgccctccatgacatacaccagacccgcgccgcctgcgtccacaacaccggccttcttcagtaccggcagcagttccggggtctcagccagagccttcttggctccgtcgatcatggtctgccagataccggtttcggtgctctcggcagtcagtgccttggcgccctcctcatgggccacacgggccacggtgaggatggtaccctcggtgggcttcataacagccttgtacgcagccttgacaccggcgtccatggcgtccaccagatcggcggcagaggcttcagccttgccggccaggctcttggaaaagccgcggaacagcagcgacaggataacgcccgagttgccgcgggcaccccggagcagcgcgccggctgcggtcttggagacctcggctacggtggccttggagtccatcagctgtacttcccgcttggcagcggaaatggtcatggacatattggtgccggtatcaccatccggcaccggaaatacattgagtgcgtttactttctgcttatggttcgagatgttgttggcagcagagataaaagcatctctcagaactgaacctttcatcactttaaatctactctcccttgtctgagaattcacacggtcggtgtttgtcagatcatttcatccacaaatacattgaccttggcaacctgcaggccggtagccttctcggtgacataacgcaccttgccgacaatgctgcgtacggtcgtggcaatattcagaccataggtgactgcaatgtgcagatccaccaccagactgccgtttactgccttgaccgaaacacccttatcggtgaattcctctttggtgagggcagagcgaagtccctggacggcgccgctgctgaccatacccgctacaccgaagcactcggataccgcatgtccgatcagattggcgaagtactcctccgagatctcgatgacgccgagatgattttcgagtttcagcataccgtttacctccctgactgattgatttttgttctttatgcaaaagacaaattataactctaccattataggctaaaatagtataccatatttttttggaaaaagccacagataaccggcgttttgctcttatctttggcaaaaacgcactataaaattactgccattcgtcgatattatagaaaatgtcctgcgaaatcggggtcatttttgcctggaacgacggggagaccactgctcctccctgccggtaaaccaatggtgtcaccggcacataggtatcgaactgttccagcagtccggcacagtccagcgtcccggcacagtatgcataatactgttccagcagctgggcatcggaacagtccccggaaatgcccaccgaactgccggagatcagcggactgatgtccacattgtccccgacacagacctcggcaatgaacagatcaaagtcccccgcagccagccggctcagataactctcatattccaccgtttccacctcggcctggatgccatagtatcccaggtagcgcacaacggtttccgccacccgtacccggaaggggttctcggaattcaccagcaccgagagattcaccggctcgtcctcatagctgcgccagccgctctcctccagggtcacgcccatcagttccagctccatgcggatgcggtcgtcccccagatcgctgtgctcctgctccggcaggtcataatactctgccgggaagggggtcagcgccggtgtggccttgttgtaatagatgtctgaaacgatgctgtcccggttgaccatctccgaaaccaggggccggaactgcctctgggaggtgagggcattctggctgctgtacccgatatacaccacattgcccagctcaaacagatagctgttggcgcccagggcataatccgcctcctcggcatagtcggtatacaggcagtggatcactccgctgcgcagcgcattggcaagggtgctgtcatccggcatggataccagctcgatctcggtgatcttctctgaagcctcgggattgctttccgaggcggtgagataccgccgccctgactgctcctgatagatataccgtccggtcccgatgagtgaatcggtgccggagccattcttcacaatggggaaatccagcagaccggcaatattccggtcggaacggtaggctttcacccggacggtccggctgtccacctcggtcaccgattccaccgaggtgtgcagctgccagtagcgcttctgctgcaggtcggtctgttcaaaggaatagaccacatccgccgcagtcagcgcgctgccgtccgagaaagtcacatcgctgcgcagggtcaccaggtattcccctgtccccgcctgggtgatgctctccgccaggcagggctggggggtgaaggtattgtcggtgacaaagagcgggtcgaagagcagcgaagtgatgctcagattcatatcactctgggcggcataggggcccagtctgtcgtcaatgtccaccggcagcagcagtgaggtctgggactggggctccccggaggaagccccagcagcagtgaggtctgggactggg

SEQ ID NO: 2466 - DNA, 4740 bp, Unknown
  16S sequences of unknown bacteria
accagcagatgttaaagtgcaagggtatccggcaaagtatgagccgcaaagggaattgcctggataatgctgtgatggaaaatttctttggcctgctcaaaagcgagttgctgtatctccaagaatttgaatctgcggaacacttcaagcaggaacttctggactatctggactactacaacaaccgccgcatcaaagcaaagctaaagggcttgccgcctgcaattcacagacaacaagccctttcagctgcttgaacaatttttgatagaaatattgtctaactttttggggtcacttcacaatgcgggccgcttctttgttctttatttatacagtccgattcataaagcggtagaacatcagcgccatctgttcccgggtcgcggtatcctgggccgcaaaccggccgctgccattccccttcaccatgcccaatccctgagcaatggcggcataaccgtaatattccttggggatctttccggcgtcgctgaaattgcactggtagatctgccacattccggccgctttgccatagcccgacatatccagaatgatcttcaccagctgaccccgggtgatcagggcgtcctcctgccgctggttcttttccagaatccccagctcataggcactccagtacaggctttccagctcttccggcacctgaggatcgtaatactgcccctgagccgacaccaggaaggccagcagatccgcctgggtcagcgccttgttcttttggaacagatcgctcttgaagcccacgcccatctgggccagagccagaatctcgctgtctccttctttcacatcggtgtaggaaacctgtacctgctcccactgattgcgcagggcttcgccggacagtgcatccacgccataaacctgcttggcttcttctgtatactgataggccagcatcaatttatccccctgatcggtgggagctgccgaataccccagctccaccggatgggcttccttccaaatgctctcggcctgctcctgggagatgatcccctctttgcctgcaaaggtcacatcttcatcccattgcccctggaaggacagcagggcaccggtctgcttgtcaaagctcatgcggtaatagttttccgggaaaggcacgccgtttgcctgacgcaccagcaccacgccttctccttgcagactgcttccctcataggttcccacctggctgaactgctgggggaaataggtttccaggaaggcccggcctttgttcatggccgcttctccttccaaagcctcccgctcttcatccccaaaggcaaagaactggatcaactgtccatcggaagcattgacggtggcatttttgtattcccgcgcctctcccttttgccgtgtataactgagggaggcggtatagcaatcatcttccctgttataataataggccgtctcggccagctgaaaatcctgcagggccagctggggcatttgccgcagcaaactgtccagttccttttcttccagaacctgatccagtttgcccagcccctccagctccacttcgctcaggccgccgtccgcagcagagttgctgcctccactttcttgatcgccggattccttatagtactcttgccacagctgggacaggttgaccgcttttccggtaaaggcatccaccacataattgtccccgctcaccggcacatagcgtaaatgggcctgctggctctctgtgccattttccatctgccgggtgtattccagctgaagcttctgggttccctgcaaagcgccccggccctgttccagagtcaccgaaggcttgggactgtccacaccgccccgataattctccggattggtgcggcgataggaaatcaccgttccatcttccccgtccagggtaatccgtccggacaagggggagggcagaccatgaagggcgatgtcaaaataaaaccagatctcatcgccgccccggctgatctgggaagcgtccagcttcacgctttccccttccagcagcaacttgtcgataaaggcctgggccaacttcaaagcctgggtatcactcaccttgggcacagagggagcaaatcccggctcctgagaggaatagtccccatcatccagccggtattccatcacttgcccttgagaggtagcttccaccgtcagccgcagctcatccaagctccagttgagcacccacaagggcaccccttcgtcggtctgatactcgctgtggaaaccggtgtactcatcgccgatcccgagaagggccttgaccttcccggtaacctgctgggcctgctgattccactcttccgatgctcccagagcgccgggggccatccctagcagaagcgtcattgccacgatccacgccatgatccttttcatgtcccgtcctctcctttcgtgttttaaagagctgcttacttcattagacgattcccttttccaaaagttcctttttctccctcttctaaatctttccgtctttttgcacaaaacatactagatggttatagacacattcaataatacccttttaccctatctcaatattaaataaaggttgcattcgccttttttccccgctacattctcattggcacctctgtcaccgccaacttccgggccagctggtttgacgaggccttttcctgcaaaacggccaagttcaccttccccggcgggaacttcggcgaattcatcaaagcactggatatggcctatgaagatcacgagatccagcgggtcttctggggcttggacaccaatctgctcaccgctttcccccaggaaagcaccgagcttctccccgactatctttacaacgacaactcctgggatgatgtggaatatctgtacaacaaggatgtgcttttccggcagatcgtttccatgctctatgccttccgctgggacccggtgcccacagtggtgatctttttgcctgggaaaaccggtatgaatggggcccccaggcggtgatgaaagtatacggccggccagaacccacccctatgatgggatcggacatcttttccgccgaaacatccgccaatttgcagatcattctcccctatgtgcaggcccatccggaaacagagttttatttcttcattcccccttatagcattgtcttttgggatcgggtttaccggaggggcacgctggaaggcaccctttccgcccaggaagcggccttgcaggccctggcccagtgtggcaatgtccatgtctattatccctgtgcggaagaagaagtgatttgcgatctggaacaatacaccgatcccatccactattctccccaggtcaaccaatggatcaccgaagaaatggcctcttcttccggtctcgtgccccaggagattccccaggctgtggaagaaatgcgccaactggcctggaactatccctatgaggagctctttgccctctatccgccccagcttcccccggaaacctaagaggccttgtccctctgttttccccgtgctacaataaaggcaaatccatgaaaagaggtggccgcatatgatctataaagccctgggccgctccggactgcaagccagtgagatcggccttggctgtgaacatctggagggcctggacgccaaaaccattcatcaggtggtggataccgctttggaaggcggcgtcaacattctggatgtgttcatgtccgaacccaatgtgcgccgggatattggcctggctttgaagggccgacgggacaaagtgctcatccagggccatttcggcgcccggtggaaggacggccaatatggccgcacccgggaacgaaaagaaacccagttcttcttcgaagatctgcttcatcgtctggataccgattatatcgatatcggcatgttccactgtgtggacaccgaccaggaatttgaccagatcttctccggcggcacggcggactacgctcagaagctgaaacaacaaggtacggtgcgcaccattggcatcagcacccacgatcctcacatcggcctgcgggccatcgaaagcggcattgtggatgtgatcctcttcagcatcaacccggcctacgatctgctccccgacggtctgggctccaccgctcctctctttgaccccgccacctatcagcagccccttctgggaatgcatcccctgcgggccagattctatgagacctgccagcgggaaaacatcggcatcaccgtgatgaaaagcctagcggccggctcccttctttctgcccagcgctcccccttcggcgtggccctctcccccatccaatgcatccactatgccatggaccgtccggcggtgggcagcgtgctggtgggtgtgcgcacaccggaagaaatgacagaagccctccggtatgaaacagcttccctggaggaaaaggactattcggtagtcctggcctccacgccccaattttctctcaagggcaagtgtatgtactgtaaccactgcctgccctgcccctcccatatcaatatcgcccaagtccacaaactgctggatctggtggaagaaggacagacgcctcctcccaccgtacaggcccactatgaagagctgggggcccatgcctcccagtgcatcggctgccgggcctgcgaaagccgttgtcccttcggtgtaaatgtcaccgaaaacatggcccgggccaaagaagtatttggaaaatagagtgaattgtcaaactaagtgcaacaggagttaagctcgagttgccataattcc

SEQ ID NO: 2467 - DNA, 3478 bp, Unknown
  16S sequences of unknown bacteria
gggtatttcctggtgacatacctgtgcagccgcagcatgatccgcgaacagcgtgtgcatcaggagtgagtattgcaatttatgcggaatttcgttaaaatcatatttagggtctgcatgcgaggtggtaggagatggcaggagagtatctttcacagctgatacagcttgaagaagcgctgaatgagaacagcggcgcgttcagcgatgccatcagcgaacagctggcacagacggtgaatgacatgaaggggcagcagatcagcgtagaggaatatctgcgcgtcatgcagctgttctttcgcaaatatgagcgggagcataatcgtgacggacagcattactgcgccatccgcatgctgcagcttcagcatgccttgaaaaaaaagcgccgtcattatgcgctggtggaggggaacaggatccctgagcagtatgcggcgtatatttatgataagtcgcagttttaccgccagacgttcacgctgctgcagcagcggctgctgacgctgatcttgttcgtcatcttgttcttgctgctgcatttcctgctttcgcagacaaacagcgtggcgctggtggaggcggtcatcatctcgctcctcatctttctgtattcctttatccggatgcctaagctgtatatgctcagtcagctggaagcggccggccgcaacgtggaaaatgtgctgctggaatttgattatccgatcgtatcgggacactgatctgggcagattcagtgcccttctttttttattgtcgtagaatagagcgaaggaggggtgaaatgagcaccagtttagtgcttcagccaggaaggatcggcatcagtgtcaacaagatgcagggatatctcaatctcatgcagcagcggggcatgatccagaccagactggtggaagacggcgtatatggcgcgaacatgagccgtgcggtgcgtgaggcgcagacctattgcgggctgacgccggatggcatcatcggcgagctgacctgggatgcgatcatgaatgagatcgtgaagatggacatcgtgaccaacattccggtcgccgtgcgcgggtatgcgctgagaagcggagagatcagcctgggcgtgtatatgatgcagaagtatctcagcgagatcgcgcagagcaatccttgtctgcgcccgattcccatcgacggcaactatggcacgcggacggtgcaggccgtggagcagttccagtatctgttcgacctcgctatcgacggggtcatcggcacgctgacctgggatgccatcgtcaatgagcgcaaccggctgatccgggaggcaggcgtaccgatgccgcatcagcagtaagacacaaagcgggggatcatctggcgcaaggcgcaaggccgtgcgggaatccgggggattcccttttctttttcgccatgctgtggtaacattttaatcactgtggagggatgcaaatgaaaaaacatctgccttatgtgctgatcgccgctgccgcgctggcgctggatcagatcagcaaatatctcatcgaggccttcattcccctgggcgggacgatcccgatcatcgatggcttcttcgatctgacttacgtacgcaataccggggctgcctggagcctgttcgcgggcagcggcatgacgtttttctatgtgatcacggctgtggcgctggcggcgctcgtgctgttttaccggcatacctcaccgcgggatgtgctgatacgctgcgggctggcgctgatgatctccggcgcgctgggcaatctgatcgatcggatctgttttcagtatgtccgcgactttctgcatttcaatttcttcggctatgattttccggtgttcaacatcgcggacagcgtgctgtgcatcggcgtgtttttgatcatcgtcgcattcgtgctggaagagcgcagaggagggagagcatgatcatcgaatttgacgtggagcgcgcgcaggaagggatgaggctggaccgctgtgtgagcgagaacagcgcgatcagccgttcgcgcgtgcaggagctgatcgcccagggcaaggtgagcgtcaacggcgcgggggccaagagcagcctgcgtctggctgaaggagatcatatccggatcgatcatgatgagcctgccgcactggatgtcgaggcgcaggacatcccgctggacatccgctatgaggatgaggatgtcatcgtcatcaacaagccccgcggcatggtcgtgcatccggccgccggcaatcagcgggatacgctcgtcaacgcgctgctgtatcactgccgcgacctttccggcatcaatggcgtgcttcgccctggcatcgtccatcggatcgctaaggacaccaccggactcatcatcgtggccaaaaatgatgccgcgcatctcgatctgtcgcagcagcttcagcgcaagagcgtgtcgcggctgtattatgcgctggtccatggcgacttcgcgcatgatcatggcacgatcgacgcgccgatcggccgggatgagaaagaccggcagaagatggccgtcaccgagaagaacagccgcgacgcccgcacgcattttcgggtgatcgagcgtttccgcggctttacgctggtggagtgccggctggagaccggccgtacgcatcagatccgtgtgcatatgcgttatatcgggcatccggttgccggagatgaaaagtatggataccgcaagacgctgaagaccggcggacagctgcttcatgcgcatcagctggaattcatccacccgcggacaaaggaaaaggtcgtcgtggaagcgccgctgccggatgactttgcggccgtgcttaagacgctgcgtgaggaaagggatgcaggatagatggattatctgaatctggatgtcgctttggcgcagctgctggcatatttcgtgagcgagaaagggtatacgatcgtctcagtgcagcaggaccgcgatgacctctggctcatccagccgaagaaccgcagcttccccatcctgcgcctgtgcagggaaagcagggaggagctgcaaagcaagcagagctatctgcgtcaggtgaaccgggtgatctgcgatctcatccatcgggagagcaaggtcatcgtcgtcaatgtggatcagcgcgcggagagcttcgaggatgaggaaatccggcaggtcgctttgctcaggaacgatgatctcgcgttcgcgcgggcctttcccgatgcgcgcggacagctgcatgaggtgagcgacgcgcgggcggaactggcgaggctgagccgccgcatggaggagacgcaccgccggccgcatgtgtggcgcaccctcgccgccttgtttccccgcaagacgctggcgctgttcgtcttggtgatcgcgctttcgctggctttccagcacacgggcgtttctgccggcttcagccgcgatgccatactggacgcgcatgcgctctggcggctgttcagctgctcgttcgccctggagacgctgtgggccctggtgca

SEQ ID NO: 2468 - DNA, 27610 bp, Unknown
  16S sequences of unknown bacteria
gtgcaggcacatcctttctccacgtgaagaaaggatgcaaagagacgtcagggggcaaagccccctgaacccccgggtggctttgtcgattttctctcgatgaaaatcaactcgaacgccgccacctgaccccgcccatacaatgagggggcccggggcccccggggtccggttgggcgcgggactgaaaaagcgcagagaccccaatccccggggccgcagccccttattgtatcgtcggtttttatgataacggtggggaggttctcctgaaaagagaaccgacaggatccctggggtccgggggaaccccggcggcgtttttgctttcttttgtcgccgaggacaaaagaaagtggcccgcaggccagacctattcaataaagcatgattttttatgcactcatgccgtgcaggcacatcctttctccacgtgaagaaaggatgcaaagagacgtcaggggggcaaagccccctgaacccccgggcggcttggtcgattttctcttgatgaaaatcgactcgaacgccgccacctgaccccgcccatatacaagaaaggggctgcggcccgggattgtaactaagtgtctgcctggacatataacccccgccaccgaagctctgcttcggtggcgggggactctttgttcatcgggccttgtcggccacttccttttgtaccttctcgaggaactccgcctccggcatggcgccgagatcgccctccttgtgagaccggaccgaaaccagcccggattccgcctcccggtccccgataaccagcatgtaggggatcttctgcatctgggcctcccggatcttgtacccgattttctcgttgcgggtatcgagggtagcccgcagaccggcattctgaagacgctgcgtgacttcgtccgccttatcctggagccgctccgacaggggcagtacccgcacctgctccggggcgagccacagcgggaataccccggcgaaatgctcgatgagaatcccgatgaaccgctcgatgctgccgaataccacccggtggatcatcaccggacggtgcttgccgccgtcggcgccgatgtattccagctcaaaccgttcaggaagctggaaatcgagctggatggtgccgcattgccaggtgcggccgatggaatcctccagatggaagtcgatcttggggccgtagaaggcaccgtccccctcattgactttgtagtcgaggccgatctcgtctagggcggcccgcagggcggcggtggcatcctcccaatcctcctcgctgcccatgctgtcctccggccgggtggagagctccacatggtatttgaacccaaagagggaatagacctcgtcgatcagggccacgacccccttgatctcgtccttgatctgctctttcgtcatgaagatatgggcgtcgtcctgggtgaaacagcgcacccgcatcaggccgtggagggcgcccgacagctcgtgccggtggacgatgcccagttccccgatccgcagcggcaggtcgcggtaggagcgcatctcggtctggtataccaggatgccgcccgggcagttcatgggtttgatggcgaaatcctcgtcgtcgatgacggtggtatacatgttgttcttataatggtcccaatgccccgaccgctcccacagggtacggctgaggatgatgggggaggcgatctcctgatacccggcgcgggtatgcacctcccgccagtagtcgatcagccggtttttgagcagcatccctttgggaagaaagaaggggaagccggggccttcgtccaggatggtgaacaagccgagctccttgcccaaacggcggtgatcccgttttttcgcctcctccaattgggccagataggcgtccagctccgcttttttgggaaaggcggtgccgtagatacgggagagcatcttgtttttttcgctgccccgccaataggcgccggtgcaggcggtcagcttgacagccttgacgggggcggtggtcatcagatgggggccggcgcacagatcggtgaaatccccctggcgatagaaggagatggcctcccccttgtccgcgtgttcctccatcagctcgagtttgtagggctggtccgccatgagggcgcgggcctccccgatgggcagctcgaaccgttcgatgggcagggcttccttggcgatacgggccatttcggcctcgattttctcgagatcgtcggcggagaaggcctcctcccggtcgaagtcgtaataaaaaccgttgtcgatggccgggccgatggcgaattttacgccggggaagaggtgcagcaccgcctgggctaggatgtgggaggcggtgtggcggaaggctttgcggccgtcctcgtcctcgaaggtgaggaattccaccgcgcagtcgcgggtaagcggggtgcgcaggtcgcagaccgccccatcgatccgcaccgcgcaggccgcgcggaacaggcccattgaaatgtcgcggcagagctcttccgccgtggtgttctcggccacctcacggacgtcgccgcctttgagtgtgatgtgcagcatgggaaacactcctttccgatattgaaacagatgtcgggagcggaaaacacaaaaccccgccccctgtgaaggggcgaggtcaaacaaccacgcggttccacccttgttccgcggcaaggccgcgctcgttaccggccggtaacggggccgtccgtcgcgccttaaccggcagggccggctccggcgcgcactcgggggtggtggcggtttcgggccgtccttgcgccgcttgcagccggggcggcgctctctgataaggacgggcgggaaggcttccccgtcagcgtttgtatccacaggataccaccgccgccgcgccttgtcaagagggtgggcgccggtgatgggacggtcaggccgtggccgcgtccccggcctgctcgatgtcccgctccactgcggcgatcaggagccggtagagagggacgagggcggcaaaagcctccttgaggacatccaccagagcggcggtgccgaaaaaggccgggtccggctcgaatcgttccatcgtgatggtcttgcggttgtataccgcgtcgagcagcggggggagcccctcttttttcgggcgggcgtaccggtccccggccagaacaaatcccgccgcctgcgcccgtttcagggcttttgtccacgcggccgggttctcgtcgatcatccgccggacggtctgcatcagccggggagtggtgtagtaaaaacccatgccgtaggtgctccccttcagggagatatcgacgaaaaagccgggggcgcattcatatgcttttttgtcccgcatgaagccgacccacatgttttcccggtagagggatttgtcccgggtatagcggttgtcccgccggacgcggctgacacagccgttgcggttcgggtcggtgacgatccgggggtcgatggcgatcatggtgccggcgagatcctccgccaggctccgaagcgggtcgagcacctgcgctttgatctgaggcttgtgctcttcgtaatagctcttgctgtcgtgaaagcggttctccgccagcagaaacatgccgtcgggagcaatcccctggaagttggacatgaacaggcctcctctatgtataagcaaggtgaaagggatccggaaatattggcagacgacggttacagtatagcacagattttgtcgaagaaatatacaaaattgtaaccaaattgtttctggggaaggtggactttttagcggacaacttgtataataaatcctatatgaaaaaagagggtgtgtgtatggccgttgtcctgttgaccggaggcgtgcgcagcggcaaaagcgccatggcccagcggctgctggaggacggcggagaggtgctgtatatcgcgaccgcccgctgcctcgacggggaaatggagcggcggatcgcgctgcatcgggcttcccggccgtccggctggaaaacggtagaggcctccgcccggctcgaccgggtgctggaggagaatcccggcggtgccgtgctgctggactgcgtttccaatatggtgaccaacctcatgctcgacgccgagccggattacgacgcgctgtcccaggcccgcgtggaagagatcgagcgggatgtcacagccgaattcgaccgcctgatggataccctccaccggcaggggcggcgggcggtgatcgtcaccaacgaggtgggcctcggattgatcgccccataccggctgggccgggtgttcgccgatatattagggcgggtcaaccagaggctggccgcccgcagcgacgaggtgtatctgcttgcctgtggcctgccgctgcggctcaagtgaggcggcccgggaagataacggatgtagaatgaaaattttggaggatatgaacatggactgcaaaccccttttggacgccattcgcgacaatatccggcaggtgatcgtaggcaaggaccgtgtcatcgatcacctgctgatttcgctgctctgttccggacacgtcctgatcgaggacatgccgggccttggaaaaaccaccctggtgtcggcgttggcggcctcgctcggctgttcttttcgccgtatccagttcactcccgacgtgcttccgtccgatatcaccggctttaccatgttcaacctcaaaaccggggagcaggagctccatcccggcagcatcatgcaccagatcgtgctggccgacgagatcaaccgcaccagtcccaaaacacagtcggccctgctggaagtgatgcaggagaatcaggtgaccatcgacggcaaaacctatcccgcccccgcccctttcatggtcctggcgacccagaacccggtggaaatggcgggaacgtatccgttgcctgaagcacagctcgaccgcttttttatgcgaatttccatggggtatcccactcatggggaggagctcgaaatcctgcataaccaccggtcccgccagaaggcggtgaagctgcaggcggtggccacagcggaggacgtgctgcacatgcagcagggcctcgacgagatcctgtgcgccccgccggtgctcgattacgtcgtgtccatcgtggaggccacccggtcgctcggtgaggtcctgctgggcgtcagcccccgcggctccatcgcgttgatgcaggcggccaagggatgtgccctgcttgagggccggcggtacgtcctgcccgacgacgtgcagcggatggcggcccccgtgctgtgccaccggatggtgctgcgcacccgggcggggatgcagcgccagacgcctgaaaccgttctggacgccgtgctgcgcgccgtcccggtcccttcggcgagatgacggcgcggggacgggttttgtcggtgtttttcgcactgctgctgctggcggggctcgccaccggcatccgtgaaatatattacggggtatttgtcctcggccttttgctgatcctgacattggccatggcgttttgtggggtgttttccctgcgtgccgcccagtcccttcctgaccgtctgaccgtccggggggagggagccagaatccagatccgcctgtcgggatgggtgctgctgccggtgacgctggaagtccggctgacggtaccggggccgcctgtgcaagggaaaaaagagcgcctgcaggaggaatggggcactctgacgctgtggccctgccgtctggacagactgctctctatcacggtggcgtgcaaccacagaggcgtatggccggcggggctccgccgggtgtatgtgcacgacgtgctgggcctgttttcattgccgctcaggcggagggctctatcctcctccgaggagcctctgatcgtctatccgcgtctgtatgagctggaggcggagatcccctcccttcccaccagcgcggattattcggagaatcatcccatgaccgcggatcatggggattccttcgccggtacgcggctttaccgggacggtgactccctcaaacgcatccactggattcagaccgtccgcacgagagagctctatacccgccagtacgagatatcgaccgagcagtacggtctcctgatcctggataccgaggtcccgccgacgataaaccggctggcctacggggatatggccggggaggtggccgccgcgctggcgctcaattatctcgaacgtggctgcccggtccgccttctctgcctgaattccgaagcgggcgaaggaccgtcggaggattgttccgccgccgggcgggaggaatttttcccgatgtatgagctgctcgcgaccgtcgcctatacgcctaacccgcagccgctggacgcatccagcctgctcgacggaaactggggacaggtccgtaccatccatctggtgacctcccggccgtccccccacctgctcgaaaccctgcatgtgtttacgcagcgccgctgccgggcggtatgcatcgtgccgatgatggccggcgcggcgccgctgataccgctggccggggaactcggtgtgcgcctgctgccggtctcccgcccggaggaaatcgcggcccttggtgattgcctatgatactgcaacgcttttttcaggagtataagaaaagcctgtccgaccccgacctgtggctggattgcctgtccacatggcttctgtccgtgggggcgatcctggcgttcgaccagttgttccgtttccatgccgagctgggagagatcctcttgttcccagctttcctggtcgttttgctggcggtcctgacccggaagggatggctgcttcccaccctcgtgctggggatcggctgcctgtatatcgcgctgctgtcggcctcgggagagctggagggccggttggaatacctgttcggttttctgaagtggtggatggatctctttcccgtccgctcggtgtacaatacggcggagaatatccagctggtgatgcatatcatccagctcctgatcgtcggcatcatcttcttctgtgtacggattctgcgttcagttacggcgatgggcctgatgtccctgctgatgtttgcggcgatcgtcgccggcggattccgccggaacatcggccccatgacctgtatggccgtcggcctgttcccactgatcgcccgcaacttcgccgcggcgcagaaccgcccgatgtcgcggcggaaccgccctcggatccagcgtctgaccccttcctggagccctcggatcgcggccgtcgccctgtgcggtgcagtcggcctgctgtccatggccctgctgcctggaaataccgcccactggacgagcgcgggtatgcgacagctggccacccggatacagcgggcgacgaatatcggctccctgagcagtcttaacctgttccagccggccgagctcgaccggctgggcttgatgccgaatctcagccggctgggagggcccctctccagtcagagcaaagcgacggtgctgaagctctatgccgatcagccgctgcttctgcggggcacggcatacgatacctatacggggtcgagctggaataccgattgggatgagaagaaatcgggccggtatgtgtacggtgacgcagccaacgacgcacaaaagcggctcgcgttcggtctcgacctcccccttgccgaaacgagcctgtattcacaggtgatccgcggcatgaatgtccgggtggaactttaccaaaacagcaccaacctctataccgtcggccgtacggcctcgattcagacggaggtgagcgggacggatctgtatttcaaccgccgcggagaggtgtttgcccaaaccaatatgcgggcgccgatctcatatacggtgggcgcgcgggttttcagccgttccaccgagaccgaacgcagcgagctggcttacatcgcctcgagggccgcgcgggacgccgacccgcaatacgagtcggtcgccggccagtatacccagctgccctccaagctgcccgaacgggtgcgccaggcggcggcggacgctaccctcggcattgtggagccttataaaatggcagaggcgctcgagacctatctgtcctccaatttccgttatacgctcacgccgtccaatgtgccgtccggacgggatttcgtcgagtatttcctcgaaaccggggaaggctactgcgtgtattttgccagcgccatggcggttatggccaggtcgctcgggattccgtcccgcatggtctgcggatatggggtcaaacccgcgggataccatagttggatcgccaccgggaccgaggcacacgcctgggtcgaatgctactttaaagggctcggctggatcgaattcgatccgacggcgggatccagtttcctcagacaggcgggaggcggcgcggtttctcccggagagggtaccaccacgcaaatcaccacgtcttcttccccggatgggaccaccacggccgggccggagggcacgacgacggggatggataccaccctgccgggggacatcacgacgggatcgggcggcacgacgacggcggcgggcggccccggttcggaggagtcgggaatgccgacgggactcctcgggcggatcttcggcattgccggaggtgtgcttcttctggcgctggccgtcgtctggcgggttctcgcctgcgcgaaacggtaccggctggacgccgtccgtcaaaaacggcggaggcctggagaacaggcagaatactattacgcggattacctgcggcagctccatctgctcggttacgatcccctggccaacgaaaccatgaaacagttcgccggacggatccttacaaaaccggatggggacgccgcgtgcgcggtgccaggcacggcgcaggaggttttccgtctcatgatggactggcggtatggggagcaggagcctttgcccgaagaggtggaacggctgtccgtattgcatgaggaactggaagaattggtcaaaaaacgggttcccgcggtggtgtacctcgtccggcgggttttgatgctgggcggctgacacgccgccatcccattgctcgaaaggagctgttacagtgaaagacggttttttacgggtggcggtggccaccccggagattcgggtggcggatccgtcccataatgccggtcagatcatccggctggccggagagatgccgccggataccgcgcttgcggtgttcccggaactgtgcgtgaccggatatacctgcggcgacctgtttttacagccgctgctgctccgggaggcggagcaggccgtcgtgcggattcttgatgcctctttgtcggtcgacgccctgctggtcgtcggggtgccggtgccgtgcggcgcgtcgctctacaactgcgccgccgtatgccagcacggaaagctgctgggcctcgttccgaagtcccatatcccttcctattcggaatactatgaagggcggcatttcacaccggcggacgatacctgccgggatatcttctacgccggccaggacacgatcttgagccgcagcctgctgttcgtctgccggaacataccggatttccgggtcggggtagaggtgtgcgaggatctttgggtggctgaccagccgagcagccgtcttgcgtcggccggtgccaccgtcattgccaatctctccgcgagcgacgaatcggtcggaaaggacgaattccgccgtcagatcgcgatgacccagtcggcccgcctgtgctgcgcgtatgtgtatgccgacgcgggcgagggggaatcgacgggagatctcgtattttccgggcagaatatgatcgtggaaaacggcgtaatccttgcggagagcgagcggttcaccaccgggctactctataccgaggtcgatctggcccgtctggcgtacgagcggcggcgccttaacaccttcactcaggatgccgggatgaaaaccgtgggtttcgaactgcccgaaaggccccttgccctcacccggaagatcgatccccatccctttgtgccgtcggcggaaagcgccaggcggaaacgctgtgaggatatcctgacgatccaggcggccggcctcgccgcgcggctaaggcatacgggctgcaaggctgttctcggcctgtcgggcggactggattcggctttggcccttctcgtcgcctgccgggcgtgcgaccgcctgaaccggccccgcgccgacatccgcgcggtgacgatgccctgtttcggtacgaccggacgcaccctgcagaatgcccgccggctggcgcgggcctgcggggccgagctgtgcgaggtgaaaattggtgagaccgtccgcgcgcatctgcgggatatcgggcatgacggacggaccgacgtggcctatgaaaacgcccaggccagggaacgcacccaggtgctcatggacatggcgaacatggaaaacggcctggtggtcggaaccggcgacctctcggagctggcgctcggatgggcgacatacaacggcgaccacatgtccatgtatggggtgaatgccggcgtgcccaagacgctcgtgcggtatctggtagaatatgaggccggccgttgcgggggcgagcttggggaagccctgcgggatattttggacaccccggtcagccctgaactgctgccccccgaaaatggtgaaatttcacagaaaaccgagcagatcgtcgggccgtatgaattgcacgactttttcctgtaccatctgctgcgctttggaacaccgccgtcgaagatcctgcgcttggcggatactgcatttgccgggcggtttgtgcatgaggagattcggaaatggctgaaaatttttataagacgctttttcagccagcagtataaacgcagctgcctgccggacggcccccgggtgggaagcgtcgccctgtccccgcggggggactggcggatgccttccgacgccagcgcggagcgttggctggaagagctggaatctttataaaaacagccgcggacggtgacaggtccgcggctgttttcgcgtgtggagctgtttgtttttcctttgacggcttatccaactgcgccaattcggcagggcttgtatcccggtatttcggtccttttccccctttttctcgccggacaagtatgctataatagacacggcccgttcgttatcccgatatggacgaggttcggccgtgtcccggaaaacgccgctgacgttttcccggggatgtggaaaaaaggagcgtaaaatcatgattttatagccacctaagctctcggggcggcagcccctttatgtatgggcgtcggtttaggagattccgtacccgccgattttcatgaagagaaaatcggcacattctctgggagtccgggggcgaagctcccggcggcgtttttgcttccttttgtcgctacgagctgaaactcggacaaaaggaagtggccgcgcagtcgatatcttttttgggtaggattgcgttctttatgcgcggacataccgccgaagaaagaaggcaaagacgtgccaagggggttccccccttggaattcccaggcagcttgccggttttcatggtgagaaaaccggcggcagcgttatcacctgaaccatcccatacaaataggggctgaggtcctaggagttttagtggtcataatcttaatatgtgacaagagccgttcgcggcgatgagactgaaaacgatggaaatgaggagtcggcaatggcaaatgtgattcgcatatttgtggaaaagcgggaggggttcgatgtcgaggcgcggcagatgctcgcggatctgcgggataacctggggatgacccagctgcgcgccctgcgcatcctcaaccgatacgatgttgaggggctctccgccagcgaattcgcgcgggcgaggggggtcgtcttttccgaaccaaacgccgatgtggtatatgacgagaccctgcccctcgagccgggttggcaggttttcgccatggagtatctgcccggccagtacgaccagcgggcggattcggccgcccagtgtgttcagctcctcacccagggggaacggccccgggtgctcaccgcccgggtgatctgcctgaaaggggagctgtctccggcggatgtggagcggatccagcagtatctggtcaatccggtggaatcccggctggcctcccttgacaagcccgagaccttggatatgacctccgcccgtcccgccgatgtggcgcgggtggctggatttatctccatgaaggcggaagaggtggaggcttattggaagagcatgggcttcgccatgtcgccggaggatctcctgttctgccagcggtatttccgggacgaggagcggcgcgacccgactgtcaccgagctgcgggtgatcgacacctattggtccgaccactgccgccataccaccttcctgacccgtctcgaaagcattgaggtggagccgggcgcgttgtccggcgccatcgagactgctttgcaggcctatatggaggcccgacgggaggtgtacggcggccgcatcggccaaaaaaacgtctcgttgatggacatggccaccatggggatgcggatgcttaaaaagcagggccggatcccggatctcgacgagtcggaggaaatcaacgcctgctccatcgaggttccggtttccatcacccggccggacggggaaactgtcaccgaacaatggctggtgcagtttaaaaacgaaacccacaaccaccccaccgagatcgagcctttcggcggcgcggccacctgcctgggcggcgccatccgggaccccctgtccggccgggcatatgtgtaccaggccatgcgggtcacgggcagcggggatccgcgggtctctctggaggataccttgcccggcaagctgccttcccggaagattaccaccggggcggcggcaggctattcctcctacggcaaccagatcggcctggccaccggccaggtggcggaaatttatgatcccggttacgtggccaagcgcctggagatcggagccgtggtaggcgcttctcccaaggagaacgtggtgcggggtatcccggcggcaggagacatcgtggtgctgctgggcggccgtaccgggcgggacggctgcggcggcgccaccggctcctccaaagcccatacctccgagtccatcgacacctgcggtgcggaggtgcaaaagggcaatccgccaaccgaacggaaacttcagcggctcttccgggatccgcaggtttcccggatgatcaagcgctgcaacgatttcggcgccggcggtgtctgcgtggcgattggggaactggcccccggcctggacatcgagctggaccgggttcccaaaaaatacgagggccttgacggcaccgagctcgctatctccgagtcgcaggaacggatggcggtcgtgctggaggaaaccgatgtcgccgcctttattcaggcggctgaaaaagagaatttagaagcaaccgtggtcgccgctgtaacacaagaaccccgcctgcgtatgacctggcgggaggatacggtggtggatatcagccgggcgttcctcgacaccaacggcgtgactcagacggcgaaggccgtcgtcacggcgccggatccctccgccgattaccgcgaggcgatcccggccggcctggctgtgatcccgctgcgggacgccttcagggaaaacctccgccgcatagaggtggcctgccagaaaggcctgtgcgaacggttcgacgcgagcatcggcgcggctacggtcaatatgccgtttgccggccgctaccaaatgacgccggaggagggaatggtggcgaagctgccggtcttcgagggggagaccgacgacgccaccgccatggcctacgggtttatcccgggcatttcgaaatggagtccgttccatggagcggcctatgcggtcatggtttctcttgcgaagctcgcggccatgggtgccgccccgctggacgcccgcttgaccttccaggaatatttcgagcggctgcgggaggatccccgccggtggggcaagcccgcggcggcgctgctcggcgcgtttttagcccaaaaggagatgggggtcccctccatcggcgggaaggattcgatgtcgggcagctttaatgatctggatgtgccccccacgctggtcagctttgcgctttccatgaccaaagcgtcccgaaccggttccgccgccttccggaaggccggctcgctcgtggcgtttctgcccctgccagtggatgaaaagacccggctgccccgctggaaagaggccggtgagcttctcgacgaggtggcaaagctggtgcgtttcggcgtggtcaacgccgcgtcggtggtgggagaaggcggcgtggccgcagctgtggcaaagatgtgcttcggcaaccggatcggcttcgctttcaatcacgatgtggaccgccgcaccctgttcgccccgctggcgggttctctggtgttggaacttcgggaaggggacatgtgcctcgaaggcgtcgagtataccctcatcggcaccacgatcgaccgtcctgaaatcgtcctggatggggaagaaatggagctcgacggcttgacggaagcctggatgcggccgctggaatccgtattccccaaccggtcggccggggacgcccccatgccggtgaacgtaccgctgtaccggacgcgggagacccgcgcacccgctgtgaaagccgcgaagccgcgggttttcatcccggtcttccccggcaccaactgtgaatacgataccgcccgcgctttccagcgggcgggcgccgagacggaggtgctggtggtccggaacctgtccgccgcggcgatcgaggaaaccatcgggcggatggaggcggcggtccgccgtgctcagatcgtcatgctgccgggaggcttttcgggcggtgacgagccggacggttcgggcaaattcatcgccaccaccttccggaatccccgtctggccgacgccctgtccgagctcctcggtcatcgggacgggctgatgctggggatctgcaacggcttccaggccctgattaagctgggactcctgccctatggcgagatccgggatctgtctcccgccgacccaaccctgaccttcaacaccctgggccgccatgtcagccggatggtctatacccgggtgacctcggtcaaatccccatggctggccggctgtgaggccgggacggtccacgctgtcccggtctcccatggagagggccgcttcttcgcggacgaggagacggtccgccgcctggccgaaaacggccagatcgccacccagtacgtctcgccggagggagtgccgtccggcgatatcctgtggaaccccaacggttcggtctgcggggtggaaggcatcacctcgcccgatggccggattctcggcaagatgggccacagcgaacggcaggggaccgatctgtacaaaaatgtcccgggagaaaaggatcagcgcctctttgcgagcggcgtggcctatttccggtaagcttccacggccggcgggtttccgccggcctttttggcgtggatacgtttgcagggccgccttgactttcccgcccggataccatacaataagaaggtatgattgaagagtgaggcggtccctgcggccggcaggaaaggtgggtgaaagagcatgcgaaacgataaacggcggtggctcccggccgttctggcggggctgtgcgccctgctgctgtcgggctgcaacgcgttgggcctcgatgtggaagattatctgcgtcccccgaaatccacaggggaacaggaggcgatccagcaggctctggaaacctatattgaagcccatgccgaaaagggcggtgtgaccgattatattttgaaatatcccaaagaggggagctatcgttcggcgttcatcctggtcgatcaggtgcagccgaaccggctgggcaacctgtcggcctcttcactgaccgaaaacaagcgggcggcctcgaacaccatgagcacagcggaggcgacgcaggcggtcgcgttttaccgcctggacgtggaacaggccaaaacccatgtcaactatctgcgcaagatcgatgatgaatgggtgtcggtttcggatgtggagggcagcagcgaaggggtcagccgcgtgtccttcggcgacctcaacggagacggcgctcccgagcttttggtcggctggagccagtacaatacccgcaatcagaaactcgctctgtatttcctcaacgacacgctcgaggaacaggccgtggacgagatttatacccatatgctggtcaacgagtttactggctcgggccgggatgacttgatgttgttcagtgccacgggcgcggatgccccgacctctgtcaagcttctgtcctatgaggacggccggcttgtctcgcggggcacggccgagctggatgcgggcatccagcggttcggcacatccaagacggtggcgctgtctgagacggtaaacggcgttttcatcgactgctataaagatccaaacaccaccattacggagctgcttttttgggacgcgggagccgacgagggacgggggaggctggagacgccgttttatcgcgccgaggacaagctgacgaccctgacggccagggaatcctccatccccttgatggatatcgacggggacggtatggtggaatggccgctgagcagccggttgccgggatacgagacggtcgatgccgccgacgcgctgtggaaaaccacctggatgacctgggattacgctacccgccaaagccggcaggtgttttcctgtgtcatgaatgaacgggatggctattacgtgctgttcgacgaatcctgggacggaaaggtgacggcgatatacgaccgggacacccgtctcctgcagttcaggttggtgggggaggaaagcacgaccgccccattcctgtcgttcaaggcggccgcgtcgagcgaatcgcccgaggaagggggctcgtccttccatgtgctgtcacagctgggcggggtacagtacagtgtgcgctatacgaaagacgggccgtttgccctgaatatggaacggatccggtatatgttttcgctgctgccggctgaccggtaggcggggagggagtcgcagggatgaaacggatattggtttgcgaggatgaggcgtcgatccgcgaatttgtcgtcatcaatctcaaacgctccgggtacgaggtggtcgaggccggttcgggggaagaggcgctgaaaaaattcgatgaggaccgggacggcatcgacatggcgctgctcgacatcatgctgcccggcatggatggctttgccgtctgccgtgagctccggcagcgcagcgagtcgatggggatcatcatgctcaccgctcgtacccaggaaatggagaaggtggggggcctgatgatgggggcggacgattatgtcactaaacccttcagcccctctgagcttgtggcgcgggtagatgcgctgcagcgccgcgtcgcggccgtgcgggcgcgcaatgaggtcaattatctggaagagctccattcgggcgattttatcctgaatctgcgcagccgcaccctcaaaaagcggggccagcccgtggaactcacccaggtggaatttcagatcatggaatattttttcaccaatcccggcaaggcactcagccggacggatatcctgacccgggtatggggagaggaatatttcggtgaagagaaaatcgtggatgtgaatatccgccgcctgcggatgaagatcgaggataccccttccgagccgcgttatatcctgacggtgtgggggctgggctataaatggaacgcctgaggccgcatcggggagacgtgtgttgcgttgcggcggtctcttcccctgcacggctgtaaaacggttcggacacggatggaaatgtcgaaggaagaagggcgggtgaaagcttggcacgcagaggcatcacgaggcgttggattctcaacggcctcggcgtcatcgtggggctgctggtggtgtttgaagtggcctttgccgtggttatccgctcatattattaccagcgggtggaaacgagcctgtacacccgggcacgaagcctgtccgatcggctgagtgccgaagtcaagcaggattccttcgattttgagagcagcgcctgggaagaggtggagcatttccaggacaaggaacgggagaaaatggagctgcaggtactggacgctggcggcaatgtgctggtcagttccacgggcttccgtccgctggcggatgaaaagccggactttgtgcaggcactgcaggccgtccagcgcaacaccgacgaggaccggggcgtgtggcggggccgaaacgccgcgggggagaagatcacggccatgaccgtgctggtccggtattcggacggcaccatctgcggtgcggtgcggtatctcgtatccatggaaaaggtggattcccagattcttcttctcatcgcggtgatgctgcttttcggtatggcggtcatcttcttcgtcatgctgtccagctcctatttcgtcagctccatcctcaaccctatcaccgaaatcggccaagcggcgcgtaaaatcgcgctgggggattatgattcccggatcgaaaagcggtatgacgatgaaatgggcgacctctgcgataccattaactacatggcaggggaaatctcggcggcggaacggatgcagaacgattttatctcctcggtgtcccatgagctgcgcacccctctgaccgccatcaagggctggagcgagacgctccggcagggcggtgcggcggacgaggaactgatgaacaaggggcttgaggtcatcagcagcgaggcggaacgcctgtccgggatcgtggaggagctgctcgacttttcccggatgcagggcggccatatgaccatgcggttcgggcggatggacgtgctcgccgagctggaagaggcggtggtgcttttccgggagcgcgcgaaacgggaggatatcgatctcgtgtatatcgagggagagaacctctcgcccatcacaggggataaggaccggctcaagcaggtgttcatcaacatcatcgacaacgcgatcaaatattccaatgcgggcggacgggtacgcatcgaggccgttcagatgggcggcaacgtccagatcgtcatcagcgacagcggcgtggggattcccaagagtgacctgcccaatatcaaaaacaaattctataaggccaaccggacccggcctggttcgggaatcgggctggccctcgcagatgaaatcatccgccgccataagggccgcctggaaatcgacagcgaggaaggcgtcggcaccaccgtgaccatcacgctgcccacggccgagccgggataaggatgaaccatagtcaagacaatgaaaggtgtggtcggatggccggcaagccggaaaataccggaaaaaagacctctattggagggcaggcgctgatcgagggcgtcatgatgcgggggccgaaggtcaccgccatggcggtgcgccatgtctcgggtgaaatcgtgatggagcagtgggcgacctcggggcagagcaagccacgtgtctggaaaacgcccttccttcgcggcatttacaatatgatcgactcgatgcgtttcggttacaagtgcctgatgcgctcggcggagctggcggggtttgaggatgaggaaccgaagaaaaaggtgacggccatggatgagctctcggccggcccaggcccggacgctgaagaagcggttccgccgggcccggcgcgaaccgggttggaaccggaggagcctgtttcggacatcggagaagagtccgcctcgccggtacctggacccgaaaccaccgctttgccggatccggcggtccagcccgcggccggtgaaaccgccaaggaggaagaaaagccgcggggctggttcgaaaaattcggaatgacgctgcttatgaccttgagtgccgtgatcggtgtcgcgctggcggtcgggctgtttttatatctgccgtccttcctgtacaggtggatcgccggcctgctcgacagcgctaacggctggaacctggcaggtaattcctttctgcgcggcgtctgcgagggggtgctgcgtctgatcctgttcatcgggtatctgctcctcgtgaccctgatgaaggatatgcggcgggtcttcatgtaccatggcgccgaacataagacgattttttgctatgagtcgggtgaggagctgacagtggaaaacgtccgcaagcaaaagcggttccatccccgctgcggcacgtccttcctcgtcctgatgctcctcatcgggatcgtggtttcgatctgcatccagattgagacggtttggctgcgggtgctcatcaaaatcgcggtgctgcccctgatcgtgggggtgggctatgaactcatcaagctcgcgggccgtaaggacaatgcctttaccagggcgatttcggcgccggggctgtggatgcagcggatcacgaccaaggagcccgacgacagcatgatcgagtgcgccatcgcggcgctgaagccggtgatcccggagaacccggatgaggacaagtggtgaggcaaaggggcgtgaaaggccgatgacctatcgcgcactgcgcgagcagatacggcggcaattggaaaaggcggggtgcgacagccccgcctttgatgcggattgcctgctcgaagacctcggcggaggccgggacgccgcccattccgaccgcgatgttccagaggagtgccgccttgccgtggaacgggcggcagcggaacgggccggcgggcggcctttgcaatatattttgggcagatgggggttcctgcgtctgaccctggaggtgggggaaggggtgctcattccccggcccgagaccgagcagctttgtctggcagcggcggaccggctccgcgccgccgcagacaggccgcttcgggtgtacgatctctgcgccggatcgggctgtgtcggcctggggctggccagcctcctgaaaggggtggaggtgacagctgtggagctgtctccggaagccttcgtctatctcgaacgcaattgcgaggcctatccggcctatgccgtcaggccggttctagcggatatctgccgggatgccggccggtttccggaccgggcggacgcgatcctttccaatcctccttatatcccggccggggagcttcccgggctgcagcgggaggtgcggcgggagccacggatggcgcttgacggcggggacggcctgcgtttttatcgcgtgatcgcggatgcctggcttccgaaacttgtacccggtggattcgtcgcggtcgaggtcgggatcggccaggcggaggccgtggcagagctgtttgcacaggcaggcctgaaagatgtcgggatcctgcccgattatgccggtatcggccgggtggtcttgggtttccgccctatataaagacaaaatagagggaggggcgccttgcccctcccttttcgtaccggccggctgacctggccgggatgaaaagccttatggcacagaatcaagcggcgtttgacaaaaaacagatgagataacctgcaagggggaagatgaaattcggctgtactggaaacggcgattgacaacatctttatcggaaccctatacggaggggaccagagtcgcagaaacgacggtgcaatggaggattctggtatgatcattgggtcaggaatgtgacggaatacgcccgtaaatatggtataaaatgagtggaaacgggtcttgcttatctctctttctctttaattggaatgagcaaatcaagctgtacattatcatattttccatctgaaaatgtggttacgttatttatataattcaagctttcctccaagcatccgaacatattagagccatcccaggttcctctgtacgcatatttttcgttttcgttcaaccacttaaataaccagtcccacccttcaaatgcccctattggaatcatatacgcggcgtacagacctccttcaaaacgtttttttacaagcggtttgggaacatccatatcatccgggatagtgacccacatctcgtaaccatggtggtttgtcccgtcttctggatttggactattaaaaccataatggcgtaaacccggatagatagctggcaaattgcgatcaaccacaaatttgtctattaccattgccgcatgatgttccggctcatcgccgatataatgacttgctgccaccgtcgccggcggcagatatacaatccgcacatcccggtcagttagcttgttcagtctttcgcttgccatttccaaagctgctactgttttttcttctttgagcggtattttctgcacggtaagcgtgtctacagcttcgagcaaagcggtatcgtccagtagatttagcttaatatcctgatggatgctctctttcaggcgtgcaataaacgtgttgataatatcccgaatagtggatagcgcggtaatttcatcgtccacttctgcaaggttctgctggaaagcgtcgatgatcgccgttgtgttttcgctttctaaaatcaagccgatttgttttaatggtatccgcagctttcgcagtacaacgatttgctgtaaacgcatgactgtcgtttggtcataggtccggtaagcgtaatcctcttttttaacgctctcaatcaatccaatctgctcgtaatatcgcagggttcgggtggaaatgttcatttttcttgatatttcgcttatagtggttaatttcatcgtagttagctcctttgaatttttttcggaaaaaccggggtatattcagtataaactatgacatcgcgtcaaagtaaaggggtaactcaatatttttaggggtaaatgttaattatcaacttggggttgtgtttaccggttatataacctcaaaaagaagtcgccacgaacgatctgccatctgcggcggcccggccgccttgtcagtcgccgatccctgctcgcttcttccgcacaggcggcgtttggattcgagctgcatgtatcaacaaaacgaaagacaggcaaacgcctgtctttcgttttgtaaaggtgagacaaaagagatgcacctcaaaatttaaaacacgacacaaaccctcgcgtcaaattggtacgcatgtgaaggatcatatcggcggcaagctacgcgataatcctcacatgaaaaatcaatttatcaacatgcaaacatcaaaaagcattacatcggcctgcctgtatctaatacgaagccgcagtatttacactttgaataataacctgtcatgacttccgatccggcaccgcaattcgtacaataaactgtttttaaagccccgtatgcattataatttgggaagagcaaaagttcatttttctcatcaatataagcatctgcaaataatccgtagctcattgcttcgcgtatatttaatattgtcttttctctggtgcaattcattttatccgatagccactttattggtatgcttttctgatttccaattaaggctgtatatcggttgaatcttttattgcgtctatttaaaataaaaagctttacaaaacaaaaaatactcacgatggtgaatacggaccctgttattatcccaggccatctgcttgcgccttctaccatatcgccaaatatggacatgggcagcattaagcccccgaaaaacagcgcaatacttccgcctacactaagtgctgcttttaaaattaagttatttgtcttcattatacatccctcgacttaattatagcaaaattccgccataataacaatctcatttttcgacagatttatacaatgatacgattatataaaaaagatccatttcaaccaaaattcttagcccggatatgaaaagagactgaatgcgacttgcgttcagcctcagtctgtaagggtgggataaaaggaatctccagccgttttttgagtgaaaattgaactctcgcattgaaattatgctcgtagatttcatttacaatttcctcgcttaaaaataattgattgaggaaatttttgggctttataaggtgagtaaaatcgtgaactaaacgcataatcgttatctaatgtttttctgtcggtttcttcaataaccctttcaacagcaaatccggcttttgcgagtatgttgatgtaatcggataatcgtctgctataaagtgttagagaatattcactttctttgttgagatccggattgttgcgatcagcagggacatttatattctttttaaatgtaaacggttcttcttcaaaataactgcctgaaaaaatcaatgtattctcaaaggcctcgatacagtgcataaatggatgatcccaactaaatatgaaaacgccgtcttgctttaaataggatgaaacaagattaagtgttttttgtatatccatcgcccagaatattgtcaaagcaccagtcagaatggcatctatttatgacgataccgaaaaataagtttgaaagtttagtgtattcttattcaagaacttcgcggctgacagtcgcataataggagtcgtctaatatatacttgatactattgctataataatgatggtcatgcccattttcattttcaaaccgaccgtgaactcacagggttaacatgctaaagatttttaaatgcagtggataatatttctctaaatgccgaattgttcttttttattacggcgacaggataaaatacggggtgcaagagtacttcccctacaccgctcctttcttccggacgtcatgctcgtggtgtggatagaaatggtgagcgaagaagagcccgtgagtgcaatcacctggtttttggggggatttggacgctggattccctaacatctttctgagcctcctatctccaacaaaaacaaatcaaaaaaagcttgccctgggcgtcgccgtcgggtataatcagggcatatccgaaagaaaagggtgaggcaatgcggggaatgcggcggatctccaagaaagtaaactatcaggaagccagagagatcctgtatcgtgcgtcctatggggtgctgtctacggtttgtgacgacggaatgccttacggtgtgccgctttcctatgtgctgacgggtaactcgctctatttccattgtgccaccgagggacagaagctggacaatatccgtcatgacagccgggtgtgctttaccgttgtggccgaatccgggtctagccgtgaccatttgacgatggagtacgcgagtgccatggcgtttgggaccgcgcatatcgtatatgcggaggatgaacgtcaggcaggtttccgtctgctggcagggaaatatgctccggagctgaccgaagaggcgctggatacgtatatcaagtcctgcgcggaggaggccacggtggtacgtatagaggttgaatatatcgcgggcaaggccaaccgtggggcggcgatgggctgaagcccctgcatcggagccagggggtctagagatacaaataaaagcaaccggctgccaaagacagccggttgctttctatcctgtctacagacgataccttcaaatccataataacgccgtttaattggtcaacatgtagctttacagttgttcaaagcctttttccattttggccggtttattgatattcatacgttttatccattatcgaaatatgcatatcatttggtttatagtcgagtaattcggatttgggaataaacagacattccataaccttactttcgcttgcggataaatcaaaaatattagagcctgttgtattttgacctttaatgccagttaaacttttacagccaggccagttatcttctaacggtataaaaaaccagcctgttatctcgaaagagactggaaaagtattcgcattttctattagaagctgacaccgtatgatgccgttttctttatcaaactcagttttttgtaaagtcgatttgatcgcattttcgcccatgggcagataatatttgtcattattactgtaaaaatgatccgacaagaaaaattcctgaaataccctgacatagacaccatgcgaacatccgtccgttaaaacctcgccatcatagaaccattcttttatttgtttaatggtaagcaatgaattgactgaaatactggtatcatgcagaaaatcaatataggctataatttctgggctgactgtattgaaccatatttttcggagacatatgatcatattttgattcaattgtgcattcagatcatctatatattccacatagtctttacaggtgagcttcatccattcctgtatcatcccgtctctgacctcaagttgaacataatgattttcggaacggaaaattgctcgatgaggataatcgaaatcatatgaaacacttatttcttcataagaaatatgatgcttaacagatgggaacaatatgttggttgcttttcttttttgagcattaaatcttatataaaggtcatcggtatcttgttcatctttgttattctcttgtattcttttccatccagttgccggatatttattaattacattatatatggttgtaacaattttagactttaaatcatttagattgtcccaaaaacaaaccagtccactattttggaccttagttttaaaattttctaatttttctctattagaagagttcgtttcactcttgttataagccagactttctggattgctatggatgaaagcgataactcttacaccttttaatacagcgtaatcatattcttcctctgtataactaataccggattttgtaagagagccataccttccgccgattattaacagataataatccgtttggtcaatttcctgttttatgtgttctaactggttttcgccaaccgctccaaaaaattccattccggcaacaatattattggtctcaataatagcgttaatagcaacctgtcgttcgtcaactaaatccttgtaagttgaaccgacaaaaaattgatatttcaccattttaaaatcctctttcaaccaaaatctgatttttttcattatatcaaaacacactaaaatttgccagcctgtttctaatttaccagcctgtttttcagcgtaaaataaaatccgaatcactttctgaatagaaaaggattcggatttattcgttatggtaatgcttatttgaacacgcccattttgaataagcattatctaaaatagattgtctgcgggcggcgataaatttttttatcatctcaaaatccgcttcatcagggttggtcacacgcataacatacagatcgcaagcacaaagtgctgaatatgttttgccaagtatatcaagctgaactccaagcttacacttgccgcccccgcggaaaagggcctggtggctgacaggataatcaaccatttcctatccaaattatttaagtatcgattcaatttgtcttgtatacgttccgcttgattattaaaatggtttctttcatctgcggtaaaaactttgatagcatatgtatcttttacacaagcttgtctcaaagcgatttccacacggaatacgcttttggttttatattttgattcataagtattgcagcgggtaagagtaaatataaattttcttagcttattttattatatcaaaaatccgccataaaatctaatcaaagattttatggcggattttggagcgggtgaagggaatcgaaccctcgtat

SEQ ID NO: 2469 - DNA, 2632 bp, Unknown
  16S sequences of unknown bacteria
tgaccgggggaaccccttttgacaaaggggattcccccggaccccctccctaaaacttttgaactgattatattggtgttggtctttctttcggaaggtatcgtataaattatcgctttacttaacagaacgcccgcgggggcttccgcgctcaggggattggggatgaaatccccaatggggctttggggcaacgccccaacatataaagctccccgcatggcatttgtaaaaatgccatgcaaataacgaaaatacggtagttgacgtgcagattcggaaatcgccatacccgtgtccggtgcgtcatgacgtgcaaattccaccaaacaaaattcaatctcgggaggtaatgctatcaaaaggattccgaatatactcggtcacggcgcgatgaccgaaaagctcagagaaagcgcgctgtccgtagtgccgatcgcggcgatagtttccgtgatgtgtctgtgcgttatcccgacggaaacagaccttcttctgagctttctcgtcggcaccgcgttcatcattctcggaatgggtctgttttcgctcggcgcagagcagtcgatgacccccatcggaaacaagatcggcaccgcgcttaccaaaaccaaaaaaatggggctgatactcgcggtcagctttgtcctcggcgttgcgataaccgtcgcggagcccgatcttcaggtgcttgcggacaccgttcctcatatcgattcgcgcctgcttctcataaccgtcggcgcgggtgtcggattcttcatgtccgtctgcatgttccgcataatcacgggagcgtcgctcaggatgctgctcgtcgggtgttatgcgctgatcttcattctcgccgcgttctgcgatgctgattttctcggcgttgcattcgattccggcggagttacgaccggtccgatgaccgtgccgttcatcctcgcaatgggcgtcggtgtctccaacatccgaagcgaccgccgcgcggaggctgacagcttcggacttgtcgcgctctgctcggtcgggccgatcctctccgtgctccttctcggattcttcagtccgggcagcgatgccgtcgccgatctcagccgcgcatcgtttgcggacagcacgcaggtcgggcgcgcattcctttcggcgatcccggaatacatggcggagaccgcgacggcgcttctgccggtcgtgacggtatttctcctgttccagatcattctgataaggatgagccgccgcagccttgcaaagatactgatcggaatattttatacatacgccgggctggtgctgtttctcaccggggtaaacgtgggattttcgtccctcggcgcgcagctcggcggtgcgatcgtctcgtcgggtgcaaagtattttctgatacctctgtcggcgctgatcgggtggttcatcatatccgccgagccggcggtcgccgtgcttgaaaagcagatcgagacggtgagtgcgggcgcgatcccggggaaagcgataaagttcagtctttccgccgcgatcgccgccgcgatggggatatccgcgctgcgcgttcttaccgggatatcgatcatgtggtttctcgtaccggggtacgccgtcgcgcttgtgttttcgtttttcgttccggatatttacaccgcgattgcgttcgactcgggaggagttgcatccggtccgatgacggcgacgttcatgcttcagtttatgatgggtgcgagcaccgccgccggcggcagcgttctgcgcgatgcgttcggcgttgttgcgatggtggcgatgatgccgctcatttcgatacagaccgtcggattcatatatgaaagaaaggcgaagagagaggcggaaccggagattgtctacggagacctcgagatcgtcgagctttgggaggagagcgcatgaattacgttatttcaataattgcgccgacggcggaggaaaagcttgtcgggatatgcgccgagcttgagataccgctgtcggtcgttctccgcgggcgcggaacggctgtccagagcatgctcgagctgctcgggatagaatcgtgcgagcggcggatattcatggcgcttgccgacggagagaagagcagaagatacatagcggagcagaagaagaagcttcacctcggtgtgccggggcacgggatcgcggttgcggtgccgataaaaagcgtgggaggaggcaaagcagtggcttatctgaacggaggcggttcgggtgcgaagtacgcgccgcctgagaaattcgcgtacgaggtgatcgtggcgatagcgaacgagggatacacggatgcggtgatgaacgcggcgcgtgccgcaggtgcgcgcggaggcacggtgatccacggaaagggaaccggggcggagaacgcgcagaagttctacaatatttcgatcgcggacgagaaggagatcgttatgatcgtcgcatctgcggagatcaagtcggagatcatgcgctcgattctcgaaaaagcaggtcccggcagcgacgcgggcgcgctcgtgttctcgctccccgtctcggaggccgccggatttgggtttattgaggaggagtaagttgaggagtgaccgggggaaccccttttgacaaaggggattcccccggaccccctccctaaaactttaaaact

SEQ ID NO: 2470 - DNA, 2516 bp, Unknown
  16S sequences of unknown bacteria
atcacgtatggagcgcatgatatttcagaggaggaaatttggaaagcagcagatatagcccaggcaacagagtttatctcacgactgccggaaggactggatacccctatttcccagggcggtaccaatgtttcgggtgggcaaaagcaacgcctatccattgccagggcattggcaaaaaagccggaaatctatatctttgacgatagcttttctgctttggattttaagacagatgcagcgctgagaaaagcgttgaaagataatatcgacaaagccacaatgatcattgtggcacagcgcatcagtacggtggtggatgcagagcagatcattgtgctggatgaaggaaaaattgctggcaagggaacacatgagcaactgatgaaaacctgtgatgtgtaccgggaaattgcgctgtcccagctttcagaggaggagttggcatgagtaatcgtcgtcctcaaagaggccctatgggcggagggccggcagcggccaggcctgcggaaaaggccaaagattttaggggaactttcaaaaagttaatgcggtatatccgcgcttactggttttctctgattgtgatgctggtgtttgccgttgctagtacggtatttaccatcattgggcccaagatactaggcaacgctaccaataagctggtagaaggcatcagccagcaaatggtctacgataaagttatagaacagcttccagagggcctgacgttgccgaagggcaccacaggcgcagacctaatggatttgatgccgcaggagcaaagagaaatgctcagccagttacagacagatatgttgatggatatgagctttgatcaaagaccttccattgacttttccggcattgccaatattctgctgtggctggtaggcttatatgctttgagttctatcttcaattatatccaaggctttgtaacgaccggcgtatcgcagaaggtagcctataatttaaggcgggatattgctgctaagatgaatcgaatgcccctgaaatattttgaccgcaccagccatggcgatgtattaagccgcatcacgaacgacgtggataccgttgcccaatcgctaaatcaatccatttctcagttggtgacggcgattacgacgatcttaggcgtactaattatgatgctcagcatctctatcacgatgacaatcgttgccgtgctagtgctgccggtatccatgctggttgtccgtgttgttgttaagcattcacagaaaaactttgttggccagcaaaatgcgctgggagatctaaatggtcatgtagaagaaatgtacggcggccatttggtaatgaaagtattcaacggcgaaaaggattctttggatgagtttcatgaactcaacgatacgctgtaccaaaatgcatggaaggcgcagttcctgtctggtttgatgatgccggtgctgaattttgtcagcaacctgggctatgtgggcgtttgtgtgttaggcggttatcttgcaaccaagcaaatcgtagagatcggagacatccaggcgttcatccagtatgttcgcaacttcaaccagcccattacccagactgcaaatatggctaacctgctgcaatctaccatagcggcggccgagcgtgtctttgtattccttgatgaagaggaagagccaagagaaagtgagcatccggtaaaactggatcatgtggaagggaaagtggaatttgatcacgttgtctttggctacaacgaagataaggtgatcatcaaagatttcaatgcaacggtacagccagagcaaaaggtagcgattgtggggccgactggggccggtaaaaccaccatggtcaacctgttaatgcgtttttatgacgtcaatagcggcgccattcgggtagatggcgtcaatatccaggatatgagccgggaagatctgcgttcgttgtttggcatggttcttcaggatacgtggttattcggcggaagcattcgagacaatatcgcgtatggaaaactagacgccaccgatgagcagattgaacaggcggcaaaggctgcccatgtggatcactttgtccgtacactgcctgagggatatgataccgaattgaatgaggaggcctccaatatttcacaagggcaaaggcagcttttaacgattgccagagcgctgttggcagatccgcccattttgattttggatgaagctaccagttctgtggatacacgtacagaggttttgatacaaaaggcgatggaaacgctgatgaagggccgtaccagctttatcattgcgcaccggttgtccaccatcaaagatgccgatatgattcttgtgatgaaagaaggcaacatcgtagagcaggggacgcatgcggagctattggccaaaggcggcttttatgccgaactatataacagccaattctctgaagaggccgagtaaacaaaaaagaaaaagcgcagctggttttttatcagttgcgcttttttgatttttatatttgattgctgtcggcacttttgg

SEQ ID NO: 2471 - DNA, 2391 bp, Unknown
  16S sequences of unknown bacteria
aaatttctcgaggaagtcgtaaacaccgtagatgcagccgcggtactgcccgccggtgatcgttacgtttccgttttcggcaacctcaaccgtaaacgcttcgtcgccgtgcgcgccgctcttatcctgaacgagtgtgatcgtgcgtcccgatgcgttattgtcgatctcgggataaatgccgcaggcgtcgccgatatacttgcggagctgatttgcagcgagagggtgaagctcgtcggcatcggcttcgatgcggatcgaatattccgagatatcgtgtcccgcgatcgtgagtttgccgaccttcgggccttcgccgtaagtcacgtcgagaccgctctcgcctttgcagtagtttgcgtaataacgcactccccggtcgaggccgtccgcggttttgccgaggataacggtatcgttcccgatgctccgtataacgtatccctcgctgcgaagtccggacatatccgcgccgaaggcgtcggcgtcatctgcgatcccgagaagaatatcgttttccggtacgtcagcgccgaggcgctcggtgagccactccgcggatttttccgctgacgacgacagcgcgcggacaggggacaagctttcgtttttttccatgcacccgttcagtacagccgaaatcgtgagtgccgcaagtgcagccgaaatcagttttttcatagcgcctcctcattacgaaataaccgttaccgtatgcgaagacacgcggcagtccgcgttcctgatcaaaattcatgcaccgatatttttccaccaattcggatacaattctgcagcaggcttattaatcgctgcggggttggtgacctttatatcaaagtccttcagaagagagtctgaatcggacatcgtcgtattaaaagttccgtcacttacgtcaaaacgaatcggatactttttgagaagttcggtgaaatatgcccatgtttcgaggtatgcgtttttctcggcatccgtaccgttcgtatacattgaatcatatgtcgaaataagtccgagataatacatctgagttgaaagtcgtattactctgtactcctgtgcatcactttcggcaatgcgcgcagcatcagagaacagagtcttcacgtactcgaaattatccgcaaagaaagcataatcgaatcggtcggcagggctcgaccatcccatcgtactccagcatttgtcgccgcctgcctgctcccagatgcggtaatactcgaaaacatcttcgtatcccggaccgtagagaatgaggaagtattcctttatcatatcaagaaattcctcgtccgtcatatcacagctccacgaaaggcggcgcgaaaaatagttcagtattccgtcagccggcgtctgcatatacggatcaacgataagtccgtatgtgccgcattccttcatgaggcgaaagtcctcgagcatgttgaacacggtgcagctctgtatcggaccggcgtaccatgttccggggtaataccaaacgccgaggcggtcggtcatcttgctccatgttctgaattcttcggcgtaggctatatttgatatctgctgttttttctcgcacctatcgccgttcagcggatggttataacatatatatttgttaagatcattatagaagcaataccacacggaaacattcgggctgagctttgttttctgcggtggcttggtggttccgtaatatgcaagcatctgcacatacacattcgggtcgatctccgcgattgcatccgcaatcgaatttgtcataagtatgattggcgcagcgttcgttctgtcatatgccacaagcttgcggcattcctcgcacgtacagaaactgcccgaatccacctgcgatgcatcgagatccttaatgtcacgccccaccagatatccggcggcaaggaactgcttaagctgggtagtataataatctattgctattgcgatattctcctcgttcgagaagcagcactgtctcgaatgtatagcaccgccgtcgtaatctacaaactttgtaatgacctgtgagaggccgtgcacactgtactgactcacgccgtatccgttatattttgcaacgccccttacctgatcgcggttcatcttcattttcagaacatgatcttcggcaggcatgacattcgaaggcggaacataagccgcacgactttgtatatccggcgcagatgtgtagctttgagccggaacattgcgtgactccgcctcataaacaaaatcgattattccgtcggcgtaactgtcgtgatatacaatctttacggtttcggtatagcatggaaacaaggaatcgtaatcatagaggaaacggtatcctatacatttctcgaggaagtcgtaaacaccgtagatgcagccgcggtactgcccgccggt

SEQ ID NO: 2472 - DNA, 3266 bp, Unknown
  16S sequences of unknown bacteria
ggcgcggacctcccctgcctccgcttccgtctcgcacccggtcaagcaggggctcgtccaaaccttctccgtctttctggacaccatcgtcatctgctcgtgctcggcggtcatgatcatgttcttcgtctcgcaggacaccggggtcatcgcctggggcggcgcggcaaaggacgtcgcgctgacgaacatgggcctcgtgcaggcggctatgcagagcgcctacgggcagctgggcctccacttcatgacgatcgccatctttgccttcgcgttctcgagcctcatcggcaactatttctacgccgagtccaacttcaagttcattacggacagcaaggtcgcgctggccatcttccgcctcgcctgctgcgtggtcatcttcttcggcgcgaattccgacctgacgctcgcgtggaacctcgcggacatcttcatgggcatccaggcgaccatcaacatcgtggtcatcttgattctcggcaagtgggcgctcaaggcactcgacgactacaccgcgcaaaagcagcaggggctcgatccggtcttcgtgtccgactcgattgccgggctcccggcgacggtgtgctggcacgagtctcgcgagcatctggacgatgcctacaacgcggcgccgctcgacgagcgagagctgcctgaggacgatcccgccgagtggaccgagctcatctccaagccctaggcgggtacccttttaacgtgcttgcaagacgccggcgttcactgttgcgagcgccggcgttttttcgaaggagaggctgagtatggaagtcgtttgcaccgaggaactcaaacgctacatggcgcgtaagggctacacgcacgtggagctcgggctggccgaggccaacacgtgctgctccggtttttccgaggtgttcgcgacgtttctcaccgacggtgccgcgcggcgcgtgtcggagaaggcggttcgcacgatcccctgcgaggtgggcgatgtgctcgtcacggcgcgtggcctcgagtacgacgacgtggtgacgctcggcctcaagagctttctcggcgtgaaggacatcaccgtcgaaggcgtacgcgcctggtccctctaactgacacgaggggccatgaaactgcaaattggggactgtccccaatttgtccccaatttgcagttttcaggagagccaggcgcggcgcagacgcgcgatcccctcgggaatcatctcgttctcgatcgaggagtagcccagaagcacgtagttgttcaagggatgcgagcggttcatccagtactggctcgtgccgtacacgcgcacgtcgtgcgcgcgtgcgcggtcgatgagcacctgctgcggcgtctggtcgcgtgctcccagcaggacgtggagccccgcgctcgaccccatgacgtcaaagcagccgcccagctcggtctcgatgcagctcagcaacaggtcgtggcgctcgcggtagtccttcttcgccttgttgacgaacttctgccaatgcccgcgctcgaagaacaggcgcagcacctcctgcgagagccagggcacgggggagaggtagttgggaaagaacacgttccagcgcttgaccagcgccggcggcaggacgagaaacgacaggcgcagcgcgggcgagaggatcttcgagaacgtgcccaggtagatgacgtggttcgtgcggtccaggtcgaaaaggctcgtgacggcgctcccgtcatagcagaactcgctgcaatagtcgtcctcgatgacgtaggaatcgttgtccgctgcccactcgatcactttgagccgtgcggggagcggcatgacgtttccggtcgggaactggttggagggcgtcacgtacaaaagccgtgcattgctgtcgtcgagggcagagaggaagcccgattcgccctggtagacgggtatcgggtcgatttggcacgagcgggacgagaagacggagcgcgcggcagaataccccgggtcctccatcgccacgcgccgttgcgtgtggtcgacgagcgtgacgatgttgtgcagcgcctcctgcgtccccgcctgcagcacgatctgcctcggactgcaggtgatgttgcgcgattccttgaggtagcgggcgatgtgctcgcgcagtccgggaagcccgaagcggtcggaatacgaggtcgcgcccgggatgctgtcgcccgagagcgcctcggaggtcaaggcgcgccaagttgcgcagggaaacgaatcgcccgtcttgttgccgtagcaaaagtcaaacgtgcagccgaagttgtccccgagcgggttggtgcccaactccgacccggacgagacccgtggctctgtcgtgctctccgtctcacacgatgccccgaggatggagaaatccaggtcgttcacgacgtagcccgagccgcgccggctgcagaggtagccttccttcacgagctgggcataagccgcctcgacggtgttccgcgcgatgcccaggtcgtgggcgagcgtcctgagcgcggggagcttggtgccgggacgatagaccccgttctcgatgtccgagcggagggccaggaacaactgccggtaggcgggggtgtgagagtgcttgtcgatgatgaccatggggtacccccgcgctgccgtgagatgtgtttcgtaaatagtagcatcgattgccgcacatacggctctcgagccgtatgtgcgtccgtttggcgcgagaaacgtggcactgccgcacatcccgcgcatccgggggcacgcgcttgttacgcaaccgtggaaaagaggatgccacgcgttcttctgggagtcgtacaatacgcctcacaacaaccccatcgaaggagtagacaatggcatacatgcccgttgctcagcagaccacctggcagacttcgaacgaaatcgacctctcctcgaccgcaatcctcgtcatcgacgtgctcggcggcaccgaccccatccccgaggcgtttgccgagcctatcggcgcctgcgtctcgatcgtcaaggccgcgcgcgcgaagggcgtgcccgtcatcttctccgacgacaaccacatccccgcctacgaccgcgagatcgagctgtggggcgagcacggcatccgcggcacccagggcggcgagcccgtcgccgccttcgacctccagccgagcgacatcgtcatccccaagcgccgctacgacggcttcttccagaccgacctcgacctcacgctgcgcgagctgggcgtcgacacgctcatcgcggtgggcgccgatgccaacatctgcgtgctgcagacgcttg

SEQ ID NO: 2473 - DNA, 3080 bp, Unknown
  16S sequences of unknown bacteria
gggcctagcttcgctacttgctcatgaacgcagtcgcttcgcgatctgcgttcaacctgtggtacgttcaatatcgatcacgctctccacctgccgaatcttttcaatcaaataattcagtacagacttatccggtacctcaaaggacatcgtaatcgtcgccattccctgcctgctcgtacgcgaattgaccgaaatcatgtcgatcttgcgctctgtaaggatttttgtaatatccacaagcagtccggtacgattgtgaccataaataataatctctgcgagatacagtcctttattgccgatctccgcctcccgctgccactccgcatcgatgagacgtgcccgctcttcctccggaagattgatcatattgatacagtcggtgcggtgtatcgtcacacctctgccccgcgtcacaaatcccacaatctcatctcccgggatcggactgcagcattttgcaaaccgcacgctcacatcatcaattccctgcaccgtgatgcctgccttggactttgtcacccggaccggagccgcatccttagccgtctgtgccgcctcgataatctgctcgtcagtaatctccttcttgtgatcgagctcatagccctcgagcagcttatttacgacctgtccttccttcaacccgccgtgtccgagcgccgctaatgtagaattccagtcgcggaatccgtactttgtcagcacccgctctatatactcaggcttcaagatatcctgcagcacaatcccttttgctttacagtagtttgccagaatctctttgccttttacaatattgtcttccttgagttcctgcttgaaccactgtgtgatcttattgcgtgcctgagagctcttgacgatcttcagccagtcgcggcttggcccgcgggagttctgggacgtaatgatctcgatccggtcgccattctgaatcacatagtcgatcgtgacgagctttccgttgactctggctccgatcatacggttgccgaccgcactgtgaatgctgtaagcaaagtcgatcggggtcgagccggcgggaagattcttgacatcacccgccggtgtaaagcagtagacactctctgaaaacaggtcaaaatcactctttaagaggctcataaactcgcggttgtccgacatctgccagtcaagcacctgccgcagccagctgagcttttcctcctcactcttgcttccgcccttcttgccatctgccgattccttgtacttccagtgtgccgcaattccgtactccgctgtccggtgcatctcaaaagtccggatctggatttcgaacggctgaccgttcggaccgatcagcgtcgtgtgcagtgactggtacatgttctgcttcggcattgcgatataatccttgaagcggccgggaatcggcttgtacatttcatggatgacaccaagcgctgcataacagtccttcaccgtatccacaataatccgcacggcaaacaggtcataaatctgatccagggacttcttctgattcaccatttttttgtaaatgctgaagaagtgctttgcacgcccatcgatctgagcacgtatcccggccgcatcgatatgctgacggacttcctttacaatattgtccactacagcctgacgcgcctcttttttcagcgcaatcttttccaccaggtcatagtagacctccggctccaggtacttcaaagacagatcatccagctcgactttgatcttggaaataccaagcctgtgcgcgatcggcgcatagatatccatcgtctcacgggccttctctttttgtttctccggcgaccagtactttgctgtgcgcatattgtggagacggtctgccagcttgacaaggatgacccggatatcctttgccatcgcaaggaacattttccgcagattttctgcctgtacctcgatcttatccgctgaataggaaagctgtgtcagcttcgtcacaccgtcgacgagcagctcgacctccgcaccgaattccttccgaacctcctctgaggtcatgaccgtatcctcgaccacgtcatgcagcagcccggccacgatcgtctccttgtccagctccagatccgcaagaataatcgccacgcaaagcggatgaatgatatatggctcaccggatttgcgcttctggcccttatgggcctcataggctatcctgtaagccttttctatcatagaaatatcatcggaaggatggtatttccggatacttgcaatcaactcctgatacagcttatccggactcgtaaaatcctccatcttcttgacgcttgcgtccgcctgtctgatctcttcgatttcttcctgatttgtctttgcatccatcggcatctgtcccgtcttctcccttggcactgtgtaagatactcagttattttccttcgtagcaaattacagactctacatcatagtccttcaggcgctcacggcccttcaacccggccagctccatcaaaaatacgacctttacgacttcaccgccgagctcctcgatcagctttaccgctgcctcaatcgtaccaccggtcgcgatcaggtcgtcgatcacaacgaccttctgtcccggcttgattgcatccttgtgaatctcgatcgccgctgtcccgtactccagtgcatactctctggatacggtctcacacggaagctttccctttttgcgcaccggcacgaatgccttgtgcatattatatgcaaccggtacaccaaaaataaatccgcgggactcagtacctgcaatcacatcaaaatccagtccttccagcttttcctgaatcagatcgatggacagcttcagtccgtccgggtcctgcaggatactggtcacatcccggaaaataattcccggctctggaaaatccgggatacttcttacgtattcttcaatctttttcatcgttcttacttacactccttttcggataacataatgatagtgatataaacaatgtttttagtatagcattttcccgcatattacgcaatatgcaaaaaagaggcttccgccccttttctgcacacacctatccggtaatcttccggtaaatccacagcac

SEQ ID NO: 2474 - DNA, 14711 bp, Unknown
  16S sequences of unknown bacteria
gtaaacacagaaagaaaggctgcatgtatgtatacaaactggacagaactggaaaccgcgtgcaaagcatgtgaaaaatgtgagctttgccaaacccgaacacacgtcgtatttggaatgggaaacccgcaatcagatattttatttatcggagaaggtcccggagaaaatgaggatttggaaggcctcccctttgttggcagaagcggacagcttttggataaaatgcttgctgcaattgatttagacagaaataaaaatatttatattgcaaatattgtaaaatgccgacctccaaaaaatcgtgacccacttctcgaagagcaagaagcatgtattgactggctgagaaatcaagtgatgattatgcgtccgaaaattattgtatgtcttggacgtattgcagccatgaaattaatcaaacccgatatgaaaatcacaaaagaacacggtatattttttgaaaaaaacggagtgcttatgatggccactctgcatcctgccgcattactacgaaatccaagcaataaaccggcagcttttgaggactttttaaaactgcgcgcaaaaatcgatgaattaaatcaagaagcttaaacgtttcttgatggagggaagaaatcatcatgtttcgtgacaaagaacctgtttctcctatgcctgaagcagcttttctgactaccgtaaccgataatatcacaataggtttgatagaaggtattctggaggaaaatcacattccctttttaaagcaaagtcgtggcagcggagactatttgcaaatagtctgcggttcctctcctttcggaactgactttttcgtcaggcatgaacatctgcaacgagcaagagagttattaaaagtatatttaaatattctataatgaaaaacacaaatataatacattaataaaaatatttcatgaaaaaagtaccgtatgaatatacggtacttttttgttgttcatgcatgtaatgatttaacctattatgacagcagacaaatcagtcggaccagatttatttgactttacttttgatttttttacctgtgataaatgcaactgcccctgcacatactgccatcacagaagcccatataccaactgttgtaccatcacctgtttgaggagtcaccattgcaacgttacctgtttgtgtgttggtatcggtcggtgtcatggaattagatggttgttccgggtttgtcggattttcaggattagtgggatcggttggattttcaggatttgttggttgttccggatttgttggctctgtattgtaaactgcatacaagcgctttcctacagaattatttgctcggacagtggcagtattgtcaattaaatcgcccggtttgtatacagttgttgtatccccttctgtttcactccagccaagaaagttcgcatcatcttcataacctaattcagttaacgttggatagtagttcgtttcgctgttcaagtaagcgattgctttttcatttgcggcatttacatatgtgtttttaaaaccatcaatctgtaaatcccatgtcatatcttcatatcccttatacatctcaattacttgataatttgtttcagatgtagtaaaggaaacatcaactgtatttcctgtagcgggagtttcttttccatccggcgtatttattgtaccattaaaggaaaagccgtctgtatgattgattcccaaagcggctgttacatcatacccttgcttatccgcagatactgttacatcggtcacctgaatggttggttttctaaaataaattttcatggtttcatatgctgcagactttggtaattctttttcatgccaatcatattttccttctacctggtctatgtataaggtctgcatattgacagcatctgttaatggcatgactgatgtttctgtccattcagctgctacaataccaaactgccagcaacggtaaggaaccgataatgtctccaaactggtacatccttcaaacggattcattaccatatgattcaaactatccggcacaattaccgtttttaagttggtacaatctaaaaaggctgcattgtataaagtcgtaaacccttccggcagagtaacagtttctaggctggtacatttataaaacgcaagtactttaatagattttaagtttttaggaaacacaacttcttttaatttggtacattggtaaaacatagaatctttcagctcagtcactttagaaccggattcaaatgttactttttccagagaagagcacatttgaaatacaccaaagcccaatgtttcaatggtatttggaatgactacttctttcatctttgcgcttcccaatgcatacgcttttatgcttgttactgtaactccatcaatactgcttggaatagtaagtgttcctgtttcattgcctgtatagtcggtaatagttcctgtggatttatcaaattgaaatccgttttcttccaccacatctgcagtcggagtcgatgatgcagccattgctgtattaggtattccggtgctttcttgcgcacttactgctgctcctacacttactgctgttgtcatactcagcgctacagctgtagctacaacactaatttttacttttttatttttcatatagtttcctcccaatatgtaggatttttatatctttcaaactgcgtaaaaacgcaaaaagacataagaaactctaattataagaatttcctatgcctttacatgatttataaaattgtatatgcagaaagggcagacttacctactgtctgattatcgcagtttcagtcattatctgtcaaccctttttttatatatcacactagttttgaaagatatgacaatattataccgaattatataaaaaaatcaagtttttaactgtacaaatattgtttatttttatacatcctctactattttatccatccattgcctcgtatgcaatcaggaatatcataaccgtaagtgtttctctgatattcataattacccggagtagcgcttgcataatcaccgtagctgaacactttcgcctcacccattcgtctgtaaaccaaacctgcatagcagtttccacctgcatggtgccacaacaacatctcagaaccaaatgcatgtgcatctacataatttaggtcatgggttacgctgacactagaagcaaaacgaacatatccggagcacatatagcctaccgtaccgtcagaaagttgtactttataccaccctgattttgtagaagaatcgtagcttgcttccaatacttgtacactggtaccattatttacagccctcaatacagatgccgatttacttggactgttatacagacgagctccttggaatgtaacagaggcaggtaaacttgtaccggcagcaatggttggcggtacaactgcatttagcataatttctcttaaatccatttgtgaggtaccgttccaatagccggaaccaatgttataagagaagctaaccaaagcgtcaaactgtgactgtgttgctttgataccattattttgcaagaaacgattcacttcagaagtatagctgcctgcattgatagatttcaccaacaaagaccaagcctctgttttagacatattattatagaactgtacccctgtaccaaatgtttgtccataaccaatggttggtatacctcctgccaaattgtcaggatatactgtggagctgtaaccttcccagctggcaatcagattaatcatttcgtcactgatacggcgtgtttcattagaggattcgttggcgcctgtactccaaaccgtatacgcatctgtagtataaccggttgagctcatcacaccgtttttcgtagagtatacttcaatttgatgtgtacctgcgctactgaaagtagtggaagctttccaaactcttgtagttgtgccgttacaatattctgtggtgtaatcatatgcattcactgttttggttgttccatcactttgtctgatgcggaactgtacagaatcacgtgttgtatctgtaaccgctaccatttctacggtctcacccaccgcagcaatatttggtgatgcataagcagtacgtactgcctcaccttctgtaacagtaatggaatatgtaattccattagagccggtgatagtacatgtaccgggagcaactgctgtaatataaccattggaagcagtagcaacgctgttattgctgctgtaccaataacccgaagaggaggctgcataataggtttttccggcagggattgttacagaattacttacattgttttccccgacctctccaagatagtcttttgagacataaccttccagaccgcttgaagttttaatttttgcccaacctgcattgctgtcatccaatacttcgacaatttctccgtaagatactgaaccgattttgctatattctgtacccataccgctgcgtacatttagtacgtccgcagtaacctgtgcatattttacagtggagcttcctccacctgcgttagaaccaaagtttagataatctctatgtacataaccttctaagccgcttgaagttttaatttttacccaagttgcatcgctgttatccaaaactgttactgtctcaccattacgtattgttcctacgatagaagtatcggtaccttttccgctgcgtacattcaacacatctgcattgaccgttgcggttgtggtttcacttggtgtttcaggtgtggtcggctctgacggcgtttctgttcctgttaagtattctcttgccacataaccttccaaaccacttgctgttttgatttttacccagcctacatcgctgttatctaaaactgttactatctcaccattttgtaacgttcctacaatagaagtatcggtaccttttccgctgcgtacattcaacacatctgcattgaccgttgcggttgtggtttcacttggtgtttcaggtgtggtcggctctgacggtgtttctgctcctgttaagtattctcttgccacgtagccttcaataccgcccgcggttctgatttttacccaatttgcatcgctgttatctaaaatagtaacaacggaaccctgcgttaaacctccgataatggaagtatcagtcccttttccgcttctgatattcaaataatccgcattgacggttgcttgcttaccttgggtctcttgttgtgctgcatccacagttacctgcaaagatgcacaagcgccatttgcactaattctaatttcagcgttaccggcctgcaaagcttgaatttgataaatgtgtgtatttccttcttgacgaagataggtcacttgcactgcgcctgcattggtagaaacagctgttggcaaactttcgtcggaaatggttgcagtaaattcaaaagattcgcccgcagtcaccgttctttcagtttcgctgagagatacggtggtaggagcaacctccatttgaagataatctttgctgcaataacccacagtgccgtcgtttgtttttacttttacccaagtgccatcgctgttatcaatgacatctacaacggctcctttggccaacactgttaacacattgtgatttaaacctgcacctgaacgcaagtttaaatagtctgttgtaattgcctttccaatagagacctcttctcctgcattggaaccggaaccatctgaaatttgtaaaaattctttggtacaatagccttcttgtccgctttcggttcggattttagcccaattcgcatcactgttatcaataacggttacacgttgtcccagatataaggagccaatcacggaataaccggttcccgcaccgctgcgtaaatttacatcactaccggttaaaacagcttgaagctctgtagtattggatgcagattcgttttgttccggttgctgtgtaggtgaagaaggttcctgcgccgaagaacctgcaatatccaaataagctttactgcagtaaccttctgtaccgtccgccgttcttactttcgcccagtttacatcgctgttatccaaaatagtaacagtagtaccttttgacaatactgtttttacatgataatccgttccggcaccactacgtaaatttaatgcatctgtagtaacggccgttccttgtgcagtttcacctttttttgtgatatgtaaatattctttggaacaatatccttcttggccatctttggttcgtattttagcccaatttgcgtcgctgtcgtccaatactgttacttcatcattcaagtacagcattccaatgacagcatgtcccgttccggcacctgcacgcaaattaacatagtcaccggttaaggtaccaatcaattcctccgattcatcagcagaagacaacgtttttacaaactctttactgcaatatccaattgcgccgtttgaagtttgtactttaacccaatctgggttactgtcatccaaaacagttaccagctcaccgctggataaacttccgataatagagtagttggtacctgcaccgctgcgtaaattgacgtagtctcctgtcatagttgctgcgcttgttgatgcagccgctacctgtgatgacgaactgatagataaagacgaaaagaaaattgtcgcaatgcacaaagctgacagcattgcagttagaattctttttaacgaaattcgcatgaatcaatacctcccaaaccatttataacctgcactgataaaaacatgtatctcaatatcgcataatagcccaatttacattatttctatgatgaaagtatacatgaaaattcttttagaatcaacaaaaataaatatttttttatgaattatgtttataaattggataatttttcatatattttacattaattttacataattatttatggtaaaatgtcaaatattgaggtattaagtgtaaatagatacatgatatagtagttatagcggttatccatatatttttctattgatttttttcaatgcaaactattatctcctggcccaacgtttactttcttgacatgtatatggttaaatgatataatagctaccgttgataaaaatgatatatgcggcagtgctggaactggcagacaggcacgtttgaggggcgtgtgtctttgacgtatgggttcaagtcccatttgccgcaccaaacgcttaaaaatggctcaattactaaggttgagccgtttttatttttaatattaaaaataaaatatggaatatattctaaaacagctgcagcggcaacagaattttctcaagtactttgcgaaaacaaaaagacagaattgctgaactttttggaaatattggaagagctggacaaaaaacgaaagaacagacagacaaacaatcgaacagggtgtattggcagacgttgctctttgcagcatgaacatggaacgagacgccgttcaggaaatgtacggagcaggtaaaatcagttatggcacatctgtttctatgaaaaatgatattacattgctggaattacaaatggaataaatatgagtctccgtggtaatcatagtaatcatgatatgcgaataagaaaatcatctctcgtttttatggtgcacgaaagatattgccatggcaaaacagcaaattattttttcatcaaataatatttggaaagacacggacttaacttgacaaatccacaaaagtttgctataatttaactattttaaaggaggttgaattatatgaacaatgataaagttattgaagaaatgttagctcgtattcaagcattagaagaaaaagttgctgcactatccggcgaagataaaaaagaagctggcgacggtgaaaaacaatgtctgccaggatacaacgaatgtatcattaaataaaaacggattcaaattttgcgcttgaaatagtccaagtatccaatggatacttggactatttattttaaggctgctgaatcaatttgcttcatcacaaggcatctcaccatatatttatcaaaaggcactcctatatatctgttctaaaaaagcagtcataacaaaaacatctccgttttttcagattgcggcttgaacctccaaaatctccaaatgcttcctgaaactctaaaagcacttgggcttcccatgttagaaatagcaaaacaagactcagcgcaaattttttctctctgctctgagtcttatttcatgaattccctttctgcagtaccttttagagaagaactatgagtatccacttgcaaacattactgcccattattatgatagaacgtcccacatcacatatattctcaataaatgaagtcaagtaaaaaatacagtgataataaataattttttaagaagagagtgaacaacaatatgttcggaactctttttatttttaccaaatcgaaatattccgaaagagaaaccgatttttctgtttaaaacagctgactggacagtttgcgtttctctttcggcggaaattgtgcatcaaatttttccgcttcctcttcattgataaaatatcctgacggtggtttgtaagttcctgtaataccgttcaaaaatccctcttttaattcttttaccagaaaataaggaacccgagcacttcttgattctgcataatagtgaatcccctttgtacttgccgttacaaatcctgattttccatagaaatcaatattcccttctatacagattgcacctaccccaagtgctttggctttttccatagaaaaatcaagcaatgttttaccatatccttttcgttgatgttccggtgcaatactaaggggaccaaatgtcataatcggtatcctttgtccgttatcagataaaatttccgcattcacatacatgatatgaccgataataacaccgtccttttccataataaaatccagttccggtacaaaatcttctctgcaacgatactgatgaacaatatagtgttctatacagccaggacgataaacattccagaatgcttcacgggttaacagttctacgttttgataatcctcaggtgtttcctgacgaatcatattgtgattgtgatgcatgactttctcctcccttacaacagaatctacaaaccgattaagaagatgatacaccagtgtggtatcctctttcaaataaacattcttgtaaattcatttacttgtattcataatgataccattactgatttcctacagcaataccagatattgtatcaccatattcaaaacatatactattgcttctctcgccttttctatataaccgtttcattcttcccacaacaaactgatttcagggttttatcaatccgattttatatgaagcagactgtatatttcgtattatctttatttgcttttgactatgctttgccaaatgacacatactataagcatattgtaaggagcaaagctatgtttaaaataaatatgatgaaagcaattaaaattacactgggctgttgccttgcttttataactgcgaatgcattgcatttggaatacagcacttctgtcgttaccattactttgctgagcatcttaaatacgaaaagagataccttaattgttgcgtggaaacgttctgttgcatttctgcttgcctcttccatcgccattatctcatttacaatctttcggttttctgtttggggactgggcgtctatttgataataatcgtcattctctgtcaggcatttgaattaacagacggactttctatgagcactgtcttaatgctgcatatatggacggctcgttccattactgcaagcagccttctcaatgaagcaactttaatggcaattggaattctcatggggattctgatgaatttgtatatgccaaaccaaattaaaaaaataaaaacataccaagctatcattgaccgtcattttaaggaacttttgctatgtttttcagacagcattgtatttccgaatcgattgcaaagcatacaataccaatttgatgtattatccactatttttcaaaaatcaattcaagctacagatttacatgtaaacaatcacttattttctgataccggctattatctgcactatttaaaaatgcgtttaaagcaatatgaagtattacaaatcatagcaacaaatatacagcggatggaatatgtacctgcgcaggcaaaagaagtttctcaatatttaaaagaagtcgcaaactccattgaaaaacacgataacgcgcaagaaatgttagacaagttgcaaaaaatgcgcatacgatttcgcatgggagaattgccgaaagacagaaaagaatttgaagcaagagcagtgctgtacgaaattgtgaacgatgtacaatatctgcttcgtttaaaacaagaatttacagaatcactgtctccgtatcaaattaaaacattttggctgaataaaaagaaaataagacaatgagacagaaaattgcaatgtttgttatgatatgatataataatatagtagaaatacacatcactgatgaaaggagcatgcattatgctgggaaatttagaaagtgatttaaaaaaagtattattggcaggtattggcgctcttgcaacaaccgtagaaaagtcaaaagatattgttgatgaacttgttaaaaaaggtgaaattaccgtagaacaaggcaaagctttaaatgaagaattaaaacacgatattcaagaacaaaaagaagaaaaagagtctgccgcctgtgcagcagatgtcactgaaaaacttgagcatttaaatgccgaagaccttgcaaaaattaaagaaaaactggctgaactggaagaaaaacaaaaaaactgtgattgtgaatcctaaccatttgcaatacgaagtaatcccctgtgtttgtgatgtgaaacacagggggtttttaattcattgatgttaaaggggatctcagtttatcctaaaaaggacaaaatgccctaacattcttcgcatccctttaatgggtcgaaaatccactccctgtaatatcttctgggtccgaggtttccatactttcccttgaagtcccggaaacgcaccatttccgcacctttcacaaacaaaaaagaccaagtgcagcgtcttttcgactctgcactgagtctcgttttccctatcttccgtctttctcaggctatgctttggtgccttgttcggcgtgttcaggagtgccttctgttatgatacaacgaaaaagaaactgtgacattctacatcatcacgtttcttttttatagcataattatcataaatttattttttctttttccgtatcataaagaacaccagtattcctcctatgacacccgctaatatatagccaagcattgccagtaacgggatatcaccaaccatgggacgtatctccgttaaacacagtaagctggaaccaataatcaaagacatgataatcactgtagcaatgatacggtttaccatactgtcaatccgttttaaaggtgcctcagagccgctgatgtccaaatttacctttgtctgtccttttactgtcatctgtatcaaatctgacaactgtgacggaataacggctactttattcagaatcgtataaattcctttgcccgtacgtttgagttctttgttccaatctaaatttctaaaaaattcattggacatatgagttgccagaatttgcagcaaattaatatcaggcgcacaaaaacgcagtacaccttcaatggtcataacgcctcttcccaacatggtaacactttgcggcagcaaaatgtgatgcttgtttgccacatgcataaactcttggaacactacacccaaattcatgtttcccaattccaaattaccataacgggaaaccatttcatccacatctgtatacagcaaagcatggtcaatgggttgtttggcagtacctaaggttaaaaatacgttttttaattgataaatatcattgtttacaattgcagttacggcagaacgaaacaactctttatcacgtcctgtcagctttcccatcataccaaaatccagccaggcaattttaccgtccataatccaaatattgcccggatgtgggtctgcatggaaaaaggcatcgtccagaatttgttttacaaaattttcagccagtttttgaccgatttcattcatatcgtatcccaattctttcagcttgtccactttatctaccgggataccatgaatacgttccattaccaaaacatgctttgtcgtaaggtcgtgatatactttcggatacgtaatataactgataccgctgtttaattcagcaaaacggtccatatgtttcgcttccaataaaaagtccatctcttctttggctgtattccatatttcatcaatgaccgcttttaaatccattacatttccaatgctgcttaccattttcaccatactgattgcacgttttaaaatggtaatatctttggacatcgtttcgtaaatattaggtctttgtactttaatcacaacctgttgtccattgattaatgtagcagaatgtacctgcgcaatggaagcagaacccagtggtttttcatcaatttgagcaaacttttctttataagaacagccgtattcttcatctaacacggcgcaaatttcctggaaatccaaaggttttacattggaacgcagttttgtcaattcatcgcagtaagcttttggaagcatgtcctgccgcatggaaagaatttgaccaatttttacgtaagtaggacctaaatcttccagtattccatataacttttgcggtgtaaatccacggtgcaagtgatatttacgcaaagtaagaataatttcttttaagcgagatgcattcttttttgatttttctttatcatatggctcactcatgattgtgcacccctttattttatgtgattctttctttcatcataacggattctgatacgtccgtcaagctatgagaaatttagtaaatcactctgtctatatttgtgatttccgcctgtgtatgcgcttggacgtaatccatgatattctgcaacacttgattcgcttgccctaccgtacaagtgacaacggcaaaggcaattgctgccgattgctgtacttcttgataatcaacttcagcagcagaaacatgaaaatgatgctgcgttttttgcaaaacactctttactgccattcgtttttcttttaaggaatgaacccaaggcagatacaatttgatttcaactgcagcaattaccatattactctccttgttgattgaaacgctgtatctcaagtaagaactcctcatatgacataaaactgttgattgcatctatcatggcattggtagtcaaatgttcgggtaattttaattgttttagcacctgttttctcttttgattgctgtcatctctccccgtcaaaccccattcaaaaaaatcttgttttgttacctgtctgacacattcttcattttcagatattgtctcctgatttacaacaacaccggccttctccaaagcacgaattaaaagttgcttttctattccttctacccccagctttccttctttggaataggcggttttacgcggttcttttcccaaaacatccggaatataagcatgtttgattttatccggagcaatacagctttttaaataattccgaatcaaaaatccggcagaatcgctgtctgttaaaatcagcaatcctctggcgtctgccattttgcgaatcaatgccatttgctctttatctttaaaaattcggaagccgcgggtttcaataatcattccgtcaataaaggaggataattttattttatcatactttccctcaacaataatggcttcttttacaacaatcaagtctactccccttttcccgataccattaatagctttgccaataactgttccatgataatgcggttatccgtacgggagctttttaatgcaacatctgtatccaataacaattgcaaactgtccttcaatactgacatagataaattggcgctgtcccgttccgcattttttaatttaaattccttccctttataatcaaaatactgtgaaagagtcgatactgcttgtccgctttgtatacaggaacgaacgcggtacatatctacataggaagtagccaaaaccgccaatatggcaatgggttcctcattttgataaaacaaaatatccaacagttcatacgctttactgtaattacccgctacaattgcatttgccaaaaggaaaatcgttgtttcaaaattcctgaccacattcaagtcaatggcctcttttgtaatttctccttcttttgtatatgcacatagtttttctatttcattgtatagtgtttgcaaatcatttccgcttaaaaatagaatatgggcagcattttgtttgctcaaggtacaacctcttttttgtgctgcggaacatagcaatttttccagttcggagttggttttccgtttgaaattgaccgtaatcccagttttattcaccgctgtgataaaactgccccatttgccgggacgttttacattaaagtccaaattggataaataaaaaatcaacacacagctttcgggaggatttttaatcaactccttgatttcttccatatctgccgagccgcgtttttcaacattaaaatcattcacaatgacgcatttataatctgccataaacggcagcccttccgcagcacgcacaatttcttgcgcatctgcaaaagcgccatcaaaattttggtaattaaaatccaaaaattgattccct

SEQ ID NO: 2475 - DNA, 7610 bp, Unknown
  16S sequences of unknown bacteria
ccgacaggataaccgccgtcgggaagtcgacgctgatgcccagcaggtggcacgtcgccatggtcatgacggagatggtcacggcagcgccgcccatgttgatggtcgcgccgagcgggatggagacggagtagttgtcgcggttcaggcccaggtcgtggcagagcttcatgttgaccgggatgttagcggcggagctgcgggtgaagaacgccgtgatgcccgaatctttcaggcaacgcagaaccagcgggtaggggttgcgacggatgcacacccagacgatgatcgggttgatgaccagcgcaatgaagaacatgacgcagacgagcagcaagatgagcgcgccgtaggtggtgaagatctcgaggccgctcgtggagaccgcggtgtagacgaggccgaggatgccgaacggagccaggctgatgacccagcgcacgatcttcgtcatggcctgcgcgacgttctcgaacacggacttggtggcctgcttggcggcacgcagcgcgatgccgaggacgatggcccacgccaggatgccgatgtagttggcgttcatgagtgcgtcgaccgggttggagaagatgttcttcacgagggtgaccaaaacggcgccgatgccctcgggtgcggcggtgacctcctcgggcgggtcggcaagcgtgatgtcgatggggaagatgaagctcgccgccacggcgatgaaggcagccaggaacgtcgagacgatgtagaggacgatgacggtcttcatggaacctgcggtcttggcgtttgccagggcggaggttaccaggaagaagacgagaatcggggcgaccgccttcagggcgctgacgaacagcgtgccgagcaggccgatgaagatgccgaggccggcgtccccaccgaggatatcgggggcgctgcccgcgaggatgcccaaaatggcaccgatgaccatgccgatgacgattcgccagataaggctgatgtcattccatttcttcagaacgttcatgtgaaactccccataattggtgttgagcggccactcgaggtgcatgagcggcctgtacacaggtacgggcgtgatgataaaccacaatcaccagaaaatatccatagattgcggcgactaatggtgtgaacgtaccaaattggtaggttttcgatgcgtacagctcggcacggttgcgcggacgccggtgctctggcgcggcggcgcggggggagccattagggggattgcccacgcgacgtcgaggggtttgttgcgtttccaacgccgtgctcgcccgttttcgcgtatggttgcacgcgtggaaactgtgaacgacataccggagctgccccaggactcgccccatgccgcgcgcaaacgcgtccgtgacaagcgcaccgtctcgcagatgattagtatctactgccacggaaagcacaaggaagtgcctcgtgatcacgtcgcgcactgcggtgagcccgtctgcgctgagtgcgcagagatcgacgcgtacgcgattttgcggacggaacagtgcgcgcgcatggaggtcaagatttcgtgtgaccgttgcccgctgcactgctacacgcccgacgagctcgaaaagattcgcgaaatcatgcgctattccggtccgcgcatgatgtttcaccatcctatcgccgcgctgcgccaccttacggggaagtagcgcccgccttccctcatctcctgcgcgagaaccgtggcagtgccacacatccctcgcgtggcacgcgccccggcgtactccaacgcgcctgttgcccctcgccctcacaaccgttcgccgttgtgtggagagattgtgcagataaatccgactaaaacggttgtatatgctctccgctcgtcctagtattcctgcattcacgcggagctatctattgttccgtgtgaacgtggcggaagcgattcgacgggaggagttcaggcggtgcccttcgctccgaaagagctgatagtcaaaaggctcgtcgccgcgcacgaggcgtggtacgacgtgtccacagattacgagttcgcagggcgcacgttcgacgcgtactgcgagttccactcccacggcgagaagtacgtcttggtgaagcgcgccaagctgtgggaggtcaatgcccacgagtacctcttcatcgacgcgctcgaccacctcgacgcgggcacgctcgattcctacgtcgagttcatggagacgcgggcgctcgagaaggtcgaccccgttcccaaccacatgcaaagctccctctctctcgtcatcgtcgcagatcgcgtggatgacgaggcaaagcgagcttgccgcaagaccaggttccggaagaacttcgcgctcggcatacgcgggtgggcggacctgaggctcgcggtcgtcgacattgccgggcacgacgtcgtcacgaacggcgccggcaaggagatgaaggcatcgctcgaggcaaacgcccgtgctgacgaggaggcagacgggcacaaggagaaaggttcaatcgaatgaacgcaatggttttgctcattgtcgctgcggtcattctcgtagcgggctatgtcctctacggcggatggcttgccaagcagtggggagtcgatcccaaccgaccgacccctgcgcatgagcttgaagacggcgtggactacgtcccggcgcctccgtatgtcgtcttggggcatcacttctcttccatcgcgggtgccggccccatcaacggccccatccaagctgccgtgttcggctgggtccccgtcgtgctgtgggtcctcatcggcggcatcttctttggcgccgtgcatgacttcggctcgctgttcgcgtcgattcgccacaagggcaagacgctcgcctctgtcgtcgccgaaaacatcgacggcagcgccaagcgcctcttctgcatattcgcgtatctcgtcctcgtcctcgtcgtcgcggcttttgcctcgatcgtcgcgaacaccttcgcgtcgaccgccgcaaagcccagcgtcgccaacgagcagacggcgtccatctcggttctgttcgtgcttgccgccatcatctggggcctggccacgcgtggccgcaaactccccgcggcgctcaacatcggccttgcgatcgtcgtgatcgtcgtcgtggtcgccatcggcttcaacttccacccgttgcagctcggctataccgagtggatgatcatcctcggcatctacatcctcatcgcgtcggtcgctccggtgtggatcttgctgcagccgcgcgactacctgtcaagctacctgctgtacggcatgatcatcctcgccgtggtcggcatcgttggcgcgggcatcgccggcgctgcctccgacttgcagattcccgcgttcaccggcttctttgcctccacggcggcggtcgacccgacgacggggcaggcgatcatgaaagacggcgttgccgtggtgaacaaggcggcacaaggcggcttcctcttcccggcgctgttcgtcaccatcgcctgcggtgccatctctggcttccatagcctcgtcgcctccggcacaacctccaagcagatcgacaaggagggccaggcacagcccatcggctacggcgccatgctcatcgagtgcctgctcgccatcatctcgctgtgcgcggtcggcttcgtgtgggcgcagtacaagtccggcggctacgcgtcccccacgcaggtctttgccgacggcctgtcgcagatgctcgcggctatccccggcctggccaatacgcaggagatcgcctatgcgctcctcatcctggcggtctcggtcttctgcctgacctcgctcgacacggcgacccgcctggcgcgttacatgttccaggagttctgggtgcccgagggcatcaagaggaaagaggatctgcccggctacgcgaaggtactcgccaacccctgggttgccacgattatcaccgtcgtgctcggcgtggctcttggcctcacgggttacacgctgatctggccgctgttcggcgcggcaaaccagctgctcgccgccctcgcgctgctcacggtctgcgcttggctcggcaacgcgggcaagaacaacaagatgttctacgtccccatggtgttcatgctcgccgtcacgctcacgtcgctgtgcatcacgatctatcagaagattctggcgattgcagcgggcacggcgctgttcgcgtcggttctccagctcgtcatcggcgtgctgctcatcgtgctcgccatcgtgctcgcggtgaagggcgcaaagacgctcgtcaggctccacaaggagaagaaggcgccggcagcgcagtaagctcgggccctttctgcgcttgcggtgtttcgcaagcgtccagccctgcaatacgaaaaggctccaccggtctgaccggcggagcctttttcatgtgctgtatcgagctcgcgcgcttgcgatgacgctgggggcagaattgctgcggagacctacagccccatgcccgggcgcgggctgccgcccataccgcccatacccccgaatccgcccatgccgctcgggacgttgaggtccccgttcatgccggactcatctgccaggtcggtttcctcgtcgaggaagttcacgattaccttgacggcgtacttgaagatgccgccttcgaagccgtgcttaccgcccccgattagctcgaggctggcgtgcgggtacgtgcgcaccgccttgaccgagtagccggacgggaccgccgtgtcggcagagccgtgcaggatgaggaccgggccgcggtagttggcgatgacgttgtagaagtcaaagccgtagagctcttcgaggtagggtcgcccgacgggcacggcaagctcgtagatgtcggtgaacttgagcgggtcggggaatgccgccttgatttcctcggggaggttgaatgcggggtagaggaggatgagccccttgatcaggcctgcctcctgcgatgcgacgagcgacgtcacggcgccgccctggctcgcgcccatcagaaagatgttgttcgcgtcgacatagggcaggcgcgcgatgtggtggaacacggcgtcgaggtccgcctgctcggaaaaaacggtcatcttgagcgggtcgccatcgcttttcgactcgtatccgccgcagaagtcgaagcagtagacgacgtatccgcgccgtgcgaattcagctgcgtacttgtcgccgctttcgtggttcgagctcatgccgtgcgagtagatgatggtgggatagcgtttggtcccgttgtcgccgcgcggaatgtagacgacgccgaagatgttcttgccgtcgcgctcgacgttgagctgaatcttatcgaaatccggcatgaggtgcccctttccgtcaaatcgtcaggtttcaccatagcgcaacgagctggccgtttgagcgacagttccgtgtcagctcagcgaaactcagctcaccgaaaccccggcaaagcgctcggcgttcgcgcacagcatcttttcgagttcggcgggagaaaagccgaggttgcggaaggcgtcgagttcggcggcggggtcccacagcggaaagtccgagccgaacatcacgtggtcgacgccccacatgtcgatgagctccctggaacggcgcgcgccgagcagcatcacgctcgacgaggtgtcgatgaacaggcgctctgggttgggcgcatcgtggaggtaatcgtagccctgctcgaagatggtccagccgccgtagtgcgccgcatccacgacgaggtcgggaaacgcctcgagcacccgcttcaggcggcgggggtgcgagtagtcgtagcggtagtcgcccgtgtggatgacgacggggaagcgaccctcgatgatctcgtagaacttcatgaggcgcgggtcgtcgatgtcgacgcgctgggagtcggggtggagcttgaagccgtgcagcccgagggaggccgcgcgctccacttcggattccatgtcctcgaagtcgggatgcatcgcgccgaacccgatgaactcggggtgcgcgtcgcactgcgcggcgatgaagtcgttgatgtgtggaactgaatgtgccgacgtggcaaccgagtggacgatgaagtgggtgaggtcggaggccctctcggtttccagaagcgtgtcgacgaatcccgagcagtgcgcggagagcatgtagagctcggagattgcgtgtgcggcctgcgcggcgatcttgtcggggtagatatgggcgtgtgcgtcgatgatgggcatggtggttttccgtcctttcggcgacaagtgtatccctttgcgcatcgcctcacctcttctgcgcaaaaagagtggcactgccacagttcccgtgcgattaacgcgggatgcgtggcactgtcactgttttcgcgcggagggggtgggatgcgtggcactgccacggttcccgtgcacgtttccgcgcaggatagggggtccatggcatctatcgtgagctaaaataaaggcagcgaacagcaacggctcacggcacggtcgaagtggaggtcagcatgtataccaatatcgtggttccctttgacaagtccgaacatgcggagcgcgccctcaaggcggcggtcgagctcggacgcggcgatggcccggccaaggtcaccgtcttgaacgtcaccgacatgatggacttcgacgacgcgacgttcgaggtcgcggcgcgcatggcaggcgttccgcctatcagcgacgaggcggcgcacctcgcgcgcgagaagtacttcaacgagcgcaaagacgagatccgtcaatgtgttgacggcgtcgtcgcgggggaagtccccgaaaacgtgacgctcgacgtcgacgtggtgggcggccatccgcaagaggctatccgcgactacgtccgcggcaaggacttcgactgcatcgtcatgggacggcgcggcctgggcgccatccgcggcgcgatcggcagcgtgagctactcggtgctccggtcggtcgacctgcccgttctcatcgtcaaatagcacggtaatccgcagaggctcctcgggaaaccaaggagcctctctttgtttcgaagattgtttccatttgattaaatcgaccgcgttcatatggtgaatgtttcgaagaggtttcataatcgagcaagttggtaggactaaggaggaaccattgagttacgtcgagcgtgttatcgagcaggttaagcagaaagaccccaacgagcctgagttcatccaggccgtgaccgaggttctcgagtccctcgagcccgtcatcgaggcacaccccgagtatgagcaggcaaagctcctcgagcgcatcgtcgagcccgagcgcgtcatcatgttccgcgtcccctgggcagacgacaagggcgaggtgcacgtcaaccgcggtttccgcgttcagttcaacagcgcgcttggcccctacaagggcggcctgcgcttcaacaagacggtctacctcggcatgctcaagttcctcggcttcgagcagattttcaagaacagcctgaccacgctgcccatgggcggcggcaagggcggctccgactttgaccccaagggcaagtccaacgcagagatcatgcgcttctgccagagcttcatgaccgagctttgcaggcacatcggccccgacaccgacgttcccgccggtgacctgggcgtcggcgg

SEQ ID NO: 2476 - DNA, 6458 bp, Unknown
  16S sequences of unknown bacteria
tgccggctgctctcccgcaggatccttcaggacctggctcgtttcccagagatcaatctctatcttcgcggcatgatccctctgatcggatatcagagcgatatcgtggaatatgagcgtcagcgccgcagcgccggcacctccaaatacccattaaaaaaaatgctggcctttgcctgggatggcatcacttcattcagcgtccggccgatccgtctggtcagcctgatcggcaccatcgtctttctcatcagcatcgcgaccatatcctacagcgtcatccgcaaatgcatggggctgaccgtagatggatggacctttctgtcctgctccatctggctgctgggagggatcaccttgctgggcatggggatcatcggcgaatatatcggaaagatatatactgaggtcaagcgccgtcctcgttatttgatccgggagatcctcaatgatcccgaacagacgacacatgattaaaagaggacagatccatcatcaaatggtctgtcctttttactctgataaaaagccttgcagaggtttgtcaacagcctgcagctgcaaggggagagatccctgcggatcattccctataatatggtctccatgccgactttctgcggtttcaggccgcaggattcgtaaaacttcatcgctgcctcattgcagctccacacattgagcgtgaggttgtaacagccatgcgctctggcgtactgcttggcggcctcgtacagcgctgatccgatgtgctggccgcgcaacttttcatctacgcacagatcatcgatgtataatgtcttgatgtcggtcaggatattgtcgccgatgtgctgctggaagatgcagaacgcatagcccagcagtcggtcttcttcatccaccgcagccaggatcggccgctcatcatcaccgatgatcgctttcagctgctcatcggtatattttcttgttccatacttgaacagatccggacggccgcggtgatggaccatcgccacttgcatgagcagctcatcgatgcgttccatatccttgatctgcgctcttctgatcttcatgatcgacaccctttctattcttcggccagtgcccgaatatgctgaagcagcggcacatggcggttgatgagattgacgaactggccgacgctgacggcagagagcagcgtcccgacgcccacgccgacgatattgccgaaaaacagccacgacagcaatgccgcgatgaggatgagcgtcacatcgaacacgaccttgacactgccgaagcgccgtccgctgactttgctgatggcggtgacgatgccttcaccaggcaccatgatgagatccggcgccacttcgacgctgatgccgaaagcgagcacgatgcagccggcgacggcgctgagcacacgggtgaacagctgctgcggcgcatagaacgaaagcatcgccataaagacatcgatgctggcgctgaacacgacattcaccacgatctgcagcagctggatcggcttgaactgtctcctgagcagcagggcctgcaagacgatatacaccatgttcatgatgaatgagaacatgccaaagctgatggaaggcatctgcaggctgagcacatacgggatgctggagatctgcgaagtgcctaaggctcctttggtgatcagcacgatgccaaaggagttgatgaggatcccggccgaaaaccagaccagcctttcgatctggcggctcataccggctcctccagattggcgctgacctgtctgagcaaacgcaccagcgtctgacgttcctgcgcatcgatgccgcgcagtgcacgctcatcgctgcatcggcagatgtcatggacctcttcggcgagcgcacgccctttttccgtaagataggtcatggcggcgcgccggtcgcgcgcatgaggatgacggacgatcagctcctgctgtgccatcctggccagcagcgatgtcaccgtcgatttatccagcacacatccctcggtgatctcctttgccatcgccccgtcatgctcaagcaaatacagcaggatcttcggctgtcccggcatcagcttcagctgagacgtctgcgcaacgatggcgcggttgctgaagtgaaagctcctcagcaattgaaaatgcagctcatcttccagcatcctgtccctcctttttttgtttgaattcaaaccaattataatgaacgagggcttcgctgtcaatcttttcttacgaagatgaggaagcggctgaggagatagttagcggcgatgaccagcacctggaccaaaagcttggacaatgtcatctcccagcaaagcatctccacgaacagctgcatcaatgccagctccatgagcagcgtggcgatacgcgcggcaaaaaagcgcaccagctcaccgcgccatgacgcttcacagcggctgtgaaacaccagatacttattggtcacgaaagcaaagctgaccgccgctatccatgacagcacattagcaggctgataatgcaggccgcaatggataagcaaagaaaaacagaggatgttcaccagtgtcgtacaggcgccgaaaaagagatagcgcactgcttcgctgcgccagatcaaagccaaatgtctcatcatatcatctccatgatctgcattgatgataccgtatctttgtctggaaaacatctttcctctgttaagtttctgtaaagatcgtgtcaaggctaacggacaatgtcagaaatcgtccgttccatgctcagtcccaggctgtcataagaataaatgaaggtcttgggcatgccttcttcatcgacgcgcagcgtagctgtatagacgttgccggcgtcgctctccccgctgatcgtccaggtgtcgccttccagcgtgaactgcgcatcttccaaattatccatcatcatgaaatactgctgggacatgcgctgcgccgtctcgtcctcgtagccgtcactgtatgtccggacaccgttttcataggaatgcacgagcgcgcagctctcttcctgaccgctgccttccagctctgaagaactgcaggtcacgtctttgctcgtcccatcttcatacacatgatacgacatcgtcgtctcgctcgcgctatctccttcttcgcccacgctcaccgttgtctcgctgcgctcttcataagcataatcttccccgtagtcttcgtctgtggaaaccgtgctcacccgatagctctgcacctcatccagctgtgcgatcactgccgcatagccttcataatcggctgccgctgccggctgctcctgtacttccccgctgcatccgcacagtgccgcgctcaatgccacgactagaaatccctcacgtctcatcttgtctttccgcctttcaaatatctttatcttaaagccggtccgcaattttgtaaaccgttcattctgaacttctgatgaatcttttcaacagaaaaagaggcagtctgcgtgactgcccctgatcggtcatttcagcactgcgccttcatcggcagaggaaaccagacgggcatagcgttccagccagccgcccttgaccttcggctccaatggcttccattcgccaaggcgcttctgcatctcttcctcgctgatccgcagatcgatcgttcctgcgttgatgtcgatgtcgatcagctcgccttcgcggatgacggcgatcggtccgcatgatgccgcctccggagagacatggccgatggccgcgcctctggttgcgccggagaaccggccgtcggtgatcagcgcgacatccttgtccagcttcatgccggccagcgcgctggtcgggttgagcatctctcgcatgcctggaccacccttcggcccttcgtagcggatgaccaccacatcccctttgacgatcttaccatcatagatcgcctcgatggcttcttcctcgctgtcaaagacacgcgccgggccggtatgcttgagcatggcgggatccacggcgccgcgtttgacgacgcagcccttcggtgcgatgtttccaaagaggacggcgatgccgccggtcggcgaattcgggctctcgatatctttgatgatgtgatgatcgaggttctttgcctgttccaggttttcccggatcgtcttgccggtgacggtcatcagcgtatcatcgatgaggcctttcttctgcagctccttcatcactgcctggacaccgccggcgcgatacagatcgacgatatgatccggtccggcaggggccagcttgcacagatttggtgtggactgcgagatctcattgatgacgttgaggtcgagctcgacctgcgcttcctttgcgatggcaagcagatgcagcacggtattggatgagcagccaagcgccatatcgcaggccagaccgttgcgcagcgcctgttcgttgacgatgtcgcgcggccggatgcccttctccaccatgtccatcacggccatgccggctttcttggccagctgcatgcggccggagtacacggccggaatggtgccgtttcccggaagggcgatgcccagcacttcgcacaggcagttcatggagttggccgtgaacatgccggagcaggaaccgcagcccgggcaggcgttctgctcgatataggtgagctcatcctgatcgatcagcccggctttcttggcgccgacggcctcaaacatcgtcgaaaggctcatgtccttgccgcggtcattacctggcagcatcgcgccgccgctcatgacgacggccgggatgttgacgcgcagcgcccccatcagcatgcctggcacgatcttatcgcagttgggcacgagcaccgcgccgtcaaagccatgggcgttgagcatcgtctccacgctgtccgcgatcagctcgcgggaggcgagcgaatacttcatgccgatatggcccatcgcgatgccatcgcatacaccgatggccggcaccatgatcggtgtcccgcccgccatgcggatgccggccttcaccgcatccgtgatcttatccagatgcagatgccccggcacgatctcgctgtgggcgctgaccacggcgatcagcggacgctccagctcctcctgggtcaggcccagcgcatagaacagcgaacgctgcggtgcgcaggcatctccttttaatactctgtcacttggtctgctcattgtattcacctgatttccaatcgtttatttcttcagccagctcatcatgttgcgcagcttcttgccgacttcttcagacggatgctccgcatgcacacggcgcatcgccaggaagtgtgcgcgtccggcagccttgttctccgtgatccagtttccggcgaacgtgccatcctggatctcacgcagcacgttcttcatctccttgcgggtctcttcggtgatcagacgcttgccagtgatgtaatcgccgtattcagccgtatcggagattgagtagcgcatcatcgcgaaaccgccgctgttgatcaggtcgacgatcagcttcatctcatggatgcactcgaaataagccatttccggcgcatatccagcttctaccagcgtatcgaagccggcctgcatcagttcgcagacaccgccgcacagcacggcctgctcaccgaagaggtctgtctcggtctcttctttgaacgtggtctcgatgatgcccgcgcgtcctgcgccgatgccgcttgcataagccagcgcatactcatgcgccttgcctgtcgcatcctgatggatggcgatcagagaaggaacgcccttaccttccagatactggctgcgcacggtgtgacccgggcccttcggcgcacacatcgtcacgtcgacaccttccggtgccacgatctgcttgaagtgaatagagaagccatgggcgaacatcaacatgtttcccggctccaggttcggcttgatgtccttttcatagatatccggctggttctgatccggcgccaggatcatcacgacatctccggccttggccgcatctgccgtatccatgaccttcagtccggcttcctctgccttcgcgcggctcttggatcccggacgcagtccgacgacgacgtcgatcccgctgtcatgcaggttctgcgcatgcgcatgtccctggctgccaaaaccgatgatcgcaacggtctttcctttcagtaaatccagattacagtctgcatcataatatacctttaccatttcaaattcctcctcttgctaactgttttcctcatctatattaacgcacatgggtgcggtaatatcagtatacggtctccctcgacagctccagcgccacgacgccggtgcggctgatctcccggatatggaagtcctgaagctcttcgatgaagtagttgatgctgtccggcgtatcggtgagctcgatcacatacacatcgccttccacgatctgcagccgtccgccgaaatcagacacggcctgctcgaacgcttccatctgcgccttcttcggctctgccttgatcaatacgacctcccggct

SEQ ID NO: 2477 - DNA, 3339 bp, Unknown
  16S sequences of unknown bacteria
ggcacccccgacggctggaccgccgtcgacatcaccgccgaccatccggattaccagcgcatcaccgtggaaaacgcccaggtcttccccggcaccatgacgctccagggcctggagctgctccccctgagtaccgatccagaccgctgggacgccccggaggtcttccagaccccgccgcagaatctataatgtaagaaggaggccccgccatggcagccgtcattccccgcattcccaccgagattaccgtccatctgggcgcgcccaacgccagcgccgccaatgtcacggtgccgttcgtctcctacattaaaaatgtcgcctccagcgaggtctatcccacctgggagcccagcgcgctgcgggcgaatatcctggccatcacctccttcgccctgaaccgggtttacaccgagtactaccgcagccggggctacctcttcgatatcacgtccaccaccgcctacgaccaggcgtatgttgaagggcgcaatatctttgagaacatctcccagatcgttgacgagactttcgatacctatatccgccgccggggctttgttgagcccctggccgccaaattctgcaacggcacgacctcaacctgcgacggcctgagccagtggggctcccaagccctggcccagcaggggctgaacagcctcgaaattctgcgccggtactacggcgacgatattgagcttgtcgtgaacgccccacaggcggagaatatcgaatcctaccccggtaacgccctgcgcttgggcgccgttggccgcgacgtcgtgacgatgcaggccgccctgaaccgcatctcgcaaaattacccggctattccgaaaatcaacccggtgaacggcattttcaccacgcatatggagcagtccgtccgccagttccagcagattttcaacctaaccgctgacggcatcatcggccgggccacctggtacgccattatccgcctgtatatcgccgtgacccgcctggccgagctccacgccgaaggccagacctactataacaacgcctgggagtacaccggccccctgtccgagggcagcaccggtgcacaggcgacacacctgcaatatatgctggccgtcctaggcgattttatcgacgccctgccgaccctccccatcaacgcgttcttcggtccggagacccgccaggctgtcctggccttccagcgctggtacggcctgccccagacgggcaccgtcgaggcaaacgactggaacgccatctatgaccagttcctcggcattgagggggccatcttccaggatgcggccctcttccccgccgccagcggccttgctgtcgagacgacggccctcgggaattcttcccgccagagcgccgcggcccggcggaatacgccccagcgccagggcttcgccgccacgacccgccaaagccagtaccctggctatgtcctccagctgggcagccaggacccgggctagccccgggcgaaaggagccagaacatctatgatgaaacgcgtgatgcaaaataccgacccactcctaggccgtcccgtcggaaacctgcaaacaatgctgcgcctgctctcccagggcgattccgccatcgcccccgtcgcaccggacggcatcttcggccggtgcacactgcgcagcgtgacggatttccagcgagccttctctctccccgtcaccgggacggtggacgacgccatctggcgcgccctcgtcgccgcctatgacgtggcccgggtccggcaggacgccgccgcgccgctgctgatctacctcggccccgacgcggcaatcagcgacgacgagaactcccagcacatccccctgctccaggcgctgctgcacacgctgcaccagcgctacaccgccctgccgtcggtggccctctccggccgctacgacgcccagacccaagccgccgtcgccgccctgcagcgcatggcaggcttgcagcccgacggcgtgaccggcaagcagacctggaggtttctgaccgccctctaccgcagcgccacccgaaccgccccggccccgcgcctataagcgccggatgcgcaaattatttttatatttccgccggggagacttgtaaaattgcaaaaagtgacgtataatgctatgcataatttattctacgaaagaaggcatggatatgaacaagtgttatattccgaccggctatcagaatccgctgacagtctatgaaacacagcgcgcgattgagtttattaagcgaaatttccagagcaatctgtgccatgcgctcaatctcaagcgtgtctccgccccgctttttgtagaagaatcctcgggcctgaatgataatctcaacggctacgagcgcccggtcagctttgacgtccccgccgtcggcgcggagagtcaggtcgtccactccctggccaaatggaagcgctacgccctcaagcggtataatttctacactggcaagggcctggtgacggatatgaacgccatccgccgcgacgagagcctggataatatccactccgtctacgtcgaccagtgggactgggagaagatcatcacccgggaggaccgtacggaggactatctcaaaaacaccgtacaggccattgtcaacgccatctacgtcaccaatgagacgctgaagatcgaattccccgtcctgtcgacccaactgccccgggaggtcctgttcgtcacgacccaggagctggaggaccgctaccccggcctgtcgagctctgaaaaggagacggccttcctgcaggagcacaagcacaacgccgtcttcctgatgggcatcggcggcaagctccgctccggcaagccccacgacggccgcgccccggactatgacgactggaccctcaacggcgatattctcttctggaacgaggttctgggccgcagctttgaggtctcgtccatgggcatccgcgtcgatgccgccgcgctggaccgccagctgcacgaggccggatgcgacgaccgccgcgccctgcccttccacaaggccctgcttgcagatgagctgcccctgaccatcggcggcggcatcggccagtcccggctgtgtatgctgatgatgggctgcgcccacatcggcgaggtccagtcctcgatctgggacgatatgacccgcgagacctgccaggaagcgggggtcatgcttctgtaacacaaaattcaaaaattcataaatgaatttttgaattttgcttcaaacaggacccgctgcgctgggctcctgtttgaggggattgcaccctgctgcgcgcataatttccgcgcctgcgggcgcggaaattccacagcgctgcaggtgttcgacttgaccaat

SEQ ID NO: 2478 - DNA, 4477 bp, Unknown
  16S sequences of unknown bacteria
cggtatattactcacattttccgattgccgtgaaggttgccgcttgcggtttttcggcaagatgaggaaaatggcggtaaaaacaaggaggaaataaaaatgagcgtagtatccatgaaacagcttctcgaagcaggtgtccatttcggacatcagacccgccgttggaacccgaaaatggccgaatacattttcaccgagagaaacggcatctacattatcgatcttcagaagacggtaaaaaagcttgaggaagcttataattttgtccgtgaggcaactcaggacggcggcgaaatccttttcgtcggaaccaaaaagcaggctcagctttccattaaggaagaggctcagcgctgcggtatgccttatgttgacgcaagatggctcggcggtatgctcaccaacttcaccaccattcgccgcagaatcgaccgtctcaaccagcttcgcaaaatgcgcgaggacggaacctttgaccttctccccaagaaggaagttattaagctcaacgccgagattgaaaagcttgaaaaattcctcggcggtattcagaacatgaagaaaatgccggtcgcaatgtttgttgtcgaccccagaaaagaaaaaattgccgtttccgaagctcataagctcaacattcccgttgtcgccattgttgataccaactgcgaccccgatgatgttgactatgtaattcccggaaacgacgacgctatccgtgcggttaagctcctttccggcgctatggccgacgcagttctcgaggctcatcagggcgctgtgggttctgccgaggttgccgatcaggaagccgaagaggccgccgaataattcgtttaaattaacctaacaggaggaatatataatggctatatcagctcaagacgttaaaaagctcagagaacagaccggctgcggcatgatggagtgcaaaaccgctcttaccgacgcaaacggcgatttcgagcaggcagttgtccttctccgcgagaagggacttgccaaggcagagaaaaaggccggccgtattgccgccgagggtaccgttgttacctacaccgacgaggccaaaaaggtttccgttatgatcgaggtaaatgccgagaccgactttgccgccaaaaacgagaaattccttgattttgcaaagacctgcgccaagaccgttgccgagcaggacatcaaggatgtcgacgctcttatgaacgctactcccgccggtgccgaccgcaccgttgacggtatgcttaaggatcttatccttgtcatcagcgagaacatgaaggttcgccgtttcgttaaatacgaaggccccgttgtttcctacattcacggcggcggaagaatcggcgttatggttaaattcgacgtcaccgacgaggttgccgccaatgccgaattcaaagaggctgccaaggacgttgcaatgcagattgccgctcttaacgttcccttcctttcggaggacaccgttcctgccgacagaattgccaaggaaaaggaaatcatcaccgtacagatcaaaaacgatcccaagagcgccaacaagcccgacgccatcatcgagaagatggccaccggacgtctcaacaagttcttcaaggaaaactgcctgcttgatcaggagtttgttaaggactccagcatgagcgttgccaagtatcttgactctgttgccaagaagatcggcggagacattaagatcgttgatttcgttcgctttgaaaagggcgagggacttgaaaagaaagaagataattttgccgacgaagtcgccagcatgatgtaatctttttaggaattttaaatgagctttcgtttttcgggagctcattttcttttgtgttgatattttcggaaaaaaatagtataatacttccttgcagaacatattggaggtaatttcattgaaacctttgcttgaaaattattataacgatcttaaaaataaaaccgttaccttttgcggaataggcgtcagcaacacacccatgatagaaaagcttgcaaaaatgggcgttaatgtgactgcaagggataagcgcagcgccgaaaagctgggtgaaaagggaagtgcttttgaaaagctcgatgtcagacttatccttggagagaactatcttgacgacataaccgaggacgttgttttccgcacgccggggcttcccttcaacacccctcagcttgtaaaggcaagggaagagggcaaaaccgtgacttccgaaatggaggaatttttcaagctttgccccgccaaaatttttgccgttaccggctcggacggaaaaaccaccacgaccacaataatatcaaagctactggaaacgacgggtaagaaagtttatctcggcggaaatatcggcacgccgctgcttgataaggttgacggaatgaatgaggacgattatgccgttgtcgagctttcctcttttcagcttatttccatgaaaaaaggtcctttttccgccgttgtgaccaatgttgcgcccaatcatcttgacattcacaaggatatgcaggaatatatcgacgcaaagcgaaacattatttgctaccaaagcgaggacagccgtgccaccctcaattttgaaaacgacattacacgcggctttgaaaaggacgttaagggaaaatgccttttcttcagcgacgtgcacaaggtggaaaacggcgtattttgcgatgaaaaaggcgatatttattcggccgataacgggaataatacctttataatgaacaagaaggacattcgtatccccggggaacacaatgttcagaattatatggcggcaatttctgccgttatgggatttgtaaccgccgaaaacattgtaaaggtggcaaagaccttcggaggagtggagcaccgcattgagtttgtcagagagcttgacggagtaaagtggtataacgattcaattgccacgagtcccacaagagccatagcaggccttaattcctttgataaaaagcttattataattgccggaggatatgacaagcatatcccctttgacccctttgcaaagaaggcaataaccaacattaagctgcttattctcaccggtgccacggccgatgcaatcgaaagctgtgtgcgtaaacaggacggctttgagcaaagcggccttgaaatcgtaagggtgaaggatattaaagaggctgtggacgttgcaagaaagcgtgccaaagtgggtgatattgtatccttaagccctgcgtgcgccagttttgatgccttcccgaattttgccgttcgcggaaattattttaaagagctcgtaaacgagctttaggagtttttatggatctgaaaaaaacattatcggaactttgcaacgcgtcaaacgaacaggctgcgcagcttgcggccgaatatctttcggaatttacttcgccggagcgttcggctctcggaaatgtatacggccttttaaagggtaaaaaggactacacgattcttatcgatgcccacatcgacgaggttcattttgtagtgacctcggtggatgacgacggctttttacacattgataaattcggcggtcccgatcttcgtccgctttccggcgccgaggtaacggtatttgcggcaaagccgctttacggagttgtctgcaaatatgagcttgaggaaggaaaagctccttctgccgataaaattaaggttgacatcggtttttcgggagacgaggcgaaaaaacgggtcaagccgggggacagagtgtcctttaaccaatcgtcgctcattcttttaaacaataaaatcaccgcaaaatctcttgacgaccgtgcgggtatcgctgcgctgcttgctgcagccgaaaagctaaaaaatgcgggagaaattcccgtaaacgccgcttttcttttcagtcaatttgaagaaatcggcggtatgggcgcgttgaccggaacaaaccttctccgtcccgacgaggcaatcgccgtggacgtcggattcggcgataacaccggcgttgacgaagaaaaatgccaaaagctcggcaaaggtccgcaaattggattttcgccgattttgtcggggaaaataacatcaaagctttgttcccttgccgaaaagagaggctatgattatatgcgggacgtgtgcggcggacgcacatacacaaatgcagacaatattttttcggcggtttgcggggtgccctgcggccttgtgtcgatacccttgagaagtatgcacactcccgtcgaaacggtggatttttcggatattgaaatgacggcacagcttatttttgattatgttatgtcgggagggattgaaaaatgaacgggctttttgacataataaaagagctgtcgcacatcgattcggttacgggcagcgagcaaaaatttgccgaaaaaatcaaggaaatgataacagccgacatacgcctttttgaggataggctcggaaaccttgtttattcgagaggaagggataattctcttcttcttgcggctc

SEQ ID NO: 2479 - DNA, 6407 bp, Unknown
  16S sequences of unknown bacteria
ggaaatatcggcgagatctatccggaggatattcagagggaatatccggaggatattcagagggtatgcgggctgatccgtgaattcatcgaaacacagcagtaaagggacgtctcacagattcggtttgcatcaggcgttgtaaagaagtataaggaggggacaagatgaacgagatcaaaggtattattttcgactgggccggaacgacggtggactacggctgctttgcgccggtacaggcatttgcggaagtgtttcgccactttggtatcgagccaacctcacaggaagtgagggagcctatgggaatgctgaagatcgatcacatccggacgatgctccggatgccgcggatcagcgctctctgggaggaaaaatacggcagaaagccggaggaaaaagatgtgaaggaactcttcgggctcttcgaagaaaagctgatgagcatactgcacctcttcgccggtccgaaacctggcgtcgcagaaacggtaaaggctctgagagagaaaggcatcgccatcggttccactaccggatatacggataagatgatggcgattgtggcgccggaagcggcgaaaaggggatacgctccggacgtgtggttcagtccggattctgtaaatcagaagggtcgcccgtacccttatatgatctttcgcaatatggaagctctggggctcagcgacgtgcgcggcgttctcaaagtcggggatacggtttccgatatcagagagggaaaaaatgccggcgtgacgactttcggagtcgtcatcggcagttcggaaatggggctttcccgggaggaatacgaatctctgtcagaggaagagcagaaacagcgctgtgagcaggtggcggaaaaatttctcgccgcaggcgcagaccggacgattttaaatctggaagatctcctgaagaccgtgtgaaaagagaagcgcttgcagagccgggaaaaaacgcggtgagcggaatcgaaaatttcacgataagcagagccgggaaattccaagaaaaagggaaattcctatctgtgggattcggacagacctcaaaaaacggaataccgcctctccggaaggagagcggtcggtcagatgcagaagatgcaaaagaggggagaagatatcagagcttttcccctcttttttcgttttttgcctttttggttctgacccggggctgaaagaaaccgcatgaaaaaatatctgatccgcccgcagggcgggaacgagatgacgcaggacggaatcagatttacagacgatacatatgattcagcgggccgcagccgctgcccaggtcgagtccgcaggcgatggcgccggtgataaattcttttgctctgattacgctgtcctgtgtagaccggccctccgccagtccgcaggcgatagcggaggaaagagtgcagccggtgccgtgagtatttttgttatcgatatgaggagcgcgaaaccagtgaactgcgccgctgctgaaaagaagatcgtctgcagactcggtgagatgtcctcctttgaccagtatatcgccgtttaacgattcagcgatgatttcggcagcctttctcatatcttccggacaagagattttctttccggacagcatttccgcttcggggatattcggcgtgatgatacgggccagcggcagaagagatttgatcagagcctcctgcgcgctgtcctgcatgagccggccgccgctggtggctatcatgacaggatccgctacgatattttccgctctgtgataactcagtctgtccgcgatgacgcggatgatttccgcattggaaaccatccctatttttaccgcatccggccggatatcctcaaaaatacagtcgatctgctgcgctacaaaatccggagacatttccgtgacgctgaagacgccggtggtattttgtacggtgagcgctgtaatagcgctcataccgtacatgccgtatacggtaatcgttttcagatcggcctgaataccggcgccgccgctgggatcggaaccggcgatggtgagtattttcttcattttttctttcctttctccttcggctgtttcgaatcagggaaatcagttaccggattcccggccattcgctgtaggaattcagatagagaaccgacagggctctcatttcctctctttcggattcggactgtttatcgtagacggatatggtaggaaaaccggcggagaatgcggagcgtaccgcgtgagccacgtcttcaaagaccagcgtttcctccggtcgggttccgagtttttcagccgcgtaaagatagatgtcaggctgtgttttcggcatcccaagttcgccgcaggtgataatgccctgaaaataatccatcagaccgaggcgttccatcgccgcggcgatcatatcccggtcggtggcggtggcgatgtaaagaggaatgcctttgccgtaaagctcccggatgactttccggacaccgggtttgcactgcagatgatggctgtaatcgtctcgcaccatatcgatgatcctgcctacgatttcgggaaccgtacccgaaatgccgtaagtttcatggaagatggcggcgctttcctccagcgtacgggttatcatctgactgtcgatattttccggcggagtgatgccgtttttctgcagaaaccgggaaccgacactgcaccacatcggcatggaatccagaattgtaccgtccacgtcaaagatcgcccctctgacggtaagtctgtggaaggcgtccggaaaggaaatcccgatatccgcagcgcagagggattctgagagtttttttgccgcggaccgggggtcttccgcagagaaaatggcggagacgacagcgacgccgtcgattcccgtatttctgaggagagggatatttccgtcggtaatacctccgatggcgaccgtcggaatcgagaccgaactgcagatccggcgaagttcatcggaggatatggatacggtatctttttttgtagacgtcgaaaatactgcgccgataccgagataatccgctccggccgcctccgctgccgcggcttcttccggattatgagcggagacaccgattatcttatcggggccgagcatacgccggacctcctgtactgagccgtccccctgtcctatatgtacgccgtctgcgccgcacttcaaagcgatatccggccggtcgttgatgatcagcggtatgccgtggcggtcggtgatatctttgagttcctgcgccgaacgcagcagttggctgtcagtcagtgtcttctcccgcagctgaaccatggtagctcctcccaggatcgcctcttccacagcttggggcagcgttctgtttttcagcccgctcctgtccgtgacagcatagagccggatgtttttcggatcgattttcatgatatttcttttctcctgcttttctgtgtttcagatatgtctgtactgcttctttcagattgtttccgtctgcctgccggtaatcgaaaacggtttggaccgccgtacaaaacagggtgaaaatgagaaagaacggaagtgtcagtcccgccggcgtactctgatgctcgatatggcgcaggatgagaaatcccgccagacagagaaatatcccgagaatgtctctctttaaaagataagatgagtccgcagagggtctgccggaattgccagagatgcgctgaaggcaatatcttccgaggcagccggcggtgagaacccccaggaagggtacgaaaaacgcggagaggaatcgtacggcgttttccaggtggccggtgggaaagaagacagctgtcagcgcggcggcggacagtgagatgaggactgccgtcttttcatttatcctgctgcaatagattgtagcagaacttttccctgcggaaaagagaaagagacaaactgatatcactgcggacaacaggatgaacagaattccaaacagctttaccgcgggtaggccgagggcttcttccagtcccgggatcctcgcatggcggacgaagagaaagctgacgatctgaagggaacatccgccggcaaagtgtatgccggccccgacgccgtctgccgctgcagaactctgattgtgcagggagaacagaaataatacgggaatccatgacagcgcagcggcggaggagagttcagcggcttcaccgaaagagaggcggaaaccggagaattcggcggcagccgggaattccggagcggaaaatctgcctgcgcagaacagaatgattccgcacaggagaagggggattcccgcggtcagtgcaatgaaaatactgcgaaaaatccccgttttctcggacggaaaagaaaatcgcagcaggatcaggaggagcatgactgcgaggaagagataggaggcaggcgtcagcatgattttatctgtcagcagcgttcccggtgcggcggggccgaaagccatcgcggcacacagacttgcggttcgcagcgtcagagctccccggacgatgaaaaaaagcgatgtaaaaaggaaaaaaagcagcgctcccggcttttgtattctactggagcgggatggaggaacctgtgagaaaagagagctgtttttcagcgaggaagcgatccgggctgtcagaaacaggaggccgcagccggtcagattgccgatgagaatcgccgcagttccttttaatgtgctgaggactgagatggatgcgccgctgaaaataccggaaacagaaagagacgcgccgagccatatcagcgcggcgccggtcggggatgaatattttttgttcaatggatcttctcctttgcagatatgatttgcgcctttgcggacttctgagaaacggcacatgtcttgtccgcagtttgcgtatattaattcatattttgcagaggaggatttcatcactgaaatttctgaaatgaggaaaataacgggaaaatctatagcatcaggcgaaaaatccacccttcgttttcgatgagaatcgtattcgcccggcaggagtaactgtccatcggcagctccgcgccggtttcactgaaagttctgcaggctgcgggatcaccgccgggattcagccaaacggtctgcggaaaggattccgtccagggcagctgcagaacatcatattcgtcagccgcaaaggacaggagatatccgctgtggtcttttgcctcagtgattccctcgatcatctttccgtggaggcagtcttgttcctcgaagcagatccttccaggttcaaggcgtacgagggcatccgagagatctaacgcgatcagggccctgtcctccgcgtcgatggtgagttccgtcaccgtggtattgatattgtcggtaaacatatgaatcagctttccgtcagaatcataccattccagcaggggcagcacgataccgttttcccctgcgaaggcatggctgatggaaatatctgcaatcggagaaaaatcctcgatattttgtgtatcactgaaaaaaccactgttgtcgtagccgatcaggatatgtcctcttcgattgacgatacagcggtttacttcactggataacggttccgcagtcaggacggcgggcgcttttcccggagaaaagcggattcgcatcatatgctcttccgaaccgtcaaaaaccagaatgacccaaatgtcctccgtctgccgcaccgcaaaaaagatatcagacagaaccgggacagtatagaatcggtctccgccgctggtctcggtgactactcccaaagcgtaggaggaattctcccgatggcgaaacagcatggatgtgccgaagaagtcgtcgggattataagtcagaagttcccagtcagaacgttcgtctacaggaatacagcgtttccaggggtacagtttttccgcgataagattttttgtcatagggactcctttgtgaataagttcttctgaaattgtactccaattttcatgtatttgaaatacgcagcttctattttgaagtatattccagaaatcgcggatgtaaatttctcttactcgagaagaagacagagcgctgctgatgcaaaaatccataaaccggcgggtttctgaatatcggagacacactgtctgttcatgatatctttcagagatgagatggcgacaccgaaagatgagaacaggagaagaatcagaagcctgtcttgccccaccagagagccgcaggctccgatcagttttacgtcccccattcctatgccctgtctgtcgctgatgagaagagataatgatgcgcagatcatcataatcagaaagccgataagagctcctgcggcggcatctgcagcgcagggcaggatagggatagaaggctgcaggaatgcttggtcggtaatgtccggggcgtctgagacgcggcccgcgtctcagacgcaaaaaatcagagaatatggtttctgcggca

SEQ ID NO: 2480 - DNA, 3214 bp, Unknown
  16S sequences of unknown bacteria
gccccgcgccgcataggggacgcgggggctgccgcccaatccgtccggcgaagctgccgcagagagccggccggagcgtgtcgtttgcggaggcgccagcgcggcgcccacaggacgccccgacgggctgggactccatccgcccgccggcggcgggcgcccggttctcctttccggaaccgatcttgcggggacgggagacgctgccccccatccccggcttgtccggctccgcttatctgcgcggagccatggcggggggaatcggttggtgactgctcgtgtaaagcagcgatttagcggtaataattcggcgttacctttgattcatcaggtttttgcggtgaaatcgccgttcgtatcatgccatgcaccgtcgaaatatacctggccttcaatttcaacgatgtaggttttccctgtttgaatttcagcgctttggctcttatagcagtaattgctgttggcgctggcggacatggtagcaattttcttgcggccgatcagctgcttctggtacagcgttgcatcaaacttgatctttgttacatcagtaggtgccgtgacagaaacagaataagtttttgctgtggcatcaacattaccgataatcataacctcagtgtcataatagggctgtacatcactggcaaaggcgctgaccgtcatagtcagcagcatggcggccgccaatacaacggcgaacaatttggacgcggtgaattttcttgtgtacataagtaatcgatcctttcttgatcttaaagtattggagtgtcgcgacacattccggatatctatacgcagccagtgaaaattactggacaagtttttgggaaaaattttcgtattttcaaggatttgtaacttatgacaatttgagggggctgtatttgtgcaaaaagcagacgcatggcagggatatgccatgcgtctgctggaacagatttattgctatatactttgtttatactcaatttctacttatatatataatgtattagtagatattttccgcgatgcggtaaacttcagacagagatacctcagaaccttcaaaataaattatatgctcaataccgtccttaacccacagcattatataaccatcgtgccctttgaatgtgcccaattgtccagatacgccgttaaatgtgatttcgctgtaaatgatattcttgctatccattaaataaccagaaggaccagaggtgttttgcgtagtggtgcatgtaatttgtaaaaaagtatttttatcctctgatcgataaaggtaagaaaatttgttatcacttcttccgggcgagttatcctgatacaccaacccatccggaatatagtgcggcccataaccctcgggaagaacggcaggccctttgccctcgacttcgtactgaatccggacaaaattctccgtccattcgatcagggtgttgaccacagcggcacgcatctcggcattggtcatcagcgtggcaaacagcacggacagcacaatgacagccgccgccagcgttttgcggaccacatgcagcgatctgcggcgcgcgcgcagcagcgccttgcgttcgacccccagcgccgcgaacgtccgccgggtcgcttcggacgtgtcgggatacttctctttcaattccttcggcgtcgggtaggcgtccacttcccgccgcacgctctcttcgcaggctgctttcagcagttcccgcagtgataccagttcaggttcctgtttcatcattcttcgccatcctttcccgcgccatgcgataggcgcgctgaagccgtttgtacaccgtggtcttgttgagatcgagaatgtcgcagatctcgtcatcgctgtaaccgatcattttcagccgaagtgtgtcgcggtaaatttcgggcaaactgtccacaacggctatggcgtgttcgagccggtcggcggtcatcaccaaccgttccgtgtccagcgacgcgtcggcgaacacgctgtcggtatcttcatccggaggttcacccgcgggatggccggcctgttttgcatcccggcgaagatagtccaacgctctgcgccgggcacaaagtgcggcaagatgcgtaactttcttgctgctcccgctgcgaaaggtggaaaagtgtttggcaatgtacacgaacgtattctgcatcacatcctctgcggccgaaggacccacgatcttttcggcttcgtagagaaccaggcggtgatagcgttcgtaataccggagaaaagcctcctcatctttctcgttttccagaaatgccagacatgctgttaatgaaaacatactgcgatccccccttgaaattccgaagatttgttttataaaatacctgaaagcggtatggatgtctatggctgtctacggttgccggaggggtcttctatgaacagaacgcagcaaacgaaaaagactggacaggatttttacaatttcctaataaaaattggcggacatttgtccgccaaagagaaaaactgcgcattgaaaagcgtgctgcggcgtggtataatacaaccagcacaagtccccctgctaccgcagacgaaaggagtaaattgtatgaagttcacatttacctgcaaaaaagttgacctgaacgattcggttaaggaatacgcggagaaaaaaatctccaagctggatcgctatttcaaaaatgaagcggaggccaacgtcaccttctctgtggagaaaaacaaccgctgcgtggtcgaagtgaccatccggggcggaaatacgctcttccgtgcccaggaggaaaacaaggaaggaaatatgcgcgccgccatcgacacggcgcaggaatatatcgaccgccagatccgcaagaataaaacgcgcctggagaagcgcctgcgtcagggcgctttcgatccctccgtcctggccgccgagccggaggtcagcgaggagcgcgagttccagatcgtgcgcgagaagcatttctccatcaagcccatgagcgcggaggaggccatcctgcaaatgaatttgctcgaccacagctttttcctgttccgccgggaaaatgacaatgccctgtgcattgtctatgcccgcaaaaacggcggctacgggctgattgaggcggacgaagccatcgaagagtgagccggggactgcggtgccctggattaaaaaaacgggagtacggatgattccgtactcccgttttctgtatgtgccctgtgtatcagctgtctctt

SEQ ID NO: 2481 - DNA, 32759 bp, Unknown
  16S sequences of unknown bacteria
cggtgctttctggcgtcccagagaggatttgaacctccgaccccacgcttaggaggcgtgtgctctatccaactgagctactgagacatttataagttttatgtaattttcattgctcgaaggaatcgaacaatctgccgcttaggaggcggaccctctatcctgctgaggtacgggaccatgtcctcgaaatccttattttacaaggctttcgagcttttcggtcttcctgaccgaggggagtcatccgggctttccgcgttagctggctaactgcgggcggcgtgttcgactttcacaggccctttatcttccgcctcgcgttagctgtttggcggtcgctctgggagggaaaatcgaacagattccgggggatttggggcacttgatcgctcaattcaggcggcagtccgacttcttattaggaggcgaccgctctatcctactgagctacggaggcagattcggaaacgctgcgcagttcgtgaaaagacgctgcacagcacaaggccgtttcttattatagcaactctttccctcctttgtcaaagtatttctttctgtttctcgttcatgaaatatgtacggaacgttggattccattcaacgcaaatattgcatgtaatgcaagcgtttgcgtaattcattcaatttttacgaattttccgttcaaaaatgtttgattttatttttagcacgtgatatactactgtgagctgggttaatcagcttgtttttggtactctttatccctgtgaaaagaggtttcccgtgcaatacgctatgctcttgaagccgcactcgaacgtcagataccgtcattcgctggaaaaactggcaatgaccgaactttcctgcgttctgaatgcatggaagcttccgtctgatatggagcttcgctctctggggggagagccttttctggtattttccgctccagaactgaccgtcccgcaatggcgcgatatttccgcaaacgctggctgctgctttgccgccgagctgcgggaagacggttctctggctcctctgccccgcgccggacgcagctattacccggaagaactttcggagctgatgaagtacaagggaaaaaccaacgcagatttcacccggctgcttttgcactgcgcccgcgcggtctccgggttcgcgcagagcgacgctccgctgacggtactcgaccccatgtgcggaaaaggaacgacacttttctgcgcgctggaagaaggagaccatgccgtcgggatggacgtggacgcaaaagcattgctggaagcggatcaattattggggcgttccctgaaaatgaaccgcttaaagcacaaacgagaagaaagctcgctcacggttccgaaaggcaaaccggtccgcagcgtaggctaccgtctcagcaccagcatcgagggctggaaaagcggagacgagcgtacgttccggcttctgaacggcgacctgggcgtgcttccagctgtcatggcgcgggaaagcttccatctggcggtggctgatctgccctatggcgtacaacatgctcccagcgaagggagaaaagtcatgtctttggcgaactttgcgtcaaaggtatgcgaaagctgttttgccgtgctcaagcacgggggcgcgatcgcgctttcttttaacacgtacacacttgcccgcgattccgtgctgcaagccatggagggcgccggtttcattccgcagaacgaagcgccctacaacggtttcgcccattgggtggaacaggctgtggatcgtgatgctgtgctggccgttaagccgtaaagacaggcagttttgaatggttgttccgggaagggaaaaggaggggtttgtttgcagatgaaagaattgcagtcgatgactgtcgtgcagcttcgggcgcttgcacgcgaaaacaaagtaaagctgagcgccggcatcgataaagaagggatcgtacagcggctttatcatgcgctgggcgattcggacgaaagcaccgcggcgactcaggaggaagcagcgcccgtttctgcagaaggtactgtttccgccgagagttccgcagtgccgcaggaaaaccggctggaggaatctctggcggccgatgtgacttccgttcagccaggcagcggctaccgcccctggggcagcgaacggacggaagaaacaaacggcaattatcacccggttttccgtcagggatggcaggcgcgcaccgcaccccaacgggagacttctccccgtcccgcatggcagcagcagcagcggcccgtaggcacggccaaccgtttcggcccgcaggcgtccgccccttctcagcccgtggttcagcaggaagaacggcaggattcctatcagccccgcattcccgaaaatgcgccccggctggacggctaccgtctgggctaccgcgccgctcctcagcggcccagctaccagaaccgggataacggctaccgcaattcttcctatggtggaggaaacgcttcctataacaatggatacaataattcctataacaacggttaccggcagaacaacttccgccagcagtccgcgcccgcctacggcggctatggccagcagcagccgatgtacccgtctcggacccctgttgacaaccgtctgagcgacagcatctatcggatgagccgcgaccagcaatttacggagcaggcggaagcgggcatgattcccgatctgctgaaggtgccggaaagccggcctgtctccggcattctggaagtgctgccggatggctacggttttctgcgcagcagctctttgctgcccggccgagatgatatttacgtctccatggcccagattcgccgctacgacctgcgcacaggcgatttcatcgagggtggagccaaggcccagcgggacaatgagaaattcgccgccctgctggtggtggaaaaagtgaacggtgcagaggccgtcgaaaatccgcagcggctgaacttcgaccagatgacccccgtttaccccaataagcgcgtcgtattggaagcgcccgacggcagcagcagtatgctgattcgtctggtggatctgatcgcccccatcggcttcggccagcgggccatgatcgtttctccgcccggcagcgacagtctttctatcctgcgcgatatcggctgcgccatcaagcgcaacgatgaaaacgccgaggtgctgatgctgctgatcgacgtagcccctgaagaagtgacggagattcgtgaaagcgccgccggagaagtgttcgcctcgacctttgccgattcgcccgaaatgcagacccgcgtcagtgaaacgatgctggaacgggccgagcgtctggtggaaagcggcaagaacgtggtcatcctgctggacagcctgacgaagctgacccgcgcctatcagggtacgctggtgcagagaagccgacccatgagcaataccgtcacccctgccgcgctggtgcggcccaagcgtttcttcggtgccgcccgcaatacccgcgagggcggcagcctgaccgtggtggccaccatcaacatcaacactggctctagggtggacgatatcatctatgaggagttcaaaggcactgccaacatggagctgtatctgctcagccccagcgacagcgaccctatccaccccatgatcgacctgcagcgctgcggcaccaagaaggacgacatgctgctggacgaggctcgcaaggaaagcctgcgctccatccgcaaggttctgggcagcgctaccaacggcgaggccgtggtgcagctgatcgacatgatgaaaaagaccaagtgcaacgaagacttgatggcccgtttgaaggaatgggtcgcgctttgggaaaaaagtggctatttgaagaagtgattctttccccggtcagcctgaaagggttgaccgggttttcctttcccccattttgagttttttgaaaaaagctcaaaaaaaagcaaatttatgcttgacactttcccggagctgttatataataaatctcgttccgcaggggacggcaaacaagcgactgggtgtggcgcagtttggtagcgtgcttgaatggggttcaagaggccggaagttcgaatcttctcacccagaccattaaaactcggaaaccataatggtttccgagtttttctgtgccaaaatattttctcagaatcttttcaaaagccccctattttccagttcagaggttcaggcttttccgcttttctgtttctatggtaagagtccaaggaattgaacgattgctccatcaaaagcggagtgaaacgccatgaaaagactttttccctgctggttcacacgtcctcggaacaagatcccccaatattttcagcggcgaatcggctatcgacatgtgtacgccattccagagggctgcctgcgcgctcctttacaacgccacgaagacaggctgtgtgctgcccgcctgcagaactggacggggactgtttctgtcaatttctgtgcagagcttttccgaagaaaaacgaaattcagaagggttttgccccgcctatgtataaataacttctgaacaacaaaaggaggttcatcccatgcttttgattcgcggtggaaaaatcaagcccattgtgggcgaagaaatggaaaacggcgagctgctcatcggcgacgatggaaaaattgcggcgatcggccaaaaggtggacgcgccggagggcgtggaagtgctggacgcttccggctgtctggtaacgcccggctttattgacgcgcactgccatatcggcatcgacgaagagggcgttcgctgggagggcaacgacaccaacgaatattccagccccgtcacgcccgagctgcgggccattgacggcatcaatccccggtgcgaggcttttgccaacgcgctggcgggtggtgtgaccaccgctgtgaccggccccggctctgccaatgtgctgggcggctcttttgtggcgctgaagctgtacggcgactgcgtagacgatatggtcgtcaagtaccctgccgccatgaagatcgctttcggtgaaaaccccaagggctgctatggacagaacggcaaaaaggagcctgtgacccgcatggcgatcgcggcgctgctgcgggaacagcttttcaaggcgaagcgctatgccgccgaggtggaggccgccgaaaaggacccggaaaagactcgtcccttcgatatgcagctggaagccctgctgcccgtcatccgcaaggaaattccgctgaaggctcatgcccaccgggcggacgatatcctcaccgccctgcgcattgcccgggaatttgacgtggatatcacgctggatcacgtgaccgagggccatctgatcgtggatcatctggtcaaggcgggcaagccggtactggtcggcccctcctttggctccaagaccaaggtggagctgcgggaaaagagcttcgctacgcccggcattctggataacgccggtctggaagtctgcatcatcaccgacgcgcccgtgatcccgctgtactacctgcccctgtgcgccgggctggccgtcaaggcgggcatgaaggaagaatccgcctggcgggctatcaccatcaatcctgcccatgtgatcggcatttccgaccgcgtcggctctctggaagtgggcaaggacgcagatatcgccattttcgagggcaatcccctgcgggatattcagtgcaagaccaaggctgtgtttgtgaacgggcagcaggtcagcaagggctgacccttcccccattctttcagcgctgcttctctattaaggagaagcagcgctttttgcttttgagtttaccttgcgttcacaattcgttcattgactttcccttcaaaatcagtataattttgaatgttccaatattaaaatatctaacaggaggagaaaatgcctgagtggaatctgaccggctcccggatgttcagccacgctgccaagtttattgacgcgtatcacaacgtgctgcagcccctttgccgggaaacgggcctgccgccgatggcgatggatattctgctgtttgtggccaacaacccggacaggaacaccgccagcgacatctgccaatgccgcggcctcaagccaggaatcgtctcggttcatgtggacaggctggtgaacgaagggctgctggttcgggcagaggccgcaaacgaccggcgcaagacacggctgacctgtacggaaaaggcacaatctgtcgtcgcagagggccgcaagctgcaaaaggcctttgcgaataagctgtcggacggcatcaacgaaagcgatatggagtccttccgccggacgctgacccgcttcggagagaatctggaagatattttgcgtcatgggctctgattccactgggagattaggagggtgaaaacatgctgaaactactgaaaaacatgcgccggaaagaggccctgatggcgctgatctgtctggtctttgtggtaggacagatctactttgacctgcggcttccggactacatgacggagctgaccatgctcatcaagacctccggccagacggcggacattctgaacgtcggtctgaaaatgctgggctgcacggcggccagcgcgctgctggcagtcgtttgcggttatctttccgcccggacggcttccggcttcagctttgtcgttcgggaaaaggtcttccatcatgtgatggacatcgggcaggaggaaatgtctgatttctccgtgcccagcctgatcacccgaaccaccaacgacatcacgcagattcagatgatcgtcgccatgggcctgcaaatgatgatcaaggcccccattatggccgtatggggcgtgatcaaaattctgggcaagagctgggagctttccgttgtgaccgccggttttgtggtcgctatctgcctgacggtatttctggtcatggccacctgcattccccgcttccgcattgtgcagaagctgacggacagcattaaccgggtggcacgggaaaatctgaccggcatcaatgtggttcatgccttcaacgccgaaaagtatcagaatgataaattcgacggccccagcaaggacatgatgaacgtccagatgaagaaccagaagctcttcgcactggtacagcccaccatgaccctgggcatgaacggcttggcgctggtcatttactggctgggtgcggcgctggtgaatcagattccgctgacagaccccatgagccggctgaccatgttcagcaacgtgctggtattcagcacctatgccacctatattatcatgtccttcatgatgctggtaatgatcttcatgatgctgccgcaggcggaagtttccgccgagcgcatcaacgaagtgctggatcggaaggcttccattaccgagggcagcgtccgcgaaggcagcgagcgcggctccgtggagttccggaacgtctgcttccgttaccccggcgcctctgaggaggatttgagccacatcagttttcaggtcaagcagggcgaaacgctggccatcatcggtgcgaccggcagcggcaaatccacgctggtcagcctgatcccccggttctatgacgcgacctccgggcaggtgctggtggacggcgtggacgtgaaggattatgccttcgacgcgctgtatgacaagctgggttacgtgactcagaaggcggtgctgttctccggctccatccgggacaatgtgttcttcggggaaagcgctgcggctgcggacgacggcgcgctaagcagcgccattgagctttcgcaggctaaagaatttgttgataagctgccggaagggacggatcaccacattgcccagctgggccgtaatgtctccggcggccagaagcagcggctttccattgcccgggcgctggcccgcaagccggaaattctggtattcgacgactccttctccgcgctggactaccgcaccgacgcaaagctgcgggaggggctggccaaacagctgcacgacatcaccaagatcatcgtggcccagcgcatcagcaccattcgtcacgcggacaagattatcgtgctggatcggggcgaagccgtcggcatgggcacccacgaggaactgatgcagaattgcgaagtctaccgcgagatcgctacttcccagctcagcgcggctgaactggcgtaaaggagggaaactgttatgatgagaaatatgcatggccgtcccaatgaaaagggcgatatccgcactgctctgccctggatgacggaatacctccgttccagcatgggcgtgatcgtcttcgcactggtgctggcggcactcagcgccgtcatgaccatcatcggcccggataaaatcggcagtatcgctaccatcatgtccgacggtctgactacaggcatcgacctgaacgctattgccaaagtgggtatttttctggcggtgatctacgttttaagcgccctgttcagcttcacccagcattacatcatgtccgtggtcacgctgaaaatgtcctatcggatgcggggcgaactgtccgagaagatcaaccgggtgccccagaagtacttcaacaccacttctcagggcgatattctcagccgcatcaccaacgacgtttctaccctgcagcagggtctgaccaacagtctgcccaccatcatcagcgccgccactcagtttgtgggctgtctgatcatgatgttcgtcaccgaatggcggctggcgttgatctcgctggcggtaacggttgtaggtctgctggctaccgcgctgatcatgtccaaatctcagcggtactttgccgcccgtcagcaaagccttggcgaactgaacggctacgtggaggaaatgtattccggccatgaggtcgtccgtatcagccgcgccggccgcaaggtaggcgagcactttgaccagctgaacgctgccgtatacgatgccaactggaagtcccagttcctttccggcgtgatgcagcccctgatgaacgtcatcggcaacatcgcctatgtggccgtttgcgttgtgggctccattctggccatcaacggaaccattgagttcggcgtgatcgtttccttcatcctgtatgtgcgcctgtttacctcgccgctgacccagatcgcgcagggcatgaccaacatgcagacggcctccgcctccgcccatcgtattttcgattttttggaaagcgaagaaatggccgatgaaagcgacaaggcctccgcgctgcccaaggtgcagggtgccgtcaccttcgaccatgtgcggttcagctatcctgactccccggataagatcatcatcaaggacttctccgcgcaggtgcatcccggccagaaggtggctattgtaggccctaccggcgcaggcaagaccaccatggtcaacctgctgatgcgtttctttgagatcaactccggcagtatttccatcgacggcgtgaaaatttccgacatgcgccgggaggcggtgcatgaactgttcagcatggtgctgcaggacacgtggctgtttgagggaaccgtccgggaaaatctgatctacaacatgcagggcattacggacgagcagttggaaaaggtctgcaaggcctgcgggctggacaaattcgtccactcgctcccccatggctttgacaccgtgctttctgacagcaccagcatttctgccggtcagaagcagctcttgaccatcgcccgggccatgctgcagaacgcgcccatgctgattctggacgaggccacttcttccgtcgatacccgcacggagctgctgatccagcgggcgatggacgagctgaccatgggacgcaccagcttcgtcatcgctcaccggctgtccaccatcaaaaacgccgacctgattctcgtcatgcgggagggcgatgtggtggaaagcggcactcacgatcagctgatggaaaagggcggcttctacgccgatctgtacaacagccagttcgagcaggccgcgtaaaaagtctctataatcgaacgagccgccgtgtggatatcacacggcggctcagcttgtttttcaatgaaaatctctttttacagaatatgaacgtacaggcagcgcttttgaaaggctcaaaatttccttgggaatcagccataaaaagccgaaccacgcccatccataacgggaataaaaaccgctttcgccgtttttccccgatggacttttgtgtccaccgcgcaacttgcattggcgatagctcaggagaaagacgatacaagccggcctgcacagtcagactggctttttctgtttctacgccatccgtcgaccccttataattctttcaaataaaaacgattcatggtgctgtgctgcgtccggcagggcttttcgatcagatggaagcccatcttttcatacagtttcagtgcgaccgacagattggtatgggtttcaaggtacagctttcgataaccggccgattttacccattcctccgccagatgcagcagttcttttccgtaccccttgcccttcacggaatcagacagataaagcttttgaagctccgcacagtcttccaagccgtcaaattctgcgattcccacgccgccgctcacttgcccgtcttcatccaatgcgacaaaataaacgcgtttggccggatcattgttatagtacgcgctcaaatgacccagttcaggatcgaaatacgccgttccgggaatatccagatgaagacgctgcaaattttcccggatgatttccgcgattttttggtcatcggcctcttttattttgcggtacttcattcatttttccctcttctgctgctcggctgtcaactttttcaattgccaaaatgctgtatagcaaagcacgctcctcgccgcttcctgctatagttgaaccagtacagtctatgacgttcgtcggatttctccccaaaacgttatttcttcccctgcgcttcggcctttttgcggaagatttccttcaggctttccgtatagggcggacgggcgataccgtattccgtgacgataccggagatcaactcatgatccgcaaagtcgaaagcggggttgtaaacctttaccccggcgggagccataggctgcttgtaccacatttccgtcacttcggaggcagggcgttgttcgatgggaatgtcctcgcccttttcgatactcatatcgatggtggaggtgggccccagcacatagaagggaatgccataatacttcgccagaatagccacgccggaggtgccgattttgttgcaggcgtcgccattggccgccacccggtcgcagcccacaaaaaccgcgttcacccagccgtttttcatcacctgcgaggccatgttgtcgcagataacggtggtgtctacgccgtccgccagcatttcgaaggaagaaaggcgtgccccctgcagaagcgggcgggtctcgtcgcaatatacccggaagtgcatccccttctcccggcccagatggatgggagccagcgccgtaccgtacttggaggtcgccagctgaccggcgttgcagtgggtcagtacgccgtcgccatccttgatcaggctcaggccgtattcgccgatcttgcgacacatccacacgtcctcgtccttaatggcgatgcactcccggcgcagcagctccttgatctccgcaaccggcttgtcccggttgtcgagggcgacctgctccatccggttcagcgcccaggagagattcactgccgtaggccgggaggagttcagatattccttggcttcatgaagctgccgataaaaaccgtcgaagtcctccgcctgaatctgccgggcggccagatacaggccgaagcccgcagccacgccgatcgcgggcgcgccacgcacctgcaggagatagatagcctgccaaatgtccttctgttcggtcaggtgcagaatctccacctcgcccggcagcttcgtttgatcgataatgaccagcgcgtgattttcctcatccagcgccacggtttcgtagctcataatgttcttatctgccataaaaaacgcccctttattctgtattttgctgatacaaaaaaacgccgtccagcagcattatagcgccggcggcgtttttgcgcaaggaaacgcagatatcaggcagtaaaatccccctcgtatcgttttcctgcttcactttccatcgttttattctccgtcggcgggatcataaaagcggcctttgtggaaattctcgtttcccagcggacgggccgtcagacggaacatcacgcacccgtccgggcagacgatggtcttggcgtatttttcatcgccgcccacatatgtcaggtcgccgccgctgcggacggcctccatcagcgggtacagcatcatcatggttttagaacagatgccctgcccgtcctgattgaccgggcagccgtaggtgcagcggtagatatcgccgatctcctcgccgtttcggcagtagcgctcggtgtgatcgccgcgcagaaagccggtcactttcacggtaaactcgtattcttcctcataccactttttcattttcaagctccttttcggaaatgtcacagatattttgtcagaaatgcctccagcgaaggaatctcctccgcccgccagtactgccgaccgtccgcggtacggttcagcagaaagtggttgaacagttcccggcgcagcgtggcagggtcgtgaaagaccgtccattcatccagcagcgtattgatttccgcttcggaataaacttttcccatttccatctgtccggccagataccacagggccaacaccttccgtttctttttggcgggccagttttacagctgtccccgttcattcaaaaaaggctgcagctcccgcagctcgatcgaaatttccattctcgtctccttgaaacattcgatgtgcaacatgcgtattttagtataatgttcaaaaataaaattgtcaacaaaaatcccgttgaaggatgggggttcatcctccagcgggaataatttatgcttgtcggaaccagagcagcttttccaacggcgcttccagcacagcttcgattgggccttcgtagcgccgccctgcctcgtcctgccaggcgccctgtgggaaaatcaccctgcgcgcccttgcgcccttttccaccaccggggcgaccagtatgttttctcccaataaaaactgatcgttgatccgttcataaccgcagcccgggtatgcgtactccatgctgcggatcatgggttctccggtatgctcggtctcttccagcgcttgttcaatctccgggtacatttgctcatgcagctccgccatttccttgcagacctgcaccgccttgggcgaaagatgccgccacggcagcgaggaaaactgcatcatcgggaacagggccgaagcctctgccatgcgaatgaacagctcttcgtcatgcttgccgtaaacgaaggccgtccattcccctccgccgatcatatccggacagataaagggacagccgatcaggccggtaaagatcccgtgaggaatcaggcagtccagaccattgcccttccatgcgtgatttttgtcaaacagccgctgaaccaccggcttgccgcccatcttccaggtatccttgtattcgtgcaggcgataccgggaaccgaagcgtacccacgcctgattcagctccagcgtggaatagccgccgtagaagtctgtgccattcaggaagctttggggcaggcaggtgccgccgtcgaacttgaagccgtccgcccccatgtccagcagcttttgcagctgtccatccatatattcgcagtctcccggcaaattaaaattcagaatggccccgaagccgctccaccagtgctggatagcgacttcgccgtttcgatagcgcaccagatggtcatagcagggctgaccacccacgttttcagaggaacgggcggagtagagcttcaggaaattgtctccctcggagcacataaacgggctgacccagatcatcacctgaaagcccagcgcgtgcagcctagaaaacatttcctccgggtcggagatcagttcccggttaaactcccatgtgccctgacatttctgccagccgccgtcgatgatgaaaattcccggctggtagccgtgctccaccacttcctgcgcgtaagccagaatgtcctgctcgttctgatttttgatcagctccatccaggtgttgaattggggatggtgataaaactctcgaggcgtatgaatgccgctttcaaagggaaaatgggccttcatggccgccaaataggcttcccgcagggtggagccgggggcttccagctgcacgggctcgtcgctttcgatctccatgaccccgccgtccatctcaatagcgaacgcaccctcgctccagagataccgccccttgctggacagaaacagcggtgcgctctgggtgcggcgctcccgaagcaggtccacatgatactgtgtgtgctcgtcaaagggcatacgctccgcgtccttgatggtgccgccccaccagcattcgccggcaagcatggggatggtgagatgatagctcatgatggcgttcctcccaatattttctcgaacaaaaggtttgtgaaaagtataatctcaagcgggaaagccgtaaatatggtcgttttctagcgacgtttttttcgggtgattttgaccacaggcgtttccttcccatctccggctatgctataatacaggcggcggaaaccagagaaaacgaatgaacaggacggttaaaacgcgtgattgggcttcgaatgttttttcgacggtttcctactgatttttgattactttttcgcaacgagtaaggaggatcgcccatgagcagctacgtcatccgcaaaacccccggcaatactgcgtggttccggcacgaccgcttcggcatgtttatccattggggcctgtacgccatgcccgcccgccacgaatgggtcaagaccaacgagcgcatcccggaggaaaaatacgacaagtacttccagtattttaatcccgacctgtacgacgcgcgggaatgggcccgtcaggcgaaggccgccgggatgaagtacgcggtgctgaccaccaagcatcacgaaggcttctgcatgtgggacacgcagtacaccgactacaagtgcaccaatactcccgccaggcgcgatctggtgcgggagtatgtggacgctttccgggccgaggggctgcgggttggcttctattattcgctgatcgactggcatcacccggactttcccattgatatgctccatccccgccgggacgacccagacgcctatgagcagaatcagggccgcgatatgcgccgctatgcggaatatatgcgcaatcaggtcacagagcttttgaccaactacggcaagatcgacattctgtggttcgatttttcctacccggacaacgaagtcccggaaaagaccccgtggatgcgcggcaagggcaaggacgactgggaagcggaaaagctgatcgcgctggcccgcagtctgcagccccatatcatgatcgacaaccgcaccggcatcgagcaggatctgtggacgccggaacagttccagcccacggaatgggtgcgccacccggagaccggcgaactggtcaactgggaagcctgccagaccttctccggcagctggggttattaccgggacgagcagacgtggaaaagcccggaaatgctcattcggatgctggtcaacaccgtgtctctgggcggcaatctgctgatgaacgtaggccccacctcccgcgggtactttgactcccgggcggaaaaggcgctgggcgtttacgcggactggatgaaatacaatgcccgctccatctacggctgcaccatggccgagccggagtttcaggctcccgtcgactgccgcctgacccagagcggggacggaaagcggctatacgttcatctgttcgcctatcccttcgcccacctgattctgcgcgggctggccgggaaggtggattacgcccaattcctgcacgatggcagcgaagtgaaattcagcgacggcaaaatggagcacttcggcgaagcgctgccggagaataacgatcagctggtgctgtatctgccgccggtaaagccggactgtctggtgccggtgatcgagctgttcctgaaataaaacgaatatccgttctccccgccggagcctttgcggcttcggcggggttttggtattttggggaaaaaggctggacgcgctttcgaacctgtgctacaatgaatacgaacaaatgttcttattttatttttcacggaacgttccatcaccccggaggccgttggaaaggagcctgcatcccatgaacgagcgcgtctatctggctattgacctgaagtccttcttcgcttcggtggagtgtgtggagcgcgggctggaccctttgaagacccatttggtggtggcggacgccagccgcacggaaaagaccatctgtctggccgtttccccctccatgaaggcctatggcattccgggacggccccggctgttcgaggtggtgcagaaggtacgggagatcaatctgcagcgggagcgccgcgctccccatcgaaccctcaacggggcttcttttctggcggaggaattggaaaaatcgccggaattgaggatggactacatcatcgcccggccccggatggcccgctatatggcggtcagtacccgggtctatcaaatttacctgaaatatgtggccccagaggacattcacgtctattccatcgacgaggtgttcatggaggtcacccgctatctgaaaacctaccgcttgaccgcccgggagctggccatgcggatgatcctggacgtgctaagtgagaccggcatcaccgccaccgcagggatcgggacgaatctgtatctgtgcaaggtcgccatggacatcggggctaagcggatcgcgccggatgcgaacggcgttcgcattgcggagctgaacgagctttcctaccgcaagaacctctgggatcatcggcccctgacggatttttggcgggtgggccccggctacgcccgaaagctggaatccgtcgggctgcataccatgggcgacgtggcgcgctgttcgctgggcggccccggggaatattacaacgagaaccttctctacaagcttttcggcgtgaacgccgagctgctgatcgaccacgcatggggctgggaaccctgcaccatcgacgagatcaaggcctaccggccgggatccagcagtctgggctccgggcaggtgctgcaatgcgcctatcccttcgaaaaggcccggctggtggctcgggaaatggcggatcagctggccctctcgctggtggaaaaagggctggtgacggatcagctcgtgctgacggtggggtatgacgtggataatctgaccgacccggctattcgcaaaagttatcgtgggccggtgaccacggatcgctatggccgcgccattcccaaacacgcccacggaacggagcagttggagcggcctacttcctcctgccgtcagctgatggaggccgtggcgcgattgttcgaccgggtggtggactcccggctgctggtgcggcgcatgtacgtggtggccgggcgggtcattcgggaaaaagaggcaaacgaacatccgttctgcgagcagctggatctctttaccgactacgcggcgcaggaagcggcccgccgtcaggaggaaaccgcgctgaagcgggaacgcagcctgcaggaagccgccctgctgctgaaaagaaagtatggccgaaacgctctgtttcggggcatgaatctggaagaaggggccactgccatggagcggaaccggcagatcggagggcatcgggcatgacgggaaaatacgacgatatactgcggctgccccaccatatttccgccagccgaaagcccatggccatgacggcccgcgcctcgcagttcgccccctttgcggcgctgagcggctacgacgcggaggtacaggaagcgggacggctgaccgaccggcccatcgagccggacgagtatgaaaaagaagcgctgaacgcccgtctgcggctcttggcccgtcatttgcgggagaaatgggtcgtcagcctcgttttctttcagccggacgaacgcaaggcgggcggcgcttatgtgacccgcaccggcacggtaaagaagatcagcgaagtcgaacgtctcctgaccctgacagacggaaccgttattccgctagatgatttgatcgcgctggaaggggaagaatttgcggcctacggtttgtaatgccggcgaaaaatgtgttatcataaagaagctcagacggctttccgcccacggcacgggaagcggcaaggaggaacgaaccatggcagttaagcagacggcaggacgggacgcgctgggcgaatttgccccgaaatttgcggaattgaacgacgatgtgctcttcggacaggtatggagccgggaagaacagctttccctgcgggatcgctcgctggtgacggtcacggcgctgatggcgcaggggctggtggattcttccttccagtaccatctgatgaccgccaagaaaaacggcatcaccaaaacggaaatcgcggaagtgatcacccacgcggcgttctacgccggctggcccaaggcatgggccgctttcagcatggccaaggaagtctggaaggacgaagaataacgggatggaatcggccgcagcggttcattctgccgcggccgttcctgcatttccgacagactgcgattcgttggcgcataaagcggaatttttgcggaggaaaataaacgatgaaaaaaactgccgtattattgtatgactcattttgtaattttgaaatcagtccggcgcttgaggtgctggcgctcgctgaaaaaccaatgaccgtttttggaattgcaaaacagcccatcaaaagtgaagatgggctatccgtatttcccgatgatacgatcgatcatcttgatttagatgagtatgacagcttactattgcctggtgcgatggacatcagagaagcgattgaaaatgaaaaaatcatagatttcatcaggaagtttgccgggaaaacaataggagctatttccattgcaccgttattgcttgtcagagcaggatttctgaatggaaaacccttcatggctggcgtcaataaagaagaagttttggaagaaggattttcagaaagcgacctggctgcaatggttggatgggacgacaatttaagcagtccagttgaggaaggctatatcataacgggcaatatcattacatccatctcatacaacttcgtcaaatgggcgttggctttcggaaaaatgctaggaattgatattcctgcaaaaacgtttgggattcaatagcttcccgtttattcttttttcctgcgctgtgtcttttcctagcatagaagcgaccgcccgcccggcgtttttttccgggcgggcggtctttttcaggcgatcacgccttttttcaggatgatgttcgcataggtggcggtttcgccggtcatgatgacgcagcagcttttcgtcttaacacgatcatagaaggcgtagcgttcgacctcggtcacgcagtccgcgccgcgagggtcgtggcgggcgatgatctccttgtaggtgtcccagatgggcgtttcggtagggtcgccgggcgtgacctgcatcaccatggcaggctgggccgtctgggtatccagcgggatcagctgcaaaatggcctccagaatttccggcacgccgtggccgtccatccgaaccaccgtttgtccgtaggtgtgcccggggaaattagcgtcgccgagagtaatctcgtcgccatggcccatctcgctcaggattttcagcagttccgggggaatgatcttcgggactccaagaagcataaatttctcctcctatttccgggcgcgcagctgggacagatactgccccggcgcgatccccttttgttttttgaatacccttgtgaaatactccggcgcggaaaaacccgcgtccagcgcgatctccgtcacgtttttgtcggtgagctgcatctcgttcaaggcccgctccacccggtagtactgcaaatactgcatgggcgtcatgtgggtcgcttgtttgaaaaaacggcagaagtacttgcggtccagatgcaccgccgaagccagatcgtccagcgtcaatttctggctgtagcggctttcgatcaggtcaaagacggtcttgagctgcagcattttcttgtcctcgtcccggggctgctccacccgggtaaaactgccccgggcgtaaacgccgccgaagaagacgtacaaaagccccagcgttctcaactcccagccttcctcgtgacggcgcagaatttcgaacagcggacgcagcgtctcccgaaccagcgggtcatccgagccgtaacgccgctgcagccgcacctttcgcccttcgatctcccccattttctcccggcacagtccgggggcgctcaggagcatccgcagatcgaaaacgatgcattcatacacgcagtcgtggggcgttcctgcgtgaaggcttcccgctgggaagtacgccgcttcgccgggatgaagctccatgctttccccgtccagcgacagggaaaaggtgccagacagtacaaagagaatttccgtttcctcatgccagtggtagggcatctcatagcgggcgtggtttcggtcaatatagtgatagtccagcggaaattccatcgacccgcgctgcttggcttcatgatattgcaaagttctcatttccgcaaccctcccgtgcaaaaaagagaatattgtccagctatttgccatgataacacaggcgggcgcaggccgcaagggctatgatgaacatatcaggaatctgcaaataaatgaggtgatttttgatgaattcccaggaaatcaaggatcagatctgcgacgtatgccacaaaatgtggcagctgggctgggtagccgccaacgacggcaacgtatccgtcaaaatggaggatggcacctactggatcacgccatcgggcatcagcaagtcctttattacccccgataagctgctgcgggtggacgcggccatgaacgtagtggaaggtccggaaaactacaagccctccagcgaaatgaaaatgcacatgcgctgctacgaagtccgggaggacgtaggcgcggtggtgcacgcccatccgcccacggctacgggctttgccgtggccaacaagtctctggacgactactgcatgatcgaaacggtcatcaccatcggctccatccccgtcgcgccctacggcacgccctccaccaacgaagtgccagattcgatcacgcccttcctgccggagcatgacgtgctgcttctgcagaaccacggtgcgctgaccgtgggctgcgacctgatcaccgcctactaccgcatggaaacgctggaacactatgccaagatcagcctgaccgcccacctgttgggcggtgcgcaggagatcccccgggagaagatcgaccagctgctggatctgcggaagaactattatcacatcaccggccggcaccccggctacaagaaatattccgtatgcaaggaggaaaactgacatgatgtacccgaaaattggcattcgtcccgtcatcgacggtcgttggggcggcatccgcgaaagtctggaagcccaaaccatgggcatggcccacgccgctaaagcgctcattgaaacactgaagtacccggacggcacacccgtgcaggtcgtcgtttcgccctgcaccatcggcggcggcgcggaagcggcccgctgcgaggaatatttctccgcccagaatgtgaccgccaccctgaccgtgaccccctgctggtgctacggcatggagaccttcgacatgaaccccctcaccatcaaggccgtctggggcttcaacggcaccgagcgccccggcgcggtatatctggcggcagtgctggccgcctatgcccagaagggactgcccgccttctccatctacggccatgacgtgcaggacatgggtgactcctccattcccgccgacgtggaagaaaagattctgcggtttgcccgctgcgccgtcgccgccggctggatgaagaacaaatcctatgtcaacatcggcgcggtcgccatgggcattatgggttcctactgcgacaccgacgtgttccagcgctacttcggcattcgggccgaatgggtggacgaggtggagattctccgccgcatggcgctgagcatctacgaccccgaggaatacgaaaaggcccttgcgtggatcaaggagaactgccccgagggcttcgactgcaacgcgggcaaggaactgatcgagatcgtgacccgctccaaggttatcccgcccgataaggactgggagttcatcgccaagatgacgatcatcatcaaggacatcttgtacgggaatcccaagctggacgagctgggctggcacgaggaagcgctgggcaaaaacgccgtggcggcgggtttccaggggcaacggcagtggacggactggctgcccaacgcggactttaccgaagccatcatggcctctacctttgactggaacggcccaaaagcgcctacgcccttcgctacggagaacgacaccctcaacggcgtttccatgatgctgggcactctcgtcacccataccgctccctgcttccatgacgtgcgcacttattggagccccgaggccgtggaacgcgtcaccggctggaagccagagggcgtggccgaaaacggcttcatccacctcatcaactctggcgcgacggcgctggatggaaccggcgcagccaaaaatgaaaacggcgagggctgcatgaagcccttctgggatatgaccgatgcagacatgaaagcctgccttgcggctaccgactggtgccgggccaactatcagtacttccggggcggcggcttctccagccacttcaagacgcaggcggaaatgcccgtgaccatgctgcgggccaacatcgtggacggtgtgggactggtgctgcagatcgccgagggctacaccgccaccctgcccgacaaggtgcacgacctgctggataaacgcaccgaccccacgtggcctaccacctggtttgtgccccgtttgaccggcgaaggcgcgtttcaggatgtgtactccgtcatggccaactggggcgccaatcacggcgtgaccgtgtacggccatgtgggcgccgacctcatcaccctgtgctccatgctgcgcattcccgtgaccatgcacaacgtgtccgccggcaaagtgtatcggccccattgctgggcttccttcggcacgcaggatgcacaggccgcggactatgccgcctgcaagcactacgggccgctgtaccgataaacggtatctaaaggcccgccgaacgcaaaaaacgttcggcgggctcaaattactggcaaaatgcaattttctccggcctgctcttttccatgaaccggcaaagcgccgtttacgaaaaaaggtatcctacagaatgatgaacaaacgcccccgccgaatcctgaaaaaggttcggctgggggcgctttatttgccgttttaccgctggacttttccgctgccgctgccgttcatcagggcttccacctcggaggccttgcagcggttgtagtcgcccgggatggtatgcttcaggcagctggccgccacggcgaactccagcgcggttttctcgtcgccgtaatggctcaggccgtagatcaaacctgcgtcgagactatcgccgccgccgacccgatccacgatgtccgtaatggcgtactttcgggaatgaagcagttccttgccgttatacagcagggcgctccagtcgttatggctggcgctgatggattcccgctgagtgagcagcacccgccgaaggttgggataggcttccatggccagatcggcaatagcgcggcattgttcatcgctccggccgtcccggacggtttccacttcatccgtccgaaggcccagcatcgtccgaaaatgcccttcgttggcgatcagcgtatccacataccgaaccagcggaaccatcacctgctcgggggtcttgccgtacttccacagattgctgcggtagttcaggtcgcagcttacctgcagccctctctttttggcctcccgcactgcttccagcgaaagctctgccgagccctcactgacggcgggggtaatgccggtgatgtggaaccaggacgcgccctcaaacacgctgtcccagtcaaaatcgccttgtctggcgttgcagaatacagatccttccctgtcgtagatcaccttgctggggcgctgcaccgcgccggtctccagatagtaaacgcccatccggccctcccggcggacgatcttggaagtgtccaccccgaagccccgcagttcgcgcaggcacgcgtcgccgatctcatgatcgggcagcacggtcacaaaggcggtgtccatgccatagttggccagcgaaacgctgacgttggcctcgctgccgccgaaggtagcctccaacgcgggagactgaaaaaagcgctcgtaaccggggcttttcagacgaagcatgatctcgccgaaggtaacgactttctggttcacgggctgatttcctttcctgtttgtgcgttgtacgccttatttttggagcagatgcacggcaaaaccggcgatgtcgtccttaaggtaaatggcgcgcagcttgccgtttttcatgatgacgctgtcatcgtcgaagacgaagccgcggcgctccatgtgccagcgggcgcgcttgatattgttgcagccgatggccacatggccgttcttgccccggaaggggatcttcatgatctcaaaaccgccgcccacaaaggtggcgatgggctgttcatccagctcccagcccagaagccgggcgaactgcgccgcgtccttcgcggcagtctccgggtcgccgctgttcacgcccacgtgcttgagttccagtcccagcatggcgttgacggcgctgcgggtcaggcgctcgatgcgttcccagtccttcgtggcgatggcatcctgcggagccatccagctgccgccgcaggcgacgaccttggggaaggacaaataatcattcaaattgctttcgttaataccgccggtaggcaggaaggtcacgccgccatagggcgcggacatggccttgatcatctgtatgccgcccagtgcctccgccgggaagaacttgacagtcttcaggccttcctccagcgccacttctatatcgctgggattggcgcagccgggaatgatcggcacgcccttttccctgcaataacggacgatctcccgattgagaccaggcgaaacgatataggccgcgcccgccgctacggcccggtctacctgctccttggtcagcacggtgccggcacccagcattacctccggcagttcctcgtgtacccgacgaatggcttcctccgccgcatccgtgcggaaggtgatctccgccaccggcaggccgcccttggacagtgcccggcacagcggcaccgcatcggccgcgtcttccaccttgatgaccggcaccagcccggccagagacagtttttccatcatatccatgattctttcctccctcataaacgataaagtggtatttccagcttgaaaccgtcagacggtttgcagatagggttcgagcttctggcgaacgctcgtcagcatctccacgcagcgcctcaattctgtttcctccattcgaaaggacggcgcggacacgctcatggcgtagaccgcctcccccgccgcgctgcacagtggcaccgccacacagcagacgttgggttcgttttcctcccgttccactgcgtagccatttcggcgaacttccccgatctgctcaagcagtctgtccacgtccgtaatggtatgggccgtgtaggctttcagttcttcctgcccgtacaggcggcgaatctgctcgtccgtcatgccggaaagcagcgccttgcccagcgccgtacagtacagcggcgcacgggtcccgattcggctcgtcatgcggatcgcacgggtggagtccagcttgtcgatatacagcatctcattgccggagcgaacgcccagatgcaccgtttcgttcaggacggactgtacctgccgcattccctcccgaagcatgggcatgtcgtcctgatcctgcatcccggcggagccgatctcgaacattcgggagcccagcacgtactttccgttttttggggaaagcacggcatagcccagatacacaagcgtctgcagcagattgtaagcagttgtacggggcagacccattgcgcgagtcaggtcgcacagggctattccctgtggatgggcactgagcgtttccagcatctccagcccccgctgcagcgttctgtttgggatttcagccattgaatcccccccatttttgttctcatatgggaacaacattcccgataaatcaattatacctgttccccctccaaaaagcaagactttctttcccctttcccacaaaagagatagatatttgtcatacttccgacttttcttatggatactttcatgctataatgaccaaggattcctaaaaaaatgaggaggaatacaaacacatgaaaaaggttgttgcaattctcatggctgccctgatgctcctgtcctgcaccgccgcgctggcggaaaacatcaagctggacaagctgaccttcgaattcgttccctccaaggacgcggacgtgatcatcaccggcaccaagaatctgcctcagctggtgcaggctgaaatggccaagcacggctacgacatcggcgaagtggacatcaccgtcggcaccagctatgaagcgaccggcgaagccatgtgtgctggcgcgatcgacatcggttggctgcccggcggcacctatgccatctacagccagaataaagaagtggacgtgatcctgaccgccacccgcgatggtctgagcaatgacagcaccgatccccggacctggaacggcgacgacaacaagaccctgcccaccgacaagcaggtgaccttctaccgttccctgatctacgccaccccctccgcctacggcaaggagctggccgccaaggtcaacgctggtgaaaagctgacttgggaagatctggacaaggccaactgggccgtgagcaacacctcttcctccgccggttacatctaccccaccatgtggctgatggaaaactacgacggcaaaaagatctccgacctgagcaacgtgacccccagcgtgggctacgccgacgctttcgcacaggctgccgccgagcagtttgacatcatcgtgtgctacgccgacggccgccgcgactatgagaaggcctggaacctgcccaccgattccaaggacgagaccggcaaggccggcatgggccgcaaggattccatctggaacgaactgaacgtgatcggcgtgaccgcgcctatctacaacgataccgtggccatcaccaccgccaatcctcaggtgtacaatcctgaattcatcgccgccatgcagcagtctctgatcaacatcatcaacacccccgaaggtcaggagattttctccgtgtacagccacaagggctatgccgtcgccaccgacgcggattacgacggcgctcgtaccgctctgacggtcgtgcagtaatcagtttccctgatacctcgcaaaggggcggcccagccgcccctttgattctgccttttttcccggggctccctgtttttttcttgtacttccccggggttcgtgttatattataggtaacctttacaaaaatacacggcgcagccgaaaaaggggtcgatatcttgatcgaattccaacacgtgagcaagacctatcccaatggcgtcaaaggcctgaaggatgtaaacctgaccattgatcagggcgagtttgtcgccatcatcggcctctccggcgccggtaaatccacgctgatccgtaccatcaaccgcatgatcgacgttaccgagggcacgctgacggtggacggcgtggacgtaatgaccctgcggggtaagtccatgcgccgcttccgccgcaaaatcggcatgatctttcagtccttcaacctgattacccgctccaccgccatcaaaaacgtgctttcctccatggtgcccgatatgaacttcttccgggttctgttcggcatttttaccagagagcagaagctgcaggccctggaggcactggataaggtgggcattctggacaaggcctatacccgctgcgaccagctttccggcggccagcagcagcgcgtggcgctggcccgcaccctgaaccagaaccccaccatcattctggccgacgagcccgtggccgcgctggaccccgtgaccgcccatcaggtcatgagcgacttcaagcgcatcaacgaggacatgaatattacggtgctgatcaacattcaccatgtggatctggccctgaaatacgctacccgcgtcatcggtatccgcgccggtgagatcgtctacgacggccccactgccgacgtgacgcaggaggttctggacagcatttacaacggcgcttccgtgcctcaggccggggaatgagagggccaagcatgaaaaagaaaaacgcagcaacggaataccggacgccgctgtttgaccggttgttcaagccgcaggtgatcacgcttcccaacggccatacggtggagcgcccccgctcccgccagccgctgatctggatctgcgtcgtcgccgccgtctgggcttccgtcgttctgaccgggtttgatttcagcattctgatcaagcgcggtcatcagttcaccgttattctgaagcagattttccagcccgactggagcttcctgcccaaggtgatcggcccgctggtggataccatcaagatgtccattctgggctccgtgctgggcgctacgctggccctgccctttgccgtggtttcctccaccaacatcaaccgcaacggcattgtggtggccctgtgccgcttcctgttgaacctgatccgtaccctgcccacgctggttatcgccaagttcgctgcgctgatcttcgggctgggcacctttgccggcaccatggccatcaccgtgtttaccttcggcgtggtatccaagatgctgtacgaggccatcgagaccatcgacatgggcgccttcgaggccatggagtctgcgggcggcaacaagttccagtccttctggtccgcctgcttccctcagattctgcccacctatctgagctactgcctgtacagccttgaaatgaacatccgcgccgcagccattctgggctacgtaggcgccggcggtctgggcattctgatcaacgagcgcgtcggctggcgcgactatcacggcctgggaacgctgctgctgaccctgttcgtggtggtgctcatcattgaaaacaccagcgaatacctgcgtaagaagctgagctgaggaggatgggaacgatggcacaacaaaacaaaacggatcgtcccatgacgattcaggaagcctatgaagcccgcccccggctttggtgggcatacacgctgattttgctgatcgtgttctccctgctgggctggtccggctcggcggtggtgttcaagggctttgccaccaagggcgtggaggtggccaagggcgtatggaacggcctgacccacccggataccgcgctgctcttcaaccttacgccggagggcgtgccctatcagcttttgcagacggtggcaatcgccgtgctgggcacgctgatcggcggcattctggccattcccttcagctttctggcctcggacaaaatcgttcccggctgggtagccttcctcttccgtgcgtttatcctgatgatccgcaccattcccagtctggtttgggcgctggtctggatccgggtcaccgggcccaacgccttctgcggcgtggtcacccagtccatctgctccatcggcatgatctccaaaatgtacatcaccgccatcgcggatgtggatacccgcattctggaaagtctggacgccgccggctgcaccgccttccagaagattcgctacgggctgctgccccagatcatccccaacttcatctccaccgtgatctaccgctttgacatcaacgtcaaggacgccaccacgcttggcatcgtgggcgcgggcggcatcggcgcggccctgatccagtgcatcaattccagccgctggagcatggtgggcgcgtacctgtgcggcatggtggtgctgatgctgctgattgagtggctctccaccaagatccgcaagcgtctggcgcgggggtaagcatggcgaaccggctgacgatctactttacctccgatacccatgggtatctttaccccagtcatttctgcgaccagcagccccgacccatggggctgctttccatgcgctttcccaaggatggaaacacgctgatcatcgacggaggcgacaccattcagggttctcccctgacctattactgctacggccatcatctgcccctgcctgtggcggacgcgctgaacgaccggcagtacgactttgtcacgctgggcaaccacgacttcaacaacggctacggcgcgctggaaagctacctgacccggctgaacgcccagtgtctctgcgccaacgtgaccgaccggacaggcgggctgcctctcctcccctatgccgtccgcacgatggaaaacggccttcgagtgggcgttatcgggctggtgacccactgggtgaccctttgggaaaagccggaaaatctgacccgcttcaccctgaccgacccggtggaggcggcccggccgctggcagaaaagctgcgcggtcaggtggacgtgcttatcggcctgtaccacggcgggctggaaaaggatctgcgcaccggcgaacgcctcagctccacggatgaaaacgagggctgccgtctgtgcgaggagcttcccttcgacctgctgctgacgggccatcagcatatcgccatggccgacaggcagtacgccggaacccatgtggtgcaaacgccctgcaatgccgccgcttacgtaaaggtagagctggaggaagacgggacgttccattcgcagctgatgactccccccgctcacgcagagctaaccccttcccagcagcggctctggaaggatgtgaacggctggctggaccggcccatcggccatctgagccgtgccctctggcccgaggacaagctgaccatggcgctggaatcctcgcccatcgcggccttcttcaatcaggtgcagctggaggccagcggcgcggatatttcctgcgccgccctgcccaacagcctgcgcgggtttgacagcgccgttaccgtgcgggacgtggtagccagctatgtatattccaacacgctggtggtgctgcgcgttaccggcggcattctgcggcaggctctggagcaatgcgccagctattttgacatacaggcagacggtacgctggctgtggcccgttccttcctgcagccgaaggaagctcacttcaactacgactatttcagcggcgttgaatacggcttcgacctgcgccagccggtgggcaggcgggtcttccggctggaatatcacggaaagccggtgcagccggaggattccttcacgctgtgcctgtccagctatcgggccacaggcgcgggcgattttccctattacgctcagtgtccccgggttcgggaaatccagaccgagatcagcgagctgatcctgaattattttacggctcacccttatgtggaggtggaggaaaagcctgcctacacggtcattcgtccctgaaaaacgtacagaaaaaagccttccgggaagcgcccggaaggctctggctttattccagcagaaacacctgccgcatcaacggctgcgcgccggtgacggggtccatgtccatctgcataacgtccttcatgtactcgttccatcggtccaccacggcgctgcgggcctgcacctgagcggcggtctggacgctgtcgcattcataatagccgaacagctcgttgcccatgttccagatggtgtagttgcgaatcccggcttccttgaggacggctttcatttccggccagagatgagcgtgccggtcgacgtactcgtccagcttgccgggcaagacggtggctttccatgcgtagcgttccatgacctgcacctcccccctcagccaagaaaagcctgattcagctttacgccgaactcgtcggcaatggcctgcaaatccgcgtcccggatggtctgaagcacgggccgcccggaagaaacgaccttcatataaatttccgctgccttttcgatggtgtgcatcaaaccgaaggcggtgtcgaaatccggcccggagacaaacagtccgtgatgagcccagaccgccgcgtcgtattccttcatcagtttactggtggccagcgcaatgtccgcgccgccgggcaccatccacggcaccacgcctacgccgccgggaaacaccacggggcactcggtggcgctctgccacagggcgcgggtaaagtcgcgggcggtcagaggcagaatgtaggtcatggcgatcacattggccggatgggcgtgatagatcacccggcaagcgccatcggtcgcagccttgcggacgctgtgattcagaaaatgactgggaaactcgctggtaggtttgccgcccttttccagtccccacacgatgcggtagctgtcccctgcctgattgatttcgcagatgcaaagattgtcctggggggccagaatcacgttgcgcagatacttgccgctgccggtggtgatgaaatattcccctttcaggttg

SEQ ID NO: 2482 - DNA, 32759 bp, Unknown
  16S sequences of unknown bacteria
acgccgtgaggttattataccacaaagcggtgcgcaaggcgcagcgccttccttagcccgaaacggctttgcccgtttcggagtggaacaatgttctctcaggcgtccaaagccttgcgctgcaaggctttggagaacgccgtgaggttattattacataattttccgccaaattcaatatgattaacaaagagagccgaatctctgggaggtatgcgttttgagtatcatcaccctgctgctgatggccgtggggctgtccatggacgccttcgccgtatccatcagcagcggtatcctgctgtgcaaggcccggtgggggcagacgttcaagatcgccggggcgttcggcctgtttcaggggatcatgcccttcatcggctacaccatcgcgcggctgttcgcccggcagatccaggccttcgatcactggatcgcgttcgggcttctggtcttcatcgggggcaaaatgctgtgggaggtgctgcgcggcggggaggacgacgcgccccggggggatccctgcgggtggatgaacctgctggtcatggcggtggccaccagcatcgacgccatggcggtgggggtgtctctggcggtgatgccccacactgggatgctgtccggggactacggctatctgctgtgctgcgccgttatcgcggcggtgaccttcgtcatctgcgccgtgggtgtgaaaatcgggtgcaaaacgggagacatgttcggccgcaaggcggaaatcgccgggggcatagtgctcatcggcatcggggtgaaaatcctgctcgagcatctgatgggcggataaaaacggcggctggtgattgccgccgggatagatttgtgctatactggggacaggctctggaatccatattttagtaggaggaatgtctgtatggccaatcgaattgtcctgaatgaaacctcttattttggtaagggcgccatccaggaaatcgccaaggaagtcaaagcacggggctgccggaaagtggtggtctgcaccgatccggatctgctgaagtttcaagtggccaccctggtcaccgctgtgctggacaaggcggccatcccctatgccgtctacagcggcatcaaggccaaccccaccatccagaacgtccaggagggcgtggccttctgccaaaaggaaggggcggatctgatcgtcgccgtgggcggcggcagcgccatcgacaccagcaaggccatcgccgtcatcctgaccaatccggaattcgcggacgtgcgctctctggagggcgcttcccccaccaagaataaggcgctgcccatcatcgccgtttccaccacctccggcacggcggcggaggtcaccatcaactatgtcatcaccgacgtggagaaaaaccggaagtttgtctgcgccgatccccacgatatcccagtagtggccattgtggatcccgacatgtccatgggaatgcccaaggggctgtgcgcctccaccggcatggacgccctgacccatgccatcgaggggtatatcaccaaggcggcctgggaactgaccgacatgatgcatctcaaggccattgagatcattgccaagaacctgcgccagtcggtggccggggatcccaaggcccgggaggaaatgtcggtgggccagtacatcgccggtatgggcttctccaacgtggggctgggtatcgtccacagcatggctcacccgctcagcgccatgtacgacgcgccccacggcgtggcctgcgccaccatcctgccctatgtgctggaatacaacgccgacgccaccggcgaccggtataagcaaatcgccgccgccatgggcgtgcccggcgtggaagccatgagtccggcggaataccgccgggcggccgtggacgcggtgcgccagctgggccgggacgtgggcattccccagaaggtcagcgacctgggcgtgaaggaggccgacatcgacttcttggccgattccgccatggcggacgcctgtacccccggcaaccccaaggatcccaccaaagaagacgtggtggccctgtaccgctccatgctgtaagtcttcgaaaatggtacgcaacgggagaaatccgtcttgacaatccggcccaacggtgttaccatgaagacaacgcaaagaaggggaggccgcccgccgtcgtccttgcagagagcgccgtcacggtgaaagcggcgcaggaaacgcgggcaccggctaccaccccggagcggcgcgccgaaacaaggcgcgacggctggcaccgatatccgccgaatcggtcatgcgccgatgaggatgcggggtttcccgcgtcgaactagggtggaaccacgaggcttttcggccccgtcccttgacggcagcgcgcagcgctgcccggggacggggcctttttgtctgtcaacgctcccgttcccagacagctataccaaatgacggaaaggaaggaacacacatgctgaacattacctgcaagggcggagacatccgacaggtcgcggagggcacgaccattgacgcgctctgccgcgacatctccatggggctctaccgggcggcctgcgccgccaagctgaacgggaagacggtggatctgcgcaccccgctgaccgaggacggcgcggtggatatcctgacctttgacgacgaggacgggaaaaaggcctattggcataccacctcccacatcatggcccaggccgtggggcggctgtggccggggactaagctgaccatcggcccctccatcgacagcggcttttactatgacttcgacagcgagcacaacttctccgccgaggatttgattgccatcgaggccgagatgaagaaaatcatcaaggaagcgctgcccatcgagcgcttcaccttgccccgggacgaggcgctggccctcatgaaggacgagccgtacaagtgcgagctgattactgagctgccagagggggaggagatttccttctaccggcagggggattttgtggatctttgcgccgggccccatctgcccgacacggggcgggtcaaggcggtcaagctgctcagcgccaccggcgcttactggcggggcgattccaagaacaagatgctgcagcgcatctacggcatcgccttccccaagaccgcggatcttcaggcccatctggagaagctggaggaggccaaaaagcgggatcacaacaagctcggccgggaactggagcttttcacgacggtggacgtcatcggccaggggctgcccatcctgctgcccaagggcgcgcggatcgtccagctgctgcagcggtttgtggaggacgaggagcagaagcggggctatctcctgaccaagaccccgctgatggccaagagcgatttgtataagatttcggggcactgggatcactataaggaagggatgttcgtcctgggggacgaggaaaaggacaaggaggtcttcgccctgcggcccatgacctgccccttccagtatcaggtgttcctcaaccggatgcgttcctaccgggatctgcccatgcgcctgggagaaacctccaccctgttccgcaatgaggacagcggcgagatgcacggccttatccgggtgcggcagttcaccatttccgaggggcatctgattctccggcccgagcagctggaggaggagttcaagggctgcctggagctggcccggtatatgctggacaccctggggctgggcgaggacgtgacctaccggttctcccaatgggatccgaacgatcgggagaagttcatcggcacccccgagcaatgggccgaggcgcaggacgccatggagaaaattctgaagcatctgaacgtgccctataccatcggcatcggggaggccgccttctacggccccaagctggacattcaaatcaagaatgtctacggcaaggaggacaccctcatcaccctccaggtggatcagatgctggccgaactgttcggcatggaatatgtggacgtggacggccagaagcgccggccctatatcatccaccgcacctccttgggctgctacgagcggacgctggcgctgctcattgagaagtacgccggggcgttcccgctgtggctggcccccgagcaggtgcgggtgctccccatttccgagcggctgcatgacgcggcgcaggcggtgaccgaccggctgaaggccgcggggctgcgggtggaaatcgaccggcgcaacgagaagattgggtataaaatccgggaggcgcaggtgcagaaggtgccctatatgctggtcgtcggtgaccgagaggccgaggagggaacggtatcggtgcgcgccaggggagaaggagacatcggctccatgccggtggaggatttcctggcccgtgccctgcgcgaggtagcggaaaagaaaagataggggctttgcccgcgctgtcaatcaacgggcgggcattgtgcacaagtttcagggaacgggtaatctgataatattttaacatttccctatctttttcgcccgaaatacggtatactaaactggtaaacaggccggtccgccggtcataaacgccatgaaaaaacaggaggttcgtattatgcccctcgtaaacaccaccgagatgttcaaaaaggcctacgaaggcggttacgccatcggcgcgttcaacgtcaacaacatggagatcgtgcagggaatcgtcgacgcctgcaaggaactgaactcccctgtgattctgcaggtttccggctcggcccggaaatacgcccggcacgcctacctgtacaacatggtgcaggcggctgtggaggagaccggcctgcccatcgccctgcatctcgaccacggctccagcttcgagctgtgcaaggactgtatcgacggcggcttcacctccgtgatgatcgacggctcccacctgccgtatgaggaaaacgtggccgtgaccaagaaggtcgtggaatatgcccatgcccgcggcgtcaccgtggagggcgagctgggccagctggccggcgtggaagacgaggtcagcgtggaggccgacaaggccaactacaccgatccggatcaggtgcaggatttcgtcacccgcaccggcgtggattccctggccatcgccatcggcaccagccacggcgctttcaagttcaagcccggccagaagccccagctgcgcttcgacatcctgcaggaggtcatggatcggctgcccggcttccccatcgtgctgcacggcgcgtcctccgtcatgcccgagtatgtggcggacgtcaataagttcggcggccagatggccgacgccatcggcatcccggaagacatgctgcgcaaggcggcgagcatggcggtgtgcaaaatcaacgtggactccgacctgcgtctcgccatgacggcgggcatccgcaagcacttcgcggagaatcccacccatttcgatccccgccagtatctgggcgaaggccgcgacaacatcaccaaggtggtcaagcacaaaatcgaagacgtgctcggcagcgccaaccgcgcctgagcaaagcgcaaaaagggaacaaggccgcgccttgttccctcttttttttccgggtttgcgaaattccgtcattctgacaaataccggggcgattcttgccgggttttgatagaatataaagaattgctttttgggcgggaatacggtaaaatatttttattcgatattcacggtttgtttacattccgataacagaacgaacaagcggtatgcgagcataccgcttgtctccgttgaatggcagaataccaaggaggcagaaaatttcatgcagcttttggaagagcggatccgccgggacggcaaggtgcgggccggcaacgtcctcaaggtggacagctttctcaaccaccagatggatatcgagctgttcaacgaaatcgggcgggaattctaccggctgttcggggacagcggcgtgacgaaaatcctgaccatcgaggcctcgggcatcggcatcgcctgcgtgaccgcccagtatttccatgtgccggtggtgttcgccaagaaaaaccagaccaaaaacatcgacggcggcgtctataccacccaggtggaatccttcacgcacgggcgggtgtacgacatccgggtcgccaaggaattcctgcggcccggcgatcgggtgctgcttatcgacgattttctcgccaacggcaaggcactcatgggcctcagccagctggtgaaggacgcgggcgccgccctggtgggcgcgggcgtcgtcattgaaaaagggttccaaaagggcggtgatcgcttgcgggaacagggaatccgggtggaatccctggcgattgtggacgccatggacgaagagggaaccatcacgttccgctgatcaaggtttatcgggcggcgggacgttccgccccgcgccctgtaaataggaagaagaaaacaggaggaagaaaagatgaagaaaattctcgcattcctgctggccgccgttatgctgttcgccgtcgccggctgcagccaggacggcagtgacagcaaaacccccgccggcagccaggccagcggcggcgccatgcccgccgttgccaaggacgacctgaaggtgggcgtcatccatatcggcgaaccggcggacggcgccggctattcctacgcgcatgatcagggcattgtggccatgcagaaggaactgggcctgaaggacagccagatcatccgcaagaacaacattcccgacaccgacacctctaaaacgcagaacgccatcgaagagctggtcgaggaaggctgccaggtgattttcggcaccagcttcaactatatgaacgtgatggagcagatggctgaaacgtatccgaaggtcatcttctctcactgctccggctataaaaacaacggcaagaacatgaacaactacttcggccggatttatcaggcccggtatctggcgggcatcgccgccggcatgaagacgcagtccaacaaaatcggctatgtggcggctatggacgtcaccaactccgaggtgaccggcggcatcaacgcctttgccatgggcgtcaagtcggtcaacgccgatgcccgcgtgtatgtgaaggtcaccaacacctggttcgacgtcactaaggagaagcaggccgccgaggccctgctggccgatggctgcgacgtcatcgcccagcactgcgacaccaccgcgccccagctggccgcccaggaaaagggtgtgtggggctgcggctacaactccgatatgaccgaatccgcgcccaaggctcatctgaccgcccccatctggcattggggcgcctactacacctcggccgttaaggaagtcatcgagggcacctggaagccggtgaactacttcggcggcatggccgagggcttcatcgacatctcccccctgaccgccaactgcgccgagggcacgcaggccaagatcgacgaggtgtccgccaaaattaaggacggctccttcaaggtattcgaaggcgaaattaaggacaaccagggtaacatcgtcaacaaagcgggcgacgttatccccgatggggacatcaccggcaaaatgaactggtatttcgagaccgtcgtggtaaaataagccgcccggcggcagaccgtatccccccatcttccggaaaggacatggagcttatggaaccagcgaacacggcaattgaactcagtggcattaccaagcggttcgggtcggtcgtcgccaacgatcacatcgacctttccgtcaagcagggcgagattctcgccctgcttggcgaaaacggatcgggaaaaaccacgctgatgaacatgctgtcggggatttaccgccccgacagcggttctatttttatcggcgggcaggcggcggttatccggtcgcccgaggacgcggcccggtataaaatcggcatgatccaccagcacttcaagctggtgggggtgcacacggccgccgacaatatcctgctcggatccaaaaaggagagctggcttcttaggaaaaaccggggagcgcgcatccgagagctttgcgacgcctacgggctggaaatcgacccggacaagcgggtctacgacatgtcggtcagcgaaaagcagaccgtcgaaattcttaaggtgctttaccggggcgcggacattctcatcctggacgagcccaccgccgtgctgaccccccaggagacggacaagctgttcgacatcctgcggcgcatgaaggagcggggctgcgcggtcattatcattacccacaagctgaacgaggtgctggccatcagcgaccgggtcaccatcctgcgcaaggggcagagcgtggccaccgtgaagaccgcggacaccgacgcgagacagctcaccgagctgatggtgggccggcccatcaccctgtccattgagcggccagagccggaaagacatgagaagctgctggaaatccaccggctgacggtgctcaacggcgagggcgtggaggccctgcgggacgtgagtttttcactcggcgagggcgaaatcctgggcgtcgccggggtggcaggcagcgggcagaaggagctgtgcgagaccattgcgggcctgcagaaggtcaaggaaggcgctatcctctataaaaaggaaaacatcgtgggcaaaacgccccgcgaaatcataaaaaaaggcatcagcatgagctttatccccgaggatcggctgggcatgggactggccgcctccatgggcatggtggacaacatgctgctcaaaagctatctcaacggccgggggccctttgtccggcgccgggaggcccgggagctggcccggcggctggtagggcagctggacatcgtgacgcccggggtggacacgccggtgcgccgcctgtcgggcggcaacgtgcagaaggtgctgctcgggcgggaaattgagtccaacccccatgtgctgatcaccgcctacgcggtgcgggggctggatattcactcctcctacatgatttacgacgcactcaacgcacagaagaagaagggcgtgggcatcctgttcatcggcgaggatctggacgtgatgctggagctctgcgaccggatactggtgctctgccacgggcaggtgaccggcgtggtggacgccaaggggacgaccaaggaacagctcggtctgatgatgaccggcgccgggcaggaaggaggatgaacatggcagactccacaaatacgagaaagaacaccgccccgctgctgcgcattgttaagcgcgcggagatgtccgccgggaaggtggcgctgctctccgccgtcggattgctggccggcatcgtggtgggcggcctgtttatcctgatgctggggcaaaaccccttcgcggtctacgccgccattgccaagggggcgttccgcagcagcctggccaccaagggcgtggtgaaaatcgccgtcccgctgctcatctcctcgctgggcatcgtcctggccttcaagatgaagttctggaacatcggcgccgaggggcagattatcatgggcgccatcttcgccacctatttcggcgtgtttcacggggactggcccaaggcggtgctgctgcctgtcatgttcctggccggcatcgtgggcggcgggttatggggggcgattcccgccttcttcaagaccaggttcggcaccaacgagaccttgctgaccttgatgctcaactacatcgccttgtacctcatcatgttcctgcgggagggcccctggcgcgacccgtccaacatggcctttccccaaatcgccaccatcggtgaaaacgcccggctgggcgaggtcttcggggtgcacgccggctggatcgtcgctctggtgctggtggttctcgtcttcgtgtatatgaaatacaccaagcacgggtatgaaatcagcgtggtgggcgaaagccagaacaccgcccggtacgccgggatgaacgtaagcaaaatcgtgctgcgcaccatgttcatcagcggcgccatctgcggccttgccgggatggtacaggtgtccggcaacacctataacctgagcgacggcatcgcgggcggcgtgggcttcacggccatcatcgtggcctggctggcccggctgaatcccttcgtcatcgtggtcatcaccgcgctgttcagcatcctggaaaagggcagcagcgtgatgcagagcgccttcgggctctcctccgcggtgtccgatatcctgcaaggcatcatcctgttcgtagtgctggcggtggatttcttcacccggtacgcgctggtgatccgcggcggaaaggaggaacaggcatgacggcgattatcaacttcctgtttgccgccatcaaggccggcaccccgctcctcttcggcaccaccggcgagatcgtcacccaaaaggcggggaacctgaacctcggcgtggaaggcatgatgtacatgggggccttcaccggcttctatgtgggcctgaccaccggcagcctgcctctggccctgctggccgctttcggggcgggcatgctgggggcgctgatttacgccttcctcaccgtcaccctcaaggccgaccagaacgtcaccggcctgaccctgaccattttcggcaccggctttgccaacttcttcggcgaggtgatgatcagccagacggccggcggccagcccaagctgcccgaaaacctgctgggcatcctggccgagcatcccattcccctgctcagcagcatccccttcttcggcaagctgctcttctcccacaacctgttggtctatctggcggtggtggtggccgtgctgtgcggcttctacatctcccgcacccgggcggggctgagcatgcgctcggtgggcgagaacccggcggcggccgacgcggcagggatcaacgtcacgctggtcaagtacaccaacatcctgctgggcggcggcatctgcggcctgggcggggtgtatatctccctcatcaacggcggcggtgtgtggaacaacggctgcgtgggcggccagggctggattgccgtggccctggtgatcttcgccagctggagccctgtcaaggcgatcctgggctccctggtgttcggcgcgttcagcgtgctgcagctgtatattcctcggaacatcctgccgctgcccaacgccttttacgtcatgctgcccttcctgatcacggctatcgtcctgatcatcacctccatgcgcaaatccaaaaaacacgcgcagcccgccggctgcggcgtcaactatttccgcgaggaacggtaaaaacaggcggaggaaccacaactggttcctccgcctgtttttgttaggctttatccttgaaatggtcgccgctgtaatagaagcgcccggcctgcaggccgccgccctttactcggatgagctcgggcaccgtaaccatagtgtagccctgggcggtaaggcgatccatcatctccaccgccgcgtccacggaggtttcgtatacgtcgtgcatcagcacaatggctccgtcctggacgccgtatttcccctgccggaaggccgtggccaggatggtgtccttgttccggtgctcccagtcccgggtgtccaccgtccagttgacgacagaaacgcccttctccttggcgtagccgagcagccggttgtcgtagttgccgcccggcggccgaagcagcacgggatcgtagcccaccgccccgcggataatggccgcgcacttgttcacctgatcctgcatcgcggcggccgcgcccttggtcaggttctggtgggcgtaggagtggttgccgatgacgtggccctccgcgtccatccgcttgagaatttcgggatgtttggcggcgttggtgcccacgacaaaaaaagtggcctttatgttccgctttttcagctcgtccagcagccggggggtggtctttccccccgggccgtcgtcgaaggtcagggcgatgagcttggtgccggccggatagacggcgccggtcaccttgctggccagctgctgcttggcggcggctaaatccttccgggcggcctccaaatcctttttcgcctgctccaactctttttgcagctcctgcgccctggcggcgtcccccgccgcatcggccagctgctgctccgtttccttcagcttccgctccgcttcctccgcccgctgctgcagctcctccgccgttttctggttggcgttctgcagctcctccagctgctcccggtaccacagcacgccggaaaatgccacgccgcccgccacggccaaggcgacgatcagcagcagacacgcgataagccccgccatcagccgccggttcagcggtgcgtcttcttttcctttcatcccgccgcctcctttcccccgtacctgtatagtttaccatacccggcatcgaatacaaagcgtttatgggcattttctaaaatttcctaaaaaatcttccgctgtttctttagatgtttcagccgggaaaaaagttgatgttcaaataaaacgcaaaatgcgggccacgtttcgtggcccgcaggggattttctaggggatcaaaaacataaaatcctttcccttttggtgcagtcagtcttcaacctcgaccgtgccgtcggcgtgcaccgtcagcgtcataccgtcccggacataggcgaggaattcctcgcccagattgtccacggtgggcatgctgtgcggtgtccatacgtcggccaaaatggcccccgccgcggccagcgagtcgatgggcagggaaaacagcatggcggccggcgccgcccccatcgagcaggcggtgtgcagcaccatgccgccggtggtggaaccgatggtctgcggcaggcagagagcggtgccggtcatcaccttgccgtatagatcggcgttgttctgatcggagcagaccgcctgggtctttttcgccagcaggctcttctggaaggaggccagcgtgttgaagccctcgtggctgaccagcgccttagccctcgcctcgccgggcaccacggggcggcccttgaaaattttgctcatgccccttcgcctcccttcacgagaatggccgtcacttcgtcgtcggtataataccgggcggcggtataggtgcgcagcttattggaattggtgataaccggcagggctttgcacagggggttgttcatgtacatcagcgggcagatgtaggacaggcgggcgccggtggcccgcagcctctcgaaatacggcgttttccggaaggcctccagcacgtcgggggcggcggtcagcaccgtcttgattttcagccgcccgccctgcaacgcgccctccagcttctccgtccagccgatgagctggctcagggatagatgggggcagccgataaagcacagcttcggcttggcgtccgggttcttccaaatgaccggatagccggccttgacccgctccagctccgcgtcgtcgatgacataggttttggcgccggggcgtatcaacgcgtcccccagatccaccgcctcgggggtcaggccctccacatggtacagccccaccgctccattggacgcggaggccgcgcccatgtccttgagatacgcctttgcgctgtcgtccagctggccgcccaggaagggggccagccccttgatatagggcacgtcctccatgaccttcaggccgatggcgctgcccagcacttgggcctccggtcttttggaggttttcacctccaccacccaggaggcccggcgcccctcgtcggtcagcagcccgaaatagggcaccctgcccaggatggcgccgaaaatgtccatatacgcggagttccggttgcagcgcgcgcccagcaccgagttggcgtacaccacggcggaggattccgaccagctgagcacctggccccgggcgggcacattgcccacctcgtccatatagcaggtgcaggtgaacgccttgtcgttcttcagtcccagccggcgcagctgcccctcgtagtcctcctgcttgccgtacataacgccgaacacgatccgctgcaaaaaattgcacgggacgttttcgaaatccaacggccgggggtccatggtaaagggctgctcggcgtgaagacctgccgcaatcagctcgtccatcacgtcgaacagggcggtggtcaccgaaaggccgaaggaggtcaccagatgggcctggccggtggcgggcaccatctttttggccccgaaggtgtcgccgtacattaccagggacttcatcaccttggccagagtttccccccgctggccgtccaggatcgcttgttcttccgcagtcagccgcatacaatcatccttccttgtctggggcacgacgcccccggtttataacgccagcgccagcgcgtaggccgcccgcacggcttcgaataccctgcccacctggtagctgtcgccgagctggcgcaccaggggggccacccggcggcgctgcgcctccaggaagagggcatcgtccgcccgtccgcccgcagccagcacaatgagatccgcgttcagggagatggcctgttcctccaccttgatgcggggcgccagaggattctcgatgttttccggcaggatggggtgccaggtgtcatagggatccggcacggtcggggacacattgcgcaccgccagcaggccgtcgggggtgaacccggtgaccctggtgcagttgagcagctccaccccgtttttgtgtagggtatgaatgaggtgcccgcgattggcggtgcaggtgtggttcatgatcacgggggtcatctccagcaccttgacctccttatgcagctcctgccgcagccagaaggcggtttcgcagcccaccacgccgccgccgatgaccgccacgtaccgggcgccctccgccagctcggggtgcatcagcagatcggtggcctggacgatgttggcgttctccgccccgggcagatccagccggacgtcagccgagccggtggccaccaccaccgcatcgaagcgctgatcggccagccagtcggctgtggcctcggtgccggtcaggaaagtcagcccgtgcgccgcctcggcctttttcacctgccgctccagatataggcggtagttgtccacatcgaacttgattttcggcacactgccggggatcaagcgcccgccgattttcccgcttttttcgatgagggtgacccgatgcccccgggcggcggcggtgaccgcggcgaccaccccggcgggcccggcccccacgacggcgatccgcttagacgcctcggccttgggcggcgcggcgggatagacatgctcgaaggcggtacgggggttgaccgcgcattggggatggcccccctccacgaattcgttgaggcacccctcctggcagccgatgcaggggcggatgtcctccacctggccggcataggccttgttgggccactcgggatcggccagcagcgggcggccgagcatcaccatgtcgcacaggcggccccgcagcgccgcctccgccagatcgggatagcccagcttgcccacgcccaccaccggcacctccgccccggcgttggagcggatctggttggcggaaaagaactccttgacggtgcgggccacctccaggaaacagccgggaggcatggaacccggcggatggggcagccaccagttgtcgtaacagccgagatccacgtcgaagatgtccacgccggcggccaccaggttcttcatgtattccagggtcatgtccaccgtgcggccgttgacgaacttcttcatggaggtgccgtggatggcctcgccgtaggtctcgttgagggccagggacaggtcgatgcggtacatgatggggtaggcgtcccccacccggcggcggatttcccgcaccatgtccaggccgaaggcctgccagttggagaaatggcccagggcgcggcggttgaaggccgggttggtcatctgctcgagcagatagccctcgtggccgtggagatacacgccgtccaggttggccgccttggcgtcggccgcggcctgcccggcgtttttgatgatgtggttcagcttgcggcccgataggggcaggcagggcacctgcgacatgtaaaagttggggttcagggaggaggataccgggaatttcagggaattgaccaggcattggggattacccacccggccgagcccgggggtcagctgtatgaagaatttggccccataggcgtgcacccccgccgcgatgtcccgccaggcggcgaacacggtgcgggagcggtcgatacgggggaagtagctcagcttgcccagctcgatgatggaatggtcgatgccgaagctgaccggcaccagcccggaggtgatgagccccacgccccctttggcccgctcgatgaaatactggatcatcttctcattcgggcggcccgtttcctcgcacatactgatgttccccatgggggccataaccaagcggtttttgaccgtcatgcggttgatgcggatgggggaaaacatagcgtcatagggatacagatctttggtcatccggccgctttgcacccgggaggggtcgtcgaaccagtggccgtaatcgtccaccagccgctgcacctgcgcgtcggttttcagcatatgtatcgccttcctttcaaacgaattcttgtgtgtcggattggtttcattatacaacgggccgctcgccggcaaaacccttttggaaaagaattcaagagatgttcagccgttgcacacaaacagccgatgcgtggcatcggctgtctcagcttgtcgacaacgtcgacaagctgctggacggggacgccggatcacggcggctcactgacgttcgccttgttccatctgtccccgctggcggagcgttcgctccgcccgaccacgccctgctcttgaaaaccggcggaaacacgtgtgtttccaccagtttccgcctataaggtgtgtttgcgaggcacatgtcctcgcaaacacaaattggtaacccgcctccaccttttttcgttttccgaatggcagattccccttttttgacagcctgaacagccgatgcgtggcatcggctgtctcttaccccacgcccgtccgtccccagccgcagggcagccggccgtccagggcggcgatgaccgtctccgccctcttgtcgggtagctccagccaggggccgggatcggggatttggtggagataatgggcgtcggaatcgcacagcaggattttcccccgcgcctcccggtactgcgcgcataggacctccacgtccccccgggcggtgatttccaccgccgcgaagcccaggggcggcagatcgcccagggccgccgtcacgctgtaggacgggcggtcgatatgggcggggaaggcggttccgccatgcttgcgggccagtcccagcacctcgtccaccgaaatacccgacgcagtggtcagcaggagggtttcccgccccacgatgccgtcctgcgcgtccagcagcagctgctccccgaaaatgtcgggccggttctccaccgggggcagggtgggccgcaccgccgcctcaaaggccagcgccccctccagggcggggaacaggcagaccacatgggcttcctcggcggtgcacagctccataccgggcagcaccagcaggcccgtcccccgcgccgcctccatcacggcggcgcagttgccgcagctgttgtgatcggtcaccgcgatggcgtccagccccgccagcgccgccatgcctgccaggttgcccggggtcatgtcgttgtcgccgcagggggacagggcggtatgtatatgaaaatcataagtcagccgcatcccgccgcctccccttcgatttatcaacggaaagccccgaaaacggccaggaggataaggccgatcaaagccgccagaaggaggacggccagccccttgaggctttccagcgcccgcagctgcttgagcgctacgagcagctgctgctcctccggggccagctgctccggatccaagtggacaaattcgccgctcttctctatctgatagatatcgtccggcagcggctcgccccgctccatccgctccttcagggccttgttctcctcgggtgagcaggcaccgacccgcagaatgccttgctgccacaacagggaatacagctcctcccgcgccttcacggcgtcccctccttctccagcagccggccgatgtccagggccagctcataggcggggcgggggctgcgcagcactgctacgtcctgtgcccgtgccttctcgccggccgcctcgtccaggggagacgcctcggtcagcaggatgcaggccacgtcggccagcaccgccacggcgatggcgttgacgttgcccatgacggtcatccatacgcacccggccggcgcgcgccccatcacccagctgagcagatccccgcagtagccgccggttacctcccggccgccgtctcccgggacgacggtttcaagggacagcgcacgacccagctcttcaacagtcattgtccttcctcctcagtcctcggaggggggcacgtagccctccagccggcttaattggacggcgatgtcctgtatctgcctgcgcatgaggaagatgcagtcggtctccttggccagcccctgcacggcgtcctccgccagggcccggcaggtcggcgcgccgcaggagccgcagtccagctggggcagccgctcgctgatggcgtcgatgcgttccatcaggcgcatggcgtcctccacgttctcggccagcttcatgaccggcgcgaactccagccggtcggtccattccagccgctccgcgcaccccgcgtcctcggtgcggttgcaggataccggcaggtatttgcgcagccgctggatccgcgcgcgggccacatagccgttctcggcggcgaatatgccccccacgcagccccccgcgcaggcgttgagctcgatgaaatccagctcctgcagcttttcgtcctccagctcctcgagcacctggatgacgttctcgatgccgtccgcagccagatggttctcgttgagcaggccggcggcttctccgccgatggaggaccagctcaccccgatgatgcccgaccgggccagaggctccaccttgtccagatggttcatggcggagaccagccggggatacagatcgctgatggacagcacgccgtccacgttggagtgggggatgccgatgggcacccgcacgtccgtcaccttggcggcgcagggggagaggaagaaaatcccgatctgctcgcttggcaggccggttttctttatggcctcctcccgggccagcagggcggcgatttccatgggcgccttcaggggcagcacatggtcgcacaaatccgggaaacgcacccggatcaaccgcaccaccgccgggcaggccgagctgatggccggctttttcagctttccgtcccccagcagctggcgggtcagatccgaatggatttccgccccccgcgacacctcgaacacgtcgtcgaacccgatggccttcagccccgtgagcacgatgtcgatgtcgtccaggtggttgaactgcccgtacagggtgggggcgggcagggccaccgtataggtaaaatccttcagcatctcgaaggggtcgtgccccgcctttttggcgtgatgggggcagacccggatgcactcgccgcagtcgatgcacctctcggagatgatctgcgccttgcccccccgcacccggatcgcctgggtggggcagcgcttgatgcagttggtgcagccgacgcacttctccttgtccagcgtgacagagtggaaaaaccgatccatcaccaagcctccctgcttccgtcagacctggaccgtcagggtcatggtggtgcccgcgccgatgaccgtctcgatcgccatctgatcggtgtatttcttcatgttgggcagccccatccccgcgccgaagcccagcgaacggatgttgtccggggcggtggaccacccctcctgcatggccttttccacgtcggggatgcccgggccgtgatcggtgagcaccaccgtgaccttgtcgggcaggatgtcgatgtccgcctccccgccgccggcgtggatgaccatgttgatttctccctcatacatggcgatggccacccggcggatggcgtcggatgggaagcccagctgcttgagggtgcgcttgaccgcggcggaggcttccccggcacgggtgaaatcgtcgcccggcacctcaaaatgcagatgcttgttcatatgtgcacccccgctccgccgtacttgggcggctgatattcatccctcttatggtctgtcatcatgctgtcctcctatagtttgaaaagcgccgcttttcaaacctccccgcctttcaggccgttttcatacagcagcccgcaggcggtgaacatccgcatgggggacttgagcaggacgatgccgcggtcgcccgccagctcgatcatatcgggggtggggtcctttccccggacaaacacgatgcaaaccatatccatcatgtcggcggtgcgcaccacctggggattcaccagcccggtcagcagcaccgactgatccttgacaaaggccagcacgtcgctcatcatgtcgctgccgcaggcgttgtgcacctcggtttccagatgatccgcgccgcagaccagatcggcttgcaggatgcgtacaatatcggcaatggtcatacactagactcctttctcttgagggaaacgccgcggagcggctccgcagcatgttgcctatattatatcgtgctccgtctgcaaaagcaagcgaaactccgaaccaccggccgccggacttaaaaattttccgcggtttcccgctttttggattgacacggatttaacggaatagtacaataaaacgtattgattctattacgcgtatggaggtagatgcaacatggcaagagtgtataatttttccgccggcccctcgatgcttcccgaaagcgttctgaagaccgcggccgaggaaatgctggattatcacggctcgggacagtcggtgatggagatgtcccatcgctccaagacctatgacgccatcatcaaggagtgcgaggccctgctgcgcgaggtcatggggattccggatacctacaaggtgctgtttctccagggcggtgcctcctcccagttcgccatgctccctctcaacctgatgaacggcagcggcaaggccgacttcgtcatcaccggccagtgggccaacaaggcgtaccaggaggcttcccgctacggcgagacccatgtggtggccagctccaaggataagaccttctcctacataccgaagctggatcccgccaccttcactcccgacgccgactatttccacatctgcatgaacaacaccatctacggcaccaagtatcacgagctgcccgacaccggccgcgtgccgcttatcgcggacatttcctcctgcatcctgtccgagcccatcgacgtgtccaagttcggcgtgctgtacgcgggcgcgcagaagaatatggcccccgccggcctgaccgtggtcatcatccgggaggatctcatcggccacgcccgtgacatcacccccaccatgttcaactaccagacccatgccgataacgattccatgtacaataccccgccctgctacaccatttatatcgccgggctggtgctgaaatggatcaaggaggaaatgggcggcctggaagccatgaaggcctataacgagaagaaggccggcctcctgtacgattttctggacagctccaagctgttccgcggcaccgtcgtcaaggaggatcgctcgctgatgaacgtgcctttcgtcaccggcagcgaggagctggacgccaaatttgtcaaggaagccgccgcggccgggttcgtcaacctgaagggccaccgcaccgtgggcggtatgcgggcttccatctacaacgccatgcccatcgagggcgtggaaaagctggtcgcgttcatgcgggaattcgagaaggccaacggctgacccctttccccgggaaagcaccgccaccaatttgaacaagaccctgtgtccgtcggacacagggccaggaaaggacacggagctaagatgaatatctgcacgctgaataagatcgcggcctgcggcaccgcccgcttcgacgccgccaaatataccgttaccgaggatctgtccaccgctaccggcgtgatggtgcggtccgccgctatgcacgatatggagctgccggacagtctgctggccatcgcccgcgcgggcgcgggcgtcaacaacatccctgtggacaaatgcagcgaaaccggcgtcgtggtgttcaacaccccgggcgccaacgccaacgccgtcaaagagctggtcatcgccggcctgctgatttcctcccgcaaggtgatttccggcatcgaatgggccaagaccctgcagggccaggagggcgtggccaagctggtggaaaagggcaaatccgcgtttgtcggcccggagatcaagggcaaacggctgggcgttatcggcctgggcgccatcggcatcctggtggccaacgcggcccacagcctgggcatggaggtctatggctacgacccctatctgtcggtggacgccgcctggggcctgtcccgctccatcatccacgccaccagcctggatcagatttatgccaactgcgattacatcaccgtgcacgtgccgctgacccccgacaccaaggggatgttcaatgccgccgccttcgccgccatgccggatggggtgcggattctcaacttctcccgcgccgacctggtcaacatcccggatatgaaggaggccctggcctccggcaaggtggccgcgtatgtggtggacttccccaccgaggatatcctgggcgtggaaaacgtcatcgccattccccacctgggcgcctccacccccgagagcgaggacaactgcgccgtcatggccgctgatgagctcatcgccttcctggaggacggcaacatcgtcaattcggtgaatttccccaccgtggaggttccccgcaccaccgagcggcgcatctgcgtgctgcataagaacgtgcccaatatgctcagccaaatcagcggggtggtgtccgccaccggcatcaacatcgagaccatggtgaacaagtccaagaaggacaacgcctatacggtgctggatgtcgagggcgatcccgacgaggccgcgctggaaaaaatccgcgccatcaacggcgtcatccgcgtccggaaaatctaatagtatccctattcatcaaacagcgcccgccgaaacccggcgggcgctgtttgtatatattttttaaaaatttacacaagtttattttttagggaaaggggtacgtacattgctggctcccgtgatataatccatgctgacattataatatctagctaaaatcagcagcttactcaaggggatttctctctgccccagttcccatttcgaataagcagtttgtgtaacacctaataccgaagcaagaactttttgcccttcttctctttctttacgcaaacggagcagtctttctaaatggttcatactgagccatcctttccttaagatgacttagtatatcattattccaaaatggggtgttgacttataatccattatggggtaaaattgttttgaagtaggattatagaggtgatgaaatggaaaccgttgaaaagaatgtaccttttactcgcatggaagatgtggaaaatgccgtttggaagcggcttaaggaaaacgacgactatcggacgattcaaaaaaggttcgacgacatgctggaggctatcggccgagccgacgcggaaaaagcgtttgtctacgatctggaggaagccatcggcttgaaggaatactatgcgcagtgggaatattatcgccaaggccttctggatggcgtggcgctgctgaaatggatgggcgttctggcctgaggaagccggaacatacccctctgtgcctctaaaaaggcaaagagcgaccagctttcctaccagtattaatccactgtttggatagggactagcacaaaatcagcgtattgatacggttgatcaacgtaggaaataacgcagtcgcagatcattacaagctcgccgtccttgatgtccggctgcttttggtaataggccagcagttgcccatccttgatatccagctttcgtgaacgcacctggaagtccttcatgttgggataccgttttgacaatacctctctgcatgcttcgtcgatgctcttttcatcaatagcgggcactttcacattgtcaaataggccaattttagaaaagcccaagaacttaacgtatccgttgacgtttatggtgatacgaattccctccagtgtcttatattccccgattttcctatcaaaattgatcgcatacattcttgtattttcatcataggaaaacgagtatgcctcatagctctttatgtcaataacgagatcggcaatggcactggcaatagccttgatttccgcctccgtctttaatgtgccggtttcctccttgtaagcaaatgagatagccgtcaattttccggcaggatcattgaatgtatacgttttttccccctttttaaaggtctcgtatgcttcggaaatattcttgctggagccttcgctgtcatatgttaatgtgcttttatctaccacgagatcgtcgcgtgtaacaccggctttggttactgtctctttggtgtctttgtcaatggaatcccattttttccgtaggacgctgaccactttccgcttctctggagccgtcgttttggcagatgtgctaggcggctgggcggtggtacttggcgttgttgcactggtggaggtggtggccgcagtgccaaaatttgtttgcgataccttgtccgtcgtattttggcttaggccttccacagcgcccgcgggttggcaagcgttcatcgaaaaaactaacaaacaagcaagcagcaaggcgcatgcaattctcttcatgaacaggctcctttcaggtatgccctcccgcgtaagcgttcctatgtgcgcaagagggcttgttaccggtaagtatggtgcttgatccaaaaccatggtaagccttactggaaaaatgaatacagggaatagttaattcaggatattaacactgacatctccgcgaacggtccttatttttatgttttcgtagcttccccatgtattataacctgcatcatccccatcaagcatggcttggtttattgtttttccggagcttaacgactgcatgagtgtatcagaccatgtatctgcgatagcgcccatattttcttgaaaaccaatcaccgctttggcacctttgtcaaacgttgcatttacaagattcgcagcggttgcaccgcccttgccggtttcgcacgccacatatacggccagtttgacaccgcgcagatcggaatccggtaattcaagaaccatattgcgtgacatcaaaccatttcctgtgtcaataccatcgatacccccatgggaattctcgataaatacttttgatgtccgcataaggttcagcgcatcatttggggtcatacttgtatatctgcttttttgatactttgcaggtacaggattattctgcatttgggaataaagaggcgttagtaaaccataaacatattcaaatgtccataatgaagcagcccccatattcgtatcagtagtaatgacattatgatcggaattttccgatacaaactgcgaaccaaattttatgtagtacatatttgtaccgttaaatctgactagactaaatttttgagctgtggggaaattggaataaatatccacatttccatttgttacatccatatacctactgaaagaacccacattggagataaaactatatgtcccatcggaattaactctagccctccaacgctgagcggctgttccattaaaaccataaccatgaacattttggagattggcgtcggtgccgttgtatacatccatatatctgcctgatttgacatttcgtaaaaaatagctggtgccatctgccaccgttgatacggacggtaccgtcgtataatattcaatctgaatacgagggcgtcttgaagtataggtggatgaacaatcactgctaaaataacaggtgcgatttgttttggtattatccacctctcgcggtttgataaccacgccgttatttttcgaggtgacagaataccatttttgaacaagagacgtgatattataggcttctgttgacaaggatttatcggatcgtccataggcaaccctattggtaaatttatagttcgcctgagaattccatgttattttatctgtttcccaagcatagtttcccacctcgtaaacgtcaaaagtgttattaacggctgtctgatatgttgcgcttgtatgatgatcgagatacataacggcgtttgaaatatatgctgtggtcggtattgaagatacccgagggaagcgaatatatacgcggctttcatatccttttccatcatagttcgagcctacatacatcctatccactttcatataattatctttaggattgtactggtttactccattatcttcaatgtccaatgcgctggtggatgtggtgacagtaggatccaatgtaacaggatacaccgtttggggatcgctgagccattccgcacttggggttaaggtatacaggcagctatcctctgcaatctctaatgtgacctttacgtccatggtaagggaatcaccagaatcaaacatgtatggcgcgttgataataaagatcggctcctcatctctgccatcggtattataaaagtagaccgcaccgaattcttgtaaaacaggggttagccctttacaggatatgtaataagtatagtcctgccgatccggcttagaatcgaaaatcagattttctttaagcgtttgtccgcttatttggtagtcggcctttgtatccggaaggacatccggataggaaacagccgattcctggttgggcactgccatagctgcatcctgtaagattttttctttcgcggctttgtctctcgtcaatgcgagcttcttttccaagatgctttttcgttgtgcttcactttgcatgggagagatattggcacacgatgatgtgatgttttgcatattaaacgcaagggtaaatcctttgatttgtacaacaattggcaaatctgcatcaagaacttgaggcagtttaactttaaaagaattacatttgttctcataatagctcgacgaattcacagcgttccattcttcgtgaagatgggaaactggaataagtgaattatcaatttcttcccatacgccctcttcacttataaagtgcaccggttcattgtacattgttgcaataaaaccaccatcttctttttcaaaactttttgttttttcagtgcgaagagaggtgatttcgatcggaccgtccatttctgtcaattcaggtttagacgtacttacagcggcatttgtaaagaattgacagctaattgccagtgaaagaaaaacagctgctaatttgacggatttcttcattttttgtcttcccctctattttataataaaacaattgccttctattttataaaaaaggaatgatattccatatatactataattactcaaaaattgatatttgtcaacgatttttgtgatcatcggatacaattataaaaacatacttttaaatttatgcaaatacgcaaagactgttgaacggtaaaaatattgtaagaatgatattggaagacaggaattctcttccgataaatttaaatggggctgttacaaaagcttttatgataagataattaaaaaaatgacgttttccacgacctctgcaggcgttggaaagcgtcattttttttaattatctatggttttcttttgcgatttgctaccattaatttatttttcaatagtttcttttatgagacctttccgtcagcgctaagcttgtcccctcacgcgccgtcgttgtcgtaggcggcgtacatgatgttggttgcgtggtcggagacccgctccaggtcggtgagaatgtccacatacagcatgcccactgccggcgtgcattccatcttgcccagccgctccacgtgatggttgcgcagctccaccaccagatcgtcgatctcctcctcctgcgcgaggatggcgccggacagctccttgtccgggtgccggtgcaggaagtagtcgatggactcgtcgatgattttcagcacccggtctcccatgtctcgaagctcggtcagcgcggagtccgagaaggggggcgcgtccccgccgaattcgccgtattccaggatgttttccgcgtggtcgcccacccgctccaggtcgttgaccacgtggaacaggttgcccaccacccggctgtcctcctcggtcaggtccatggcgtggattttgaccaggtagctggtgatgttgtggttgaggtagttcatgacctgctcattctgcttgatgagctgctgcgactccttgttgggggcgaagaaggtcagcatcgccagctggaaattgttgcgggcgatgtgggccatccgctccacctccttgatcacctgggccaccgcgatggacggggtgcccagaatgcgctcgtccagaaaatggagccgcatctcctcatattccgaatccttgccggggatcagcttctgggacagcttgaccagcagctgggcgaaggggaacatgatgacggtggtgacgatgttgaagccgatgtgggcgtaggaaatctgcatctccggattatcggtcagccgcatgatgaattccggataatgaagcagcagacagatggggatgaacaggatggtgccgatgacgttgaacatcaggtgcatcatggccgcccgcttgccggcccggttggtgccgatggaggcgagcatggccgtggcgcaggtgccgatgttctggccgaagaggatgaagatgacgcccggcagggtgaccgcgccgctggcggccagggcctggatgatgcccaccgaggcggaggaggactggatgaccgccgtgagcaccgcgcccgccaggattcccagcaccgggttggagaacttgaccatcagctcgcggaacgccggcatctcccgcaggggcaccatggcgctggacatgccctccatgccggtgaacaggatgccgaagcccacgatgaccatgcccagatgctgcaagaatttcttcttgatgaacaccacgaagatcacgccgataaaaatcagcaccggcgcgatggcgttgattttcagcccgatgaggaagctggtcaccgtggtgccaatgttggcccccatgatgatatacaccgactgctcgagcttaagcagcccggcgttgaggaagccgaccaccatgacggtggtggccgaggaggactggatggccccggtgaccaccacgcccaccagaatgcccagcaatgggttggaggtgattttctccagcagccccttgaggcgggagcccgccaccagctccaggccgtcgcccatcagcttcatgccgaacaggaacatccccagcccgccgagcagggtcaacacatgcgtatagttcaagcaaacaccccgttatgcctgcctccccgccgccagaaaccgagcgatttgggaagcaaaaattctttaaaactataacaaggctttgttaagggcgtgttaaatatcaaaaaaatcgatctttttatcaaatattcgcggaggcgggtatacattatgcatcttaaaatgtataattattcatttttaaatgcataatgtatagcgtggtggtgaagaaatatgggaaaataccgcctgtttattgcaaacttggtcagggtgacaaaaataggcgggatagcataaatatgcgtttttccctcttgcaaaaccgcacaacggcgcttataatatgaaaaaaggcaacgaaatcgcacaaaagcgaacaaaagcgaacagaaaggaagctgctggcatggagtcgatcaaaaaagtggtcctggcgtattccggaggactggatacctctattattatcccgtggctgaaggaaaactacaacaactgtgaggtgatcgcggtcgcggccgacgtgggccagggcaaagagctgaccggtctggaagaaaaagccaaagccaccggcgcctccaagctgtacatagaggatcttaagaaggtattcgtggaagagtatatttatccgaccctgaaagccggcgccgtatacgaaaaccaatacctcctaggcacctccttcgcccgccccattatcgccaaacggattgtggaaatcgccttggccgagggggcggacgccatctgccacgggtgcaccggcaaggggaatgaccaggtgcggtttgagctggccatcaaggcctttgccccgaacatgaaaatcatcgccccctggcggatttgggatctcaaatcccgggaggaggagatcgcttacgccgaggcgcatcatgtgcccctgaacatcacccgggagaccaattactccaaggataagaacctgtggcatctgtcccacgagggactggatctggaggatccggccaacgagccgaaatatgacgagattcttgaaatgggcgtgtcccccgagaaggcgcccgacaaggcgacctacatcaccctgtcctttgaaaagggcgtgccggtggccctggacggggaaaagctggacggcgtgggcatggtcgaaaagctcaacaagctgggcggcgagaacggcatcggcctggtggacatggtggagaaccggctggtgggcatgaagagccgcggcgtgtacgagacccccggcggcaccatcctgtacaaggcgcacgaggtgctggagaccctctgcctcgaccgggacacccagcattacaagcagcagatggtggcgggcaagttctcggagctggtgtattacggccagtggttcacccctctgcgggaggccctgtccgctttcgtggacagcacccaggagcatgtgaccggcgacgtaaagctcaagctgtacaagggcaacatgattctggcctccgttacctccccctattcgctgtatgacgaggaaatcgccaccttcgacgaggacgaggtgtatgaccagatggacagccagggcttcatcaacctgttcggcctgccgatcaaggtgcaggccctcaagcaggggcggaaataagccgatgctcaagcggctgcgggaagatcgggcggtgacccggcggctttccttcccctatgtgctggcgcttccccaggattacgacgccctgccggacaaacggtggcccctggtggtgatgctccacggggcgggggagcggggcgacgactacgacgtgctgtgccgtcacggctttctgcgccgggcggcggctggggaggaattccccttccttttggcggcgcctcaatgcccggcggacaaatactggggcgggtacatcgagtccttaaacgattttctggacgggctgctcgaccgcctgcgggtggacgccgaccgggtgtatctgaccggcttgagcatgggcggcaccggcacatggctgtgggccatggccaatccggaacggttcgccgccatcgcccctgtctgcgggacgggaatctgctggtacggcgaggcgctgcggcaggtgccggtctggtgcttccacggagacaaggacgacacggtgcccctcgacgagagcgtccgcatggtggaacgggtcaacgagcggggcggcagcgcccggctgaccgtcttcgagggagtcgggcacgacagctgggagcgggcgtatgccggctcggcgctggtcgactggctgctgtcccaccggaagggataacgatacgcatagggcacggcgcgccgtgccctatgcgcatttacaaaataagaaccagtttcaaaggagcgcgaccatgaaattatgggccggacggtttcagaaggaaatcgatcagaaaaccaacgacttcaattcctccattgcctttgacagccgaatggcgcaggaggatatcgcgggcagcatggcccacgccgccatgctggcgcagcaggggatcctctccgccgccgacggggaggccatccgggatggattggcgggcatcgccgccgacctgcgcgcggggacactcatcatcgacccgcaggcggaggacatccacaccttcatcgagggcgagctgaccgcccgcatcggggacgcgggcaagcgcctgcacaccgggcgcagccgcaacgaccaggtggcgctggacatccgcttgtacctgcggggggcggtggcgcccctgcggggtcagctgtgcgatctgatccgggtcttgagcgacaaggccttgacgcatgccggcaccatcatgccgggctacacccatttgcagcgggcccagcccatcaccttcggccaccatctgctggcttatgcggagatgttcctgagggacatcggccggctggacgacgcggcggcacgcatgaacgtctccccgctgggcagcagtgccctggcctccaccacctatcccctggacagggaggcggtggcggcggccctgggcatggacggggtgaccgccaattccctggacggcgtgtccgaccgggatttcgcggtggagctggcggcggccctctccctcgtcatggtgcacctgtcccgcttctcggaggagattatcctgtggtgctcttgggagttcaaattcatcgagctggacgacgcgttttccaccggctcctccatcatgccccagaagaaaaaccccgacatcgccgagctggtgcgggggaaggccggacgggtgttcggcgatttgatgaccctgctgacc

SEQ ID NO: 2483 - DNA, 6095 bp, Unknown
  16S sequences of unknown bacteria
tatcgtgtataatctgttttcacatcctggcccctcctttcctattccagccctgcccgtttcaatttctccttgttctgcaaagctgccttctttttcaaatgtccctgaacggttttcctgcctttctctgcctgttcttcaaattcataaagtgacatcaactgaacctgtccattctctattcctgttacttcacaaatctctgttacctttctggatccatcccggagtcttcccagatgaatgataatatccacagccgaagcaatctgccgcctaacagcttccatcggaagttctattcccatcagcaccatagattccagccttgtgatcatgtcatatgctgagtttgcatggccggtcgaaagacttccatcatgcccggtattcattgctgtcagcatatcgatcgctgccgaatcccggacttcacctacgatcacccggtccggccgcatacgaagacttgccttgatcaaatcccgtatcgtgatcgcattttcgccttccacattggaatttctggtttccatccgtaccagattctccacatcacgcagctgcagttctgccgaatcctcgatcgtgatgatccgttcggtctttggtatataatccgacagcgcattcaagaatgtcgtctttcctgctcccgttcctcctgatacaaatatgttgtatcttgcctttaccagcagcttcaggaatccggcagcttcctcatctaaagccccaagttcaatcagcctttccatcgtcattttctcttttgggaacttacggatcgtcatggtcggtccatcaagggcgaccggtggcagcactacattcactctggaaccatccggcagtctggcatctacgatcgggactgcttcgttcactaagcggttacatccggctacgatctgctgaataatcgatgccagacgatcttcgctctcaaagctctgggaaaaggactgaatacgtccatctttctctacaaagatctgatcgtacccattgatcatgatctccgttatgctgtcatcctctaacaaatctgatagcacatccatccgtctgaccgcattgaacaattcccttctcaaccgaatccgtccttccagactgacatatccgatatccggatgttccagaagcgatcggtcgatcagttccagaaccttctcatctatgatctcctgagacatatccagttcttccagaacgtgctcttttaatttctttctgtcctctgggcttatatccccaccagccttcccgccaattgcatcatctccgcactgtcatatgcatgatccggtacaacgacctgctgcatccgcatgactaccttctgtaattcctgtttctccaacaatctttgaaatgccgcaaccttttcttctgcatacccgccatccagaaccggaacaaatacatgatcgaactcaccaagtatcgtaatatctccaagcacgctgccatcaatatcaaatacgatcgttgtgtatcgtccatatgcaatcagcttctttatgaaccaactcacatccgaccggttcagttctctgatatccagatatacttccggtgacgcgatcatgctaatccctccttccacaaccacacttttatccagatattcaaaaatctgccctgattgtattcggatcaaatatgcaagctcagacataccacaagtcttatccgttactgtctccgaagtttcctgcttcctttctccatatgcttccatcccgatatacagcccaccacgtacctcgtccatcaggcagatgctttttgccagtctggtcttacccgacctgccgattggggaaataactgcataagtcgcaaataactcccattttccttctgcctcctccgcttttatgatccgcaacacccgcttcagtatttcttccacactcagataccggtaaattgcttctttctccatcttatccggtgcctgctccgccagcttgatcgtacaaatattttttccttctggaagtcctacgatcacaggcatcatgctttcttcatacaacagcgcatctaatgtgtgctccttcagataattttccaatcgttcttctgtcgaaaatgccattgcgaagaatggatttcttttatctgcattaatgtaattcatcaacccgatcacatagtttgattccattccaactatgccaagttttaactgccgcactttttcctcctttcccagcttctttcttcaaatatcaaccccattggcaatacaacagacatcccagtaatattgccatggaaaaatggatcttattccttcggtgccgtcttcgtcttcgatgcttcagccatgggatccatacattctttaccatatacagcaaagacaaaaccccaccaaacagaaacgaatacagaacgatccgccagacctccattccgataaatgcaccaagggctgcaaacagcttgatatctccggctcccaggaatccaaattgatacagaaggaacagcaatgcaatcggaaggacaataccaagtaccacctgtatgcctcccattctccagccctctctctggatcgtcacgaatatcccggtttccatcccgatcaataccagccagttcggaatcctccatgtcttgaaatccagaactactgctgcacttaccaacaggatcattaatgtcttctcaaaaacaaacgctgtatcactctcctttttttcatttttctgatgtcctgccatcagcgtatccatacgttaccatcccgaaaaaacattgtaaatacgcagaaaataaactaatttttaccattcttaacttgacacaatcatttaatatctgtcagttttgcacacatttatctatcccttttcaggcaacaaaaaaagacctgccgtaacagatctttttctgattcttatgtaatttctgaagtttgtgcttctttttgtcatatacgcattttgcagatatttatctggatttttgcatttctctgaccttatgcactcactactgggatacttcttcattctgcggaaccgcttccggctgggatgtcggtgcaactgcaggtacggattcctgtacaggccttgcctgtggagcaggtgcaggattctgctgtggtggcatctcattcatctgtggtgccataccctgtggtggcattccgttcatctgtggtgccataccctgtggcggcattccgttcatctgtggattatacatgccctgctgtggcattccattcatctgtggtaccataccctgtggtggcattccgttcatctgtggtgccatgccctgtggcggcattccgttcatctgtggattgtagccttgtggtggcattccattcatctgtggattgtacataccctgtggtggcattccgttcatctgcggattatacataccctgtggtggtgtctgctgatactgattgccactgttcatgatacggtgttcctgttcttctacttctctgtattccttctccagagctgcaatattctctaatccctttgcagcactgtcaaacagatgcttgatctcctccggtgcctcttccttgttcaggttgtaataatatcttccgatctctgtatagattctgtcaagattggaattctcagatgagatcttgccttttatctttgtcttctgtgcagcacactttgtgctgtcaactgcctgattagctaatgactttgtcttttcaaatgcattctgaaaaaaattacctgccattgtcaaatgacctccttatgttaatcatcaatatatttgttcaatgtctcaacaacatcgttcagattatatggttttgctatgtaatcatccagtttattctcaagaatacgttccttatcaccaaacatggctcttgctgttactgcgataattggaagtctctttctcttctctttctgctcgatctcacggatctcctgtgtagctgcgataccatccataacaggcatctgtacatcaaataacgctgcatcgtaaatcttctgcttgaagagttcaactgctttctgaccattctctgcaatatcgtaagagaagcctgccataccaagtaacttaccgattacctgctgattaaccggttcatcctcagctacaaggattcttgccttgctgtgtgcattgattgagaatacagccggttcttcttcctgctcaatctctactgatgcatcatccgatgcctttacaaccttcataggtacttctacgatgaacgtagaaccaatgtcttccttactctgaacctgaatgttgccacccatcagttcaacgatctgctttgtgattacaaggccaaggccggatccaccatatcttcttgtatcagaagaatcaacctggctgaaacggataaacagcttgctcatgttagcctctgaaataccaataccggtatctgcaactgccatacggatcttaaccttattttccccttccatatccatggatgcgatcttaacacgtacacttccctctgacgtaaacttgatcgcgtttgataacaggcagtttaatacctgctgaattctctgtccatcgccctttaccagctttggaatattgtttccaaatgaacagtcgagctgtaaccccttattatttgcaagtggtacctgagcagcaaccgtctcctcgatcgcctgtttgatatcaaatgtttcttctttgatcttgtactttcctgcttccagcttactgatatcaaggatatcattgatcagtcggagcagtgtatccgcacagttctttgcagttacaaggttatctctgtaatctgcctgaagatcatcagccatcagtgtaagctggagcatacccagaataccattgataggtgtacggatctcatggctcatatttgcaaggaactcagcctgtgtcttataggctgcattcgcatcaacaattgccttggacaatttgttctctgtatctttctgatctgtgatatcaataaccaccatgttaatgtaatctgcttctgacttatacattacggtgttaaataccttctgaagagattccattgtgatctcaacatccatcagatctccttcttttgttccggagttattatatgccgtaaaccaggcgttgatatcctgaagaacctcgatcttgctttctttcaggttcttgccggtgtaatcactgacatccagcttgaaatactcaccaaagatctcgtttgcatctacgatctgataactgacaccatttacaggatcatctatgatctttgcctgtgcaaaaccgatcggcaggttcataaataactttttatatttatctccctttccgccacttccactcgtaccgtcaccacagacgatgaatactcctccaaatgttacaactgcagcaagtattccaacgatcagagcacccactcctacacctgcaacacctaagatacctgccagaagaccaagtaccgcaccggctgctgcgaccggtttccaacccaactccttaattttctccattgatgcacctctatttctacttttttgaatctaatactttgactccacatgttattatattataaatgaatgttaaggtcaacgagatgataaaaaaacctatagatttttcataaaatctataggccttttttgatattttttactagatataactaatgatctgcttacactatctccaggaatctggcagatataaacaaatttcaaggttccatatgccatgttttttatatatgttatacatctgtcaattcccagttcataaaagtgtacgcattatggttgtactgcctgttctttattttggatcatcatcaaatacatccttcaggatctcatctacatgcttataataatcatcatctaaagcctccggttctgtctgctccaccgcttcatctactgacaggctccggtcgtccggttctggcagatcacttgttgcatccgactccgtttcatttatgccggcactctgtgttctgcgttttctcctgcctgatgcgttctccaccttccggttctgaaactgtcttcttccacacaggaagccaaacagca

SEQ ID NO: 2484 - DNA, 4147 bp, Unknown
  16S sequences of unknown bacteria
ggactgtagaggaaatcccagccactccgcagatccaaaccggtatgattgcggaacagattctgcccggtgccgacggcgacatccattatagttattttttgcccgaaagctatgatggcagacgcacatatcctttggtgatggttatgcccgggtatgacatgatgtggtttggggaagattcttctggcagcaacctggattggaacggatttctatcctggacacagctggatacagaaatgatcgtggtttccgcccagctgaccgattggcatgaaaaatccgcacggcaagccatagagctgacggagtattttatcgatcactttgctgtggataccagccgtatatacgctgctgggtattcggcaggcggcgagacgatgtcccaggcggtttctatgcgtcccgacctatatgcggcttatctgcacggcgcatcccaatgggatggcgactacacacccatagctgaaaacggcgtcgcggtctatatttacatggccgagggagatgaatattacggcagcgccaaagcacgatccgcttatgatgaacttcatgccgcttataaaaatatcggatggagcgaaactgagatcaatgatgtgcttcgtttagagatacccgaaaatgcctttttcaatgagaaggggatttataactaccatggtggtgcgaatgtgctcttcgatgacccggagaatttgcaatggatcatcttacatcggaaaggaggatgagatgaaagcggccgcaaaatgcaagcttgcgattgacgccgcaatggccatcgccatgcttttgttaatggcgtatggtttgataggggagaaatcccacgagtggatcggcgttggaatgcttatcctttttatcgcacaccacattgcaaaccgtaaatggtatggagcgattggaaaaggaagatatacgtgtttccgcattgtgcaaacggtgcttataggtcttattttcctatgcatgattggctcgatgataagcggtatcatcctatcccgttatgtgtttgccgcgttgccggttcatactggctacgaggtagccggaaatctacatattctctgtgcttattggggatttgtactgatggcggttcatttaggtctgcattggaatgggatcctgttgatggccggaaaacgattcaaaccatcccgtatgcgaagaaatactttacggatcttggcttttgttcttgcgggctatggcgtcactgctttcattcgtagaaatgtaggcacctacttgctcctgcttagccactttgtatttttcgattataccgagcctgtgatctgttttttgagcgactacttggctgtgatgggactgttcgtcttgttaggattctatctggccaagatattaaaaatacggaggcgctcttttgcccccaatgcacaagcgagtttacgatgaaaaacaatgcaatggagccgcaggctttgcggcaggaatcccatctggctttcaggtgggatttttgtttaaagatcaacaggattttaatatgaaacaaagggctcagggcggctctttgttagaatgttgaaaagtgtgcctttgcagaaatagtaaaatagaaaagccccttttcgggggctttttgcaagagcttattttttacagcacttttcttccgccatcgggccgtatcttcaaaacgtggcaggtatctttgccaaagatggtttcgatgtttgctttgtaatggggcacgattgcatccggcacaaaggcctgtatggtgccggcaaatccgccgccgtgtactcggcaaacgccctgccctttcaaaattttttcagagacggccaatgctacggaaatgctttgatgctggggcttatggcaggcatacacattttgtaggaacttgtaagagctgtcgccagatgcctgtaccgcgcggagaaagccgtccatgtctccgctcatcagcgcggaggcctgctgggaaactcgtttattttccgcaaagaaatgcagagcacgcagcacagctcgatcttgacaggcttggcgcacctcggcgatctgcgagaaaaacgcttcctcggaaacatcgcggagatattcttggccaaaaaagcgggcgacgcggcgcatctcttgaggaatcgcggcatattcatccgtcagatctgcgtgactgccttgggtgtccacgatgcaaaggctgtatccaaaggcggaaaagtccacagagagcttttgtacgcggggctgccgcaaatcctgaaaatcgatgtaagtaagcccgccgacagcgcttgcgcattgatccatcaatccgcagggtttgccgaaatactcattttctgcatattggcctgctttggcaagggtgacgggatcgatgcgcatttggttgtaaaggccgttgagaagcacgcctatcatcacttcaaaggcggcggaagaagatagcccggagcctatgagcacgtcgctggtcaaaaacgcattgaatccgccgacctggtatcccaaagcatgcaaacgggcgcagacgccgcgtaccaaggcttccgaagcgccgcgctctttttggcgtgcggacaggctgcctatttcgatgggagaaagggcaaaatcatcggattgtatttgaattgcctgagaggccctgccggcgatggcaatgatgtccaggttaacagcagcggccaacacgcagccgtgctggtggtcggtatggttgccgccgatctcgcttcgtcccggtgcgctgtaaatctcaatttccccatcgccatataggcggatgtattgcaaaagggcctcggcgtagcgcgcccgctggtaggatactaaggcgtcgtcttggtatatttgctgaaacaacgcatcgtattgacgcgcaaggcaggcttctctggctttagaggcaagggtcatgattgaacgacctcaaaggtatagctggtggtttcatcgtagacatcgccctttttcaaaatcgtactggggtcctgttccagatgaatggcgtccggtaggttttgtgtttcaaggcaaatgccaaagtgttttgggtaggcgatgccgtatttgccgatgcggccatccagctggttgccggtatagacctgggtaccgggcagggtagagctgatggtcaaacgccggccgcttgccggatggcacaacacaacttgatcttcagcgcggttaaacaggaagggatggtctacaccgcggcccagagtaagctgttcatcctggcgtgcaagcacatcgccgatgcgtgcgggggtatgaaaatcaaacggcgtaccctgggtatcgcggaattctccggtgggcaggccattggcatcaatgcaggcgtatgtatcgctgtgcacctgcaaggtgtggttgcaaatatcctcttggccgccagagaggttgaagtaggagtgattggtgatgttgatgagggtatcctgatcggtggtagcctgataacggagcgtcagcgtaccgccctttaacgtataggttgcggtaaggcgcaagttgccgggatatccctcctcgccgtcgggcgaaagataggtcagcacgagggaatcgccctggatcttggcatcaaagaccttttgggagaagccatgtaccccgccatgcaggctgttgggcccatcgttgaggggcagggtataggtcttcccgttgagagaaaaggttcccttgcgcgtgcggttggctgtacggccgacaagcgcccccagataagcgtctttggtctggtactccgcgatgctgtcatatcctagcaccacatcccctttttgcccgtttttatccggcatcaacaggcggatgatggtgccgccaaaattggtaacgagcacctccagcgcattgcttttcatctcaaacagagaaatatggtcgtctacctttttcagttctcgaatcattcgttattctcctttcaatgctgtttttacaaaacacatcagtccgcaaaggccgttgtcgtccatcttaaagacgcctgcatcctctaagacctgtacatacttctctgcgaccgactgtttgattcgttcttgtatgttttgcgttgtaaaggcaggctgggaaagcagctcttgataccaggcgcaatgcttttccagctgcg

SEQ ID NO: 2485 - DNA, 3737 bp, Unknown
  16S sequences of unknown bacteria
ttggttctatgcggtgtctttcattaaaatccactcactttggggttgacccatataattgtgtactcatttgggttaggtgaagatattcaatttgaaaaggacgtatcggaacggcacggttgcgtagtctatgcttttgatccaaccccaaagtcgctaaactacgtaaaaaattccctatcggaaaacagtagcataaaagtttacccatatgcactatcagataaaaattgtactttggatttcttcctgccaaaaaatccaaattacgtgtctggaagcctaaccaaaagtcccggtacttcagatagcaaaattgaagttgaagcccacagcattcagttcctaatggaaaaatttgggcatacagagattgatgttctcaaaatggatatagaaggggcggaatacgatgttcttgaatctctaatagattctggaaccataaataacataggtcagatatgtgtggaatttcactttagatttggctgcggacttgtcaaaaagacggaggaaatttttaaatctctaaaaaataaaggatttaaattagtatatgccgctgcgaatcaagaggaatttacttttgcgcgcataaattcggacaatttcaaccttaaaaagacaagaaagaattagcgggcgcatacttaaactccaggaggaatctatgttatcttgctgctttttgtggggctttgcttgccgccgcttaaagcgcaaggactgtattttatagccgctcaaattctcatagctattggctgtattttctaactcagcggcttttattcttatatcttaaaaatctccgaccagacgataaaaactggaatattacattctctaaaatctccgaccaaaaatgtgcgatttatcctaataaaatttaaatttggaaatttgaaaatgcggcagattttcagacaaaaaattaaggcagtcgcctttgaggttttttaatgtatatataaataaaaagagtttagattttatccatcaaaaaattgcaaaagacaaaataccttttgagtcaattgtttttcggtaaatgttgcctctctgattaagtgggataaatatgaaatttctcttattaaattttcggatacaattagaaaattgcgaaatttttgcggcacttgcgcttttgtatcctttgaagaaattatgtatgcgcaaggattttataaaatacacgtttaagacagattctataagagttctaaatgatttaaaaatatatcattctatccgagttcctattcacctgtttcaagctctgtaaatccttctgttttcggagaaaattctcctaaaaataccatattgtcaaagagatcttttgttgttttaatatccgattcataactgttcttcccatctttgccgtatgtataatatataactttgtcctcgtaaatatccattccgtctatcatgccttcggtttttaactctgaaataccgtttggcattttcatatatactttttcgttcacatcgtccacaatatacgaattgccccaggaagccttgcattccaagtatagccaaccattgccaagcctattcactttaaagttgctcaatccgcaagtgtccatgcctatgccgattttcttgccgctcttaaagagcacgcgcctgtcgtattcggcgcaaaacgtaaacagcgggtttaactgcatttcgcaagaataggacggatggattttcaaatttatccacgcattataataaataaaagcatctgcagctataaatgcgattgctaaaatgaatgaaaatgcgaaacccgcaaaaaacgatatgcaggagctcaaaaaaggcatttttctctttctcgcgaaatacaaaaatacgcagaacccgatgcctaatataattatgatctgcccgaaaaacgccgcaaaataaatatctttcgggcagacttgaactataaatttttgtaatgctaaaagcaggacgagcccaagccccataaatgcgcatattgcaggcacaaggcttagtgtgaatagagtaaagccatatttttgcagttttttacgcaatatagatgcaattaacgacaccaatattaaagtaaaaaatagtacaattatggtcatggcttatatttttacgcgtatagagtagtttaggattaaaattctaagccgaagggatcgaggcgtcgcttataccctattgcgcctctaaatttccccgcgtaaatatttgtccatattttcggcgactttctttgcctgcaccatggctccaactatcgtatcggggcctgtgacaacgtcgccgcaagcaaatactccgtccatagaggtttgaagcgtctgagggtcaacggcgattgtcccgttcggatttaatttgaggtgcatgcagttcctcgcgagcctgtcgcgcggcttgctgccggttgataggattacggtgtcgcattcgagcgtaaattccgaacccggtatttctacgggcgtgcgccgcccgcctgcgtcgggttcccccattcttgtctttacgcattccacgccgtacacgctcccggattcatcgtataaaatcttcttttggagggtgttttcaagcatctggactccctcctttttcgctatggctatttcgtccgagcgggctggcatttcttccaatgtgcgcctgtacacgattgtggattttgcgccgcaccttagggccacgcgcgaagtgtctatcgcaacgtttccgccgccgattgtgatgacattttttgcgcgtattggggatatcatcattctgctgtcgctcgacatggtgctcaaattgaatcgggcgagaaattcgttagacgtatagacgcctttggcgtattcgcctgcgatatacattgtaattggcttccacgcgccggtggcgacgagaactgtgtcgtagcgttcgcgcagttcgtcgaggctgtatggaggctcgcctatgcctatgccgtagtgtatgcgtacgtccattttttcgagccttgaaactcgttcaaatacaatttctctcgggagtctaaactccgggattccgtacatcgtgacgcccccagggaggtcgcgtccttcaaagacctcgactgcgtgccccatttgcgccaatttctctgcggcagttatgcccgccggtccaagcccgattattgcaacgtgcttgcctgtcgggggattgcactttggcacctcagagtacccgtttattcggacaaagtctgcggcaaagcgttcgagcgcgccgattgcgacgggctcgccgcgtattccaagcacgcacgcgccttcgcattgtttgttttggttgcataggcggccgcaaattgccgacattgtggattggagcgcaagtttttttgcggcgtcgctgacattgccgtttgcgatgtcggatatgaattcggggatatttatgtggttggggcagccaatctggcatctcggtttggggcagtgaaggcagcgcgaggcttcagcaatagccgctttttttgttatgccgtagtatgcttctccgtcgtctgtaattcgtattttttcggtggattcccgaacctccattctgggaagtccggaagcctttgtctttctgttttccggattcatattattatatttttcggctttaagtcgcgcaaatcaataattttttctcaataaaatcgttctacgtcaaagattgtggaatggtggaaaaaaaagagggcaaagagaacg

SEQ ID NO: 2486 - DNA, 25175 bp, Unknown
  16S sequences of unknown bacteria
aaaaatacagctgctatttcgatatttttccttttttcggtcttgcttgcacgcataaaacctgctctggcttaattgccacagcaggtttttcgacaagctgaaaggccccaacggcatatgccgttggggccttttgctcgtctgcgcatccgcgctccgcggccggcaaattgcggatggacttttttctgcgcacccggtatactgacagaaaaaggcgaagggaaggatgccgatatggaacgctggatttcgctggacggagcctggaccctctattttaccgacgagcggcggcaggcgccccgaacgccggaggagcttctggcgctgggcgcgccctgcatccctgcgcaggttcccggaaacgtggagctggacctgtcccgggcgggactgctgcctgcggacctgttccagggaatgaacccccgaaaggccgaagcgttcgagccctttggctggtggtatgtgcgggagtttcccgcgcccgagtccgcggcggacgagcgcgtgtttctccgcctggacggggtcgactgcctggcggaatacttcctcaacggcgagcggatcggcgcgtccgaaaacgccttcatgccccacgagttcgacgtgaccgaccggctgcggccgcaaaacgccctctgggtgcacatccgctccgccctgctggaacagctctcccagccctatgcgcagtacctgctgaccggctggcacatcgacggcggcgtcgcgctgcgcaagcccgcccattcctttggctgggacatcttcccgcgggcggtgacggccgggctgtggaagagcgtgcgcctggccgtgcgcgacgcgtacgcctttgcggagctgggctaccgcgtccgcttcgaccgcgtgcagacgcccagcctggaattctacttcagcgtggatgcgccgctggaaaagcttgcggggcagagcctctccgtgcgcgtcgccgggcgctgcggcgcggactcctccttcttcgggcagtgcgcgctggatcgggccaaggtcgggcgcatcgcctgcgcggtggagaatcccaagctctggtggccctacggctacggcgaggccaacgtctacgacgccgtggcggagctgctggacggcgagaccgtcgtcgcgcggcgggagctgaacgtcggcctgcgccagatccgcctcaagcagagcgaggagccggaacagctgcagttccagttcgaggtcaacggcgtggacgtgttctgccggggcagcaactgggtgccgctgagcgcctaccacagcctggaccgcggccggtacgcccgcgccctggccctggtcacggacatcggctgcaacatgctgcggatctggggcggcggcgtgtacgagcaggagtgtttttacgactactgcgaccggcacggcatcctggtttggcaggacttcatgatggcctgccagatgtgccccatggacgacgccttccgcaagaacctcgaggcggaggtcatctgggctgtgcgcacgctccgccaccacccctgcatcgcgctctgggccggggacaacgaaatcgacgaatgcctcagctccagcggccgggacccgtccatgaaccgcatcacgcgcgagtggatcccgcagctcctggcgcagcacgacgcctaccgcccctacctgcccagctcgccctacatctccagcgcgggctacgccgccctgcaggagggtcggaaccacatccccgagcgccacctctggggcgcgcgcgactactacaaggcggattactacgcgaattcgaccgcctgtttcgtcagcgagaccggataccacggctgccccgccccggaatccgtccgccagatcgtggacgaggactgcgtctggccctggagcaacgagcagtggacgctccactcctccgaccagcgcggcgacgacgcccgcgtgcgcctgatggccgaccagatcacccagctgttcgccttcgagccgcagagcctggaggacttctccctcgcctcgcagatctcccaggcggaggcgaagaagttcttcatcgagcgcgtgcgcgccgggcggccggcgcgcagcggcgtgctctggtggaacctgctggacggctggccgcagatgtccgacgcggtcgtggactacttcttccgcaggaagttggcgtatgcgtacatccggcgcgcgcaggcgccctttgcgctgctgctcggcgagatgcgcgactggaaccacacgctgttggccgcaaacgacacgctcgagaccgtccggggcgcctgcatcgtctcggacatcgagaccggcgccgtcctctgggaaggggacttcctcgcgccgccgaaccggacgacgcccctcgccgacctgcgcatgttctactccgagcagcggatgctgctgatccgctggacggccaacggcaagcgcggcttcaaccactacctgtgcggcatgccgcccttctcctttgccaagtacaagctctggctcgcgaagctgcaggcggtcgaggccgagggctagtcccccaaaacgcgaaacccagggggcagcgaaatcgttccgctgccccctgggcgtctttggcagtgcgcttattcccgcgcgcgcaggaaggcttcgacctccgccgcggtgggcagggagggctgcgcgcccaggcgcgtggtcgccagcgcgcccgcggcgcagccgtagcgcacggcgcgctccaggggctccccgcgcaggtaggcgaccgtcatggcggcggtgaaggtgtcgcccgcggcggtggtgtccacggcctcgaccgggaaggcgggcaccatgctctcgaagtccttcgtgagcaggtaggccccccgcgcgcccatcttgagcacgacgtccgcgccgtggctgcgctcgcgcagggcgcgcgcggcggcgcgggcctccgcctcgctgtcgacgggcaggccggtcagcgccatggtctccgtctcgttgggcgatacgatggacaggccgcgcatctcctccagggggaagctgcaggccgggcccgcgtccaggatcacgggaatgccgcgcgcctccgcctcgcgcgaggcgaggagcacgatctccgtggggatctccagctgcatcatcaccgcgtccacgggctcgcggaacatggcgggcacgtcctcggggcgaatgctgcggttcgcgccggggaagacgatgatgctgttctccccgcccgcctgcacgaggatgggcgcatatcccgtgggcgcgtcctgcgcggtgcgcagcaggcggtcgtccacgccttcgtcggtgagggttttgcgcagggcctggccgtagctgtcgtcccccacgcagccggcaaaggccacgcagccgcccaggcgcgccgcggcgacggcggcgtttgcgcccttgccgccgggggcaaaggaatagccctggccgagcaccgtctcgcccggcagggggatgtggtcaatgcgcgccaccatgtccatgttgatggacccgatgacgaggattttcggtcttttttcttggcatacaggcatgagagccacctcgtttctccgagactgtagcaacagtgtagcacaatcccccagggttggcaacgagtttgaagggaggacggattcggatgcaggagaggctgttcggcattctccacctgctcgtgctgcgcggccgcatgacgacggcggagctcgccgcgcactttgaggtctccagccgcacgatccgccgcgacatcgacgcgctgtgccgcagcggcgttccgctgtatgcggagcgcggccgcggcgggggcgtgcagctggtggacgggtacgtattggaccggtcgctcttgagccggcaggagcaggtcgacctcctggccgcgctgcagggccttgccgccgcgcgctatcccctggacggcgcggtgcaggacaagctgcgcgcgctcttcggcgcgcgcgaggcgccgtggatcgacgtggacttctccgactggagcaatctgcaccgcggcctcttcctcgacctgcgccgcgcgatcctggagcgccgcgtcgtcgccttcacctatttcaacgcccgcggcgaggtgcgcgcgcgcacggcggagcccctgcagctccggttcaagggccgggcctggtacctgctggcgcactgccgctcggcgcaggacctgcgcctattcaagctgacgcggatggagggcgtgcagctcctggaggagcgctttacgcgcagcgcgccgccgcaggcggacgagcccccgccgctgcccgaatccgaggcgccggagacggttctgcgcgtcgacgcgagcctcacctaccgcgtgctggacgagttcgagcccggacagcggcagcgccagccggacggcagcttcctcgtgcgcgtgcggtaccccgtggacgcgtggctggtgggctacctcctctccttcgggccggaagcggaggtgctggagccgcctggcctccgcgaggccgtgcgcgaggcgctgcaaaaaaccgcggaccgctacggaaaataggacgcgctgctgtccccttttccctggtatactggtcccagaaattccgacgaggagggacccaaatgaacaccaacgagaagttttgccagagctgcggcatgccgctgaccgaccccgacctgctcgccacggaggcgaacggcgcgaagaacgcggactactgcctctactgctacaaggacggcgcctttgtccaggactgcacgatggaagaaatgatcgacttctgcgcgccgatctgggtgcgggagatgccgggcatgaccgaggacgcggcgcgcgcgcagatgcgggccttcttcccgcagctgaagcgctggaagcgggcctgacgaacgggacacacgcaaaagcggccccctctgcaaagaaggggccgctcgtctgttttacgccttgagcgtgacttccaggaccgtatccacggggtcgggcagcagggggctcgggccgaggttgacaaagaccgtgtccgggtagttggcggccatccagctgtcggagatcttgacctccgcgccggtggcgagcaggcggaccttctcgacctcctcgcagcgcaggccctccaggggaatgtcgccgatggcggcctcgtagatgtggtagtagagcttgttgccgttgcgggtgatgcggccgttttcgggcttgggccggtccgcatagccgcagccgtagatggagtcgccgttcttctgcatccagcgggcgagctccagcaggatctgcacggactcctgcgggatgcagccgcgcgcgtccgggccgacgttgagcagcaggttgccgcccttgctcacgcactcgacgagcttgtgcaggatgagggacgcgggcttgaagttcttgtccgccgcgcagtagccccagttgttgttcatggtgatgcaggcctcccagacggcggggttgcccatctcgtccatgatgcccttgggcgggatgatctgctcggggctgacgaagtcgccgctgtactccgtggggttggccgtgacgagcgagccaaagccggagccgctgacctcgagccggttgtccagcaggatgcccggctgcagggagcgcaccatgcgcaccagctcgcttgcgcgccacttctccccggccatgtcgtcataggagaagtcgaaccacatgatgtcgatcttgccgtagttttcgcagagctcgcgcacctggccatgcatgtactcgaggtagttgtcaaagttgtgcttggcgcccttgaaggcctcgttgtcgcgctcggggtggttgcggtcgccgtagtgcgggaagtccgggtggtgccagtcgatgatggaatagtagaagccgaccttgatgccctgcgcgcggaaagcgtccacaaactcgcgcacgaggtcgcgcccggcgggggtgttggtggccttgtagtcggtgagcttgctgtcgaataggcagaagccgtcgtggtgcttggtggtgagcacggcgtacttcatgcccgcctgcttggccaggaaggcccaggtcttggggtcgtagtcgacggggttgaactcgcggaagaagggctcgtagtcctccgcggagatgcgctcgacgctgcgcacccactcgccccgggcggggatggcgtacagcccccagtggatgaacatgccgaagcggtcgtgctggaaccactccacgcgcttcctgtaggcttcgcggtcaaaggtaaacatggtcgtaccccctttttgtatctgctcgccggcgtgcgccggctcttagcgcgcgtgctctttgacggaacggtcgatgtcgcgctgggcctccttcttggcggcgtcgtcgcgcttgtcgtagagctttttgccgcgggccagggcgatctccgccttgacgcggccgtttttgaggtaaatctgcaagggaacgatggaatagcccttctgcatgacgcgggcgtagaacttgcggatctccgccttgtgcagcaggagcttcttgggccgcaaggggtccttgttgaagatgtttccgtggtcgtaagggctgatgtgcatgccctggataaaggcctcgccgttgcggatctcgacgtagctgtccttgaggttgcacttgcccgcgcggatggacttgacctccgtgccaaagagctcgatgcccgcctccagcttgtcctctatgaagtaatcgtgccacgccttgcggttctgcgcgcactgcttgacgccttccggcatggaaaatcccctcctttgcgggaagtttttcgctatcagtttagcggattttccgcgcggcgtcaagggagcgggcgcagcgcgggatcgctgcgcagctggcggtaggtgcgcgcgatcaggaagaccgccgcgaggaacgtcagcgcgtcggagacgggcatggagtacagcacgccgttgagcccgaagaacaccgggagcagcagcgcgaatcccacgccgaagacgacctcgcggatcatggacagggccgtggacgcggccgccttgcccatggcctgcaggaagatgaagcacgccttgttgacgcaggccagcgggagcatgcacaggtacgtccggaaggccaggacggcaaactccgtgtaatagcggctctcgttcgccgcgccgaagagggagatcaggttccgcgggaagcactcggccaggaccagggccacgatgccgacggccgcctccgcggccaggagcttggtgaagagcgcgcacacgcggtcccgcttccctgcgcccatgttgaagccgacgatcgggatgcagccggcggccatgcccacgacgatggagatgacgatctggaagaacttcatgacgatgcccaccaccgccatggggatctgcgcatactgcgcctggccaaagaccgcgtcccgcgcgccgtagacctgcagcatgttgttgatggcggccatggccgcgacgagcgagatctgcgagaggaagctcgtgatgccgagccccagcgttccgccgctgacgctgccctggagggcgaagtccttcttcccaaggcggatggtcttcctgtgcagcaggtaccaaacggagagcgccgcggtgagcacctggccgatgacggtcgccaccgccgcgcccatcatgccccagcggaagatgaagaggaagatcgggtccaggatcgtgttggcgatggcgcccacgagcgtggagaccatggcaaagcgcgggctgccgtccgcgcggatgatggggttcatggcctggccgaacatgtagaacggaatgcccagggtaatatagaagaaatattcctttgcgtaggcgaaggtctcctcgttgatcctgccgccgaacatcgtcaggatctgctcctgaaagagcagatagaccgccatcagcacaacgccgctggcggcgctcatcacgaccgcattgcccacgctgcggttggcgcgctccggctggcccttgcccaggtggatgctgacaaaggcgcagcagccgtcgcccaccatcacggcgatggccagggccaccaccgtcagcggaaagacgaccgtgttcgccgcgttgccgtaggagcccaggtaggccgcattggcgatgaagacctggcccacgatgttgtacagcgcgccgaccaggagcgaaatgatgcagggaaccgcgtactgcgccatcagcttgccgacgcgctcctgcccgagaaacgcattcgatttctcttccatggggactcatcctttccaaaaaaaatgcgcgcgcggcccggctgctggatttacgcccgcaggggccacgcgcatgggagtttgcgcgccggcgcggcgcgcaaaacaaaagacgcgcggcagctcaactggatttacgcagagagctgccacacgtcgctcttcattatacggattttttccggctttgtcaaagcgcttttttaaaaaaattcgttaggtacctttacagacggccaccccgatggtatacttatcaaggtaccaaaagaaatggaacggaggcgtatcgtcgaatgaaggagacggtggagtaccgggcgcccagccccaacgacttgctcatctttgccctgcgggatgtgagtcacgtcatgcacgtgctctacgagggcaagggcagccaaaagcgcgtgctgatggtgctgcaggagatcggggcgcccatcacgcagcgggatctgacggagcggctgggcatccgcccggcgtcggccagcgaggtcatcgccaagctcgagagcgcgggctgcatcgtgcgcacgcccagtccgagcgaccggcggacggcggaaatcacgctcacggaactggggaaagcccgcgcgagcgaggcccgggcgcagcgggcccggcggcacgaggagatgttttcctgcctgacggacgaggaaaaagccgcgctcctcggccttcttgcgaaggtcaacgcggactggcagagccggtaccgcggcgcgattcaggattggaacccgcacgccggcaaaccccaaaggggggacggcgacgcatgatgtggaaatacgtccgcaagtacatccccctgggcgtgctcggcgcgctcttcatggtcggcgaggtgtgcatggacctcctgcagcccagcctcatgagcgagatcgtggacgagggcgtgctgggcctttccaacggcggcgcgggcgacatgggcctgatctggcggctgggcctgcagatggtcgggttcgtgctcctcggctgcttctgcggctcgatgaacaacgtggtcgtgcagtatgccgggcagaacgtgggcaacaacatgcgcaaggactgcttccggcggatgatggccttctcctttccgcagatggactccatcggcacgggctcgctcgtcacgcgcgtgaccaacgacatcacgcaggtgcagaacttcctctcgcagtttgtgcgcggcatgatccgcaacgggatgctcatgttcgggagcatgttctgcatgtttcagctcgaccggaccttcgggtggatcgtgctgtgcgcgttccccttcatcgtgggctgcctgatcctctgcatggtcaaggcgaatcccctcttcacccgcctgcaggcggagctggacgagatcaacgccatcctgcaggaggacatcgcgggcatccgcatcgtcaaggcctgcgtgcgcgaggtctatgagaagctgcgctttggcaaggccaacggcgcgctgatccgcacgcagctaaagaccctggtaatcttcgcctttctgaacccggtgatcaacgcgctgatgtacgcggtcgtggcgattctcctgctggtgggcgcgcgcgacgtggcctacggctcgacaacgcccggcagcgtcatggcggccatcacctacaccacgcagctgctgcacggcatcatgatgctgacgatgatcttccagaacatctcccgcggcctggcctcctggaagcgcgttaaggagatcctccgcagcgagcccgcgctgcgcgacggcggcttttccggcccgacgcagacgcacggcgagatcgagttccgggacgcgtccttcgcctacccgggcagctccgcgcccgtgctcgagcacatcaacctcaagatccgccccggcgagaccgtcgccatcatgggcgcgacgggctgcggcaagacgtcgctggtcagcctcatcccccgcttctacgacgtgacgggcggcgcggtgctggtggacggcgtggacgtgcgccagtaccggcagaaggccctgcgcgagaaggtcgcctccgtcctgcaaaagagcgagctcttcagcgcgaccatcgcggaaaacatcgcctggggcgcgccggacgcgagcgcggagcagatccgcagcgccgccgtcaccgcgcaggcggacggcttcatctcctccacggcgctcgggtacgacacgcccgtcgccgagcgcggcatgagcctgtccggcgggcagaagcagcgcatctccatctcccgcgcggtgctcaagaacgcggagatcctgatctttgacgactctaccagcgcgctggacctgaagaccgaggccaacctgcacgaggcgctgcgccggtcgaatcccgcgagcacaaagctcatcgtcgcgcagcggatcgcctccgtgcgccgcgcggaccgcatcgtcgtgctggagggcgggcgcatcgcggcctgcggcacgcacagcgagctgctctccacctgcgcgatctaccaggacatctaccgctcgcagatcggagaggaggagagcgcatgagcacgcagaggacgcaaaagacgccggaacagaggattccgggcatggtcaaccggcgcgagcgcttccaggaggtcgagcacgcgcagaacgcgggccggacgctccggcgcgtcgccgtctactttttccaggagaaggcgatggtcctcgggatgctggcggcggtggtcttcggcacgctctgcggcgtctacgcgccgagcctgcagagccgcgccatcgacatcctcgccggcacggcctccgggcacctgctgcgcacggtgctgctgatgctggcggtctacgtgctctactgcctgggccagctcctgcagaacctgatcagcgcgcgcctgagtcagaacatcgtccggcgcatgcgcgaggagctcttcggcaagatcgtggacctgcccgtgcagtacctggacacccactcccacggggacgtcatgagccgcatgaccaacgacgtcgagaacatctccacgaccgtgtcgcagtccctgccctccctgttctccggggtgctgacgatcctgggcacggcggcgatcatgctgtggtactgctggcagctcgcgctgctgagcctggtgacggtgatcctgacggtgctcgcgaccaagctgctctcgggcaaggtgcgcacctattcgcgccgccgccaggcgctgctcggccagctcaacggtacggtggaagagatggtcgccggctaccgcacggtcgtggcctacaaccgccaggacaagacgaccgaagaattctgcagcaccgcggactccctgacgcgcgagggcatcaaaaccgacgtgtgcagcggcgtcatgggcccgatcatgaacgccatcggcaacatcgggttcgtgatcatcgcggccttcggcgggtacttctccatccacgggctgatctcggtgggcgtcatctcggccttcatcgtctacgccaagcagttcagccgcccgatcaacgagatcgcgcaggtctacggccagctgcagaccgccatcgccggcgcggagcgcgtgttctccgtcctggatgaggcggacgaggacaagtccggcgagccgatcgcgcaggactccgccaagaccgtgacctttgaaggcgtgaacttctcctacgcgccgcagcatcccgtcatccgggacttctccctgaccgttccctccggaaagaaggtcgccctcgtgggcgcgacgggcagcggcaagacgaccatcgtcaacctgctcctgcgcttttacgacatcgacagcggcgcgatccgcatcaacggccagaacatccaaaacatctcccgcggcagcctgcgccgcgacatcgccatcgtgctgcaggacacggtgctcttctcggacacgatccggcaaaacctcctctacggccgcgacggcgcgacggaggacgagctgcaccgcgccctggacatgagccactgccgcgagatgctcgagggcctgccccagggcctggacacggtgctggccgaatcgggcgcgaacatcagccagggccagcgccagctgctggccatcgcgcgcgcgttcgttgcggaccccaagatcctgatcctggacgaggccacctccaacgtcgatacgcgaaccgagaaggcgatccaggacgccatgcagctggtcatgcagaaccgcacgagcatcgtcatcgcgcaccggctctccaccatccgcgactcggacctgatcgtcgtcatggaccagggccgcatcgccgagtgcggcagccacgatgcgctcctcgcgcagaagggcaaatactacgagctctatcagacgcagtacgcagggtttgcaacctgatcgatccaagcagaacggctccccccaaagtttggagggagccgttttgcgtgcgtggattcagcgcgcagggacgagcgcatagcgcgcctcgcctgcgttgggcagggcggaggtgacggagaggagcagaccctcgggcgcgaagcgcaggcggagcgtcgagccgctgacgaactccacgcagcgcgcctcgatctcgaagacgtccgcgccgcgccaggcgccggaggcggcgtagggccggccgtccagctcggaccgcgcgtacgcgccggtcaggccgatgcgcaggaccttcgtcccctccgcttccgtcgccgtcaggagcgcttcccgctccccgaaggccagggacagcccgcggagcgcgccggcgcccgccggccacaggcccatgccgccgatcagccccgcgaggccggggatctcgccctttgccgcataggtcctgccgccccaggcgctctcccctgcgcggctgcgcacgccccaggccgcgggcagggagaggccctgcagcgtgcgcgcgagcgctgcggcgtcctgcgcattctcgggcaggggctcgccctgcatgccaggcaggatcgtgtcccagaggatgttgagcaggtcgtccggatagacggaggccgagttgatcgccacgaccgcgtcctgctccgggaagatcacgccgaactgcccgaacgcgccgtccatgcggtagacgccctcggggatgcagcgccacatctggaacccatagccgagccgccagttggagtcgtggttcgtgaagatcgggttgacggtcgcaatctgcgcggcgctggcgcggtcgaaccagctctcctgcagcaggcgcttgccctcccacacgccccgctgcaaatagaactgcgcaaagcgggccatgtcctccgtggagaggaaataccccgcgccgccgcgctccaccccgtcggcgaggcgcaggcagcgggcgttttcgatgcccaggggcgcgaggagccgcggctccaggaactcggtcagcgccatgccggtctttctgcgcaggatggcggcgagcatgttggtgccgggcgtgttgtactgaaacatcgtgccgggcgcatacgaaaactcgtggtgcaggaaggcggagatccagtcgggactcgcgtcctcctgggcggagatctcgttttcgtggccgcagctcatggtcagcaggctgtagatgtcggccttgcgcaggttttcgctcgggtcctcggggcagaggtccggaaagatgtccacgagcttttcctccagcgagaggaggccctcctgctccgcaaacccgatggccgttgccgtgagggtcttggagaaggaaaacatgctgtgcttgtactgcgggccgtagggcgcccaccacccttccgcgcagaccttgccatggcgcaggaccatcaggccgtgcatctcgacgcacgcctccctggcccggcgcaggaattccaagatggacttggaagaaatgccgacagattccggtgaaacgcgttccaactgcatcgaaactctccctccttacagcgcggttcccctctggggaacgaaaaatgtctccggcgcgactccctcgagcagcaggaggcggcgcttcttctccacgccgcccgcatacccggtcagactcccgttcgctcccaccacgcggtggcaggggatcaggagcgagatcggattgcgcccaacggcgctaccgacggcctgcgcagacatccggggccggccggtctgctgcgcgatctgcgcggcgatctccccataggtcctcgtcctcccatagggaatggcccgcaggatttcccaaaccatctcctgaaacggcgtgcccctggcgcgcagcggcggcaggaagtccggctctctgcccgaaaagtaaatgtccagccaacggatggtctcggcgaagacgggcaggtcgcgctcctcgcgcgccgcggacagcccgctgccgaaatacttctgcccgtcgaaccacaggccggtcagcgcctcgccgtcgctggccagggtgatgccgccgagcggcgaggtatacgcgtgcgtgtactccaaggtcgttctctcctcgttcctcctgcacatttctacttcttcttgtccagccaggtccgcacgccgccaaaccatcccgacgtgctctccccaatcttccgcccctgtgcgtcacgatggattgtaccgccaaagaagccagggcccgaggtccctatgcgattcccctttgcgtcggtatggatggtccctccaaacagaccgggccggctctctccaacttttttgccctttgcatcgtaatgaatcgtgttcccgaacagacccgggcggctctctccgatctttttgcccttttcgtcgcgatgcgtcaccgtgccgaacaatcccggcgcgctgtggatgctcttctttggcatgtggcttcctccttttcccttcggatgctttcattatgcaaggggtgcgcgcgcttgtcaatgctctttctcaggggctggaagaatttcccagttaacaaatcaatttacattaattgttaactttgctataatggagaaaactggggaaaactgaggaggcgttgtggatgtatcgcgctgttgttgtcgacgatgaaaaatgggcgctgcgtgggattctgcacacgtttccctgggcggagtacgatttttcggagccggaagcgctgacggaccccgaggaagcgctcagccgcatcctggccgacccaccggatgcagcgtttgtggacatccggatgccgggcatgacggggttggaattgatcgcggcggcccgggatgcgagcatcgcctcggaattcgtcatcctctccggcctgcaggactttgcctatgcgcggagcgcgctgcaatacgcggcgttcgactatctgctcaagcccctgcactttgacgcagcgcgggaactcctcgcgcgcctaaaggttcacctggacggtttggaccgctccccgcgcgcgggcgcctccctggcgcaggtgcgggcccgccttgtcgcctccaagatgcccgacgccggcgaggacgcgcaggaggcggacgccttcacgcgcttggtgcgctacgtcgacgcgcacctgtccgagccgcttcagctcaaggacatggccgtgcagttctacctgacgccgaactacgtctccaacctcttccgcacgcggctgaacacgacctacagcgcctatgtgagcggcctgcgcgtggaccgcgccaagacgctcctgcggggcacgcgcatgacggtggaggagatcgcgcggagctgcggctacgcggacgcgcagtacttctcgcgcgtcttccgccagcagacgggcttctcccccatccagtaccggaagggagaagaggcgccttgagccggggcagcatcacgcagcgcatcacgctggttttgctcggcggcatgctctgcctgctggccgtgctcgtgctctacgtctggcaggtcgcctccaccgcgcgcagcgacagccgcgcctatgcgctctccctctccgaatccatcacccagagcctggaggaaaagacggcctccatcaccaagaccgcctcttccctcgcgcagaacgcctacgtcgaggcgtattacgcctcggacgacatcaacgagcgcgcgaagaacatccgcgtattcaacagcctggcgctcaacgccattgccgaccggccggacatcctggctgtgggcctgctggacctggacggcagctccatcaccgtgggcacgcagctggacgcggtcctgctctccacgctcaagcgcacctatccgttcctgctcgagccggacgccttctctcccttctttacgcgcgccatccgcatggagggaaagatcccctactacgcctacatcctgcccgtgtacgacacgcggaacaagacgccgctcacgcgcgttgccacctgcgtggttctctgcgaccttcggcgcgtgcagtcgctgctggatcagacgctcaccgcgcccttttgcgacatccgcctctacgactcggaggacatcctgatctgctcgcgcacggagggcgccgccgccccgcacggggccgaaattctgatccatgcgctgccctctacggggtggagcctgcgctatcacctggacttctcctccttctcctttcagggcatgtccctgggggttgtcgtgcgcatggcgctgatctgcgcggcgatgctcctgatcgtctttgccatcgtgcgcaggagcgtcgcgcgcccggtcgacgccatcctcgcgcgcctgcgctctgggaaggatctctcgcacctcggcctgcacttcggcggggagctcgacatcatcgtcgagacgatcgagcgcacctttgcccgcctggagcgcaccacgcaggagcggattcgtagccagaccgaggtctacgccatgcagctccacctgcgggagagcgagctctccgccctgcaaagccagattaacccgcacttcctctacaacacgctggagtgcattcgctccatcggcctgtactacgaaagcccggagatcgtctccatctccacggccatggcggacatcttccgctactccatcaagggatcgcccatggtggcgctggaggaagagctccgcatcatccgccaatacatgaacatcatcgatgtgcgctttgacggccgcttccacgcggaaacggactgcacgccggagacgctatcctgcatcatccccaagatgatcctacagccgctcgtggagaacgcgatctatcacggtctggagccgcaaaagggggacggaatggtgacgatccgcgcgcggctgcacaacgaggagctggtcgtcgttgtgcaggacgacggcatcggcatggcgccggaagaggtcgaccgcctgcgcgcggccctggcctcgcccaacgccgccatcgaccgctcctttgccaagcgctcgctcgggctggcgaacatcgcgcagcgcatccgcctcttctcgcgcgaccgctgcgccatcgaaatccgctcccgccgcggcgagggcacgagcgtgtgcatccgcctgccctcgcgcaggcaggacccctcctgctgagcgaaaaaggaccgccgcttccaaaatcggaaggcggcggtccctttgcgtctaccctattttgcccagcccatctgcttttcgacggactccatcagccccttgatgtagcccacggcaaagaggtttcccatgaggccgtagctggggttggcgttgtcctcgcccactagggtgggcacgtggtccggccgcgcgatgccgtcgaagccgacctcatagtacgcgcgcatcgcctcgtacatgtccgtaatcccatcgtcgtggaacgcctcgttgaaccggtacttgtcgccctggatgtcgcggaagtggacaaagtagatcttcttctgtgcaccgaagtgccggatcgtcgcaggaacgtcctcgcccatggtggcaaagcagccctggcagaaggtcatgccgttgcgcgggctgtcatagagggaaaagacccggtcaaaggccgcggcgctggtcaggatgcgggagatgcccatcagctcgtccacgggcgggtcgtccgggtgcagggcgaggttgacgtccgcctcctcgcacacggggatgacctcctgcaggaagccctccagcgtgctccacaggcgctccttgctgatcttgccggcccaggtatcgggcgcgttgcgcacatcctcgatgtcaaaccccgtcacggtcgcgcccccgcggttgacgatggccatgtgcgtgcggaaccagttgagcacgggcatccagttgtagcacacggtccggatgcccagccggccgcagttgcgcaggaaggtcttgaagttctccagctcctcctccacgccgggcaggccgagcttgaccttgtccagcgcgggcgggccctcgatgatggacagctccagccccgcgtcctcgtaggccttcttcatggtcagcaggttgcggaacgaatagcttggcgatccgggcgcgtactgcgacgcgccgctgatgacgtagcgcagccccagctgcttttgcaggtccaccttggcccggtcaaagccgccaaagtatgccagccccagtttcatcgtttcttcctcctcatctgtcggggaaagaagggcggcgcttggccgcgccgccctctccctctctcggttatttggtatagaccttgggctcggactcggtggggatttcctcgatcatgctgttcagctcgtcgaggacgggctggaccttgggctccatggaggcgatccactcgttccagagcgtgggcagctcctcggcagaggccgtggtcagcagctcaatcatcttgtccgaaacctcggtggtgaagttgccggacttgttcttgttctctgcggagaggtaagaggattcgtagtcgaaggtgcgcatgaacccgttgtcgcgcaggaattcgtacttgtagttcgtatcctcgacgtactgctcgggataggtgacgttgggcgcctgctcattggagatgcccgccgcgtaccagttgaaccagctgccgctgttgtccgggtaggggctctgctgcgtgccgggcaggagcgtggattcgggccacaggcacttgacctcgccgttctcgtcgtactcccagtccgttccctcgatgccgtaggcgcggaagtaggttccctcctccgagagcatccagtccagcatgtccagccagcgggtcatcttggcctcgccgatattggcgctcatgacgaccgcgccccagtagcactggctctgcttgcaccacatggtgccgtccgggccgatgacgaaggccagcgcgccggcctcgttctcgtcaatgtccgggaagttctccttcagggccttgcgcatgctgtggacgcggcccacgtcgaagttgttgaacacgctgcccatcaggcccgccttataggtgtcgtccggggtctggccgaggggattgtccggccaaatgatgccctggtcgtagaggtccttggcgatcatgaggccctcaagggtctcgggacgggccgcggtccagacgtactcgccgtccttgggcgagaaggcgccgtagccgtactcggccgaggtctggtagatgccgaaggcgttggggaagtagaagagctccgtgcccatgccgatggtcttgcccgcgccgtttccgccggggtcctgttcgacgaaggccttgttgagcgcgacccactcgtcccaggtgtagatgtcgccctcctggtagaggcccagcgccttggcccagtcgcgccggtacatccagctcatgccggacatgtagtcgtactccgggttgttgcgcaggcaggggtgagcgtactgcgcgccattgatggtcatcagctcatcgccgacgttgctctcgatgttgtagttggcggcgatattgggccacttggcctcgagctccgccatggccgggtaggcctggaacatgccctggttcacccagttggcgtattccgcaaacatggactcgtccaggtccatccacatcaggtccggcatgtccccggaggagacccagaggcgcgccttttcatgccgctcgttaaacgtcatggggatgagttccatctccacgttgaacttctcctggaagtagtcccaaagcgcggtgccgggcacggcctcggcgttctgcacgttggaggagatggtcagcttctccgagaagtcgggcgtataggcgccgtcctcggccggtgaagaggcctcgcttccggtctggccatcggtctgagcgggggactcggcgggctccgtcgcagtcggcgagcagccggccagcaacagggcgcacagcgccgtcacaagagcgatccagcggacgatccttcttgtcatgtgtaaaacctcctatatgttttgtcggcggctgcgccgccgaaagtggggacgcgctatcccttgacggcgccaaccgtcaagcccgtgacaaagtacttctgcatgaaggggtagagcaccatcaccgggaacatggtcacgatgacggtcgccatcttgattccgtcgccaaagggcttaatgccggcgtcctgcatggactccgaggcctggatggtctgggaattctgcacgatctgccgcagcacgagctgcaagggcatcttggtggcgctcttgatgtagagcaggccgttgtaccactcgttccaccgctccacgccgtaatagatgacgaaggtgatgaccatcggcagcgccagcggcagcacgatgcggaacatgatggtcaggtcgtttgcgccgtcgatcttggccgactcctccagctcgtccggaatggatttgaagaacttgcgcatgaccatcaggtaggagatggagacgccggtgggcaggatcatggaccacagcgtgttcatcaggccaaagtccttgatcatcatgtaggtggggatgagcccgccggagaagtacatcgtgaacatgatcaaggcaatgacggccttcttgccggggaagctgtggttcagcgcataggccatggtcaccgtcaggaagatgttgtacagcgtgccaaagatcgtgatctgcacggtcgtccacatgcccatccagatggacttgttttcaaacacgtactggtacgaggaccaatccagcgccttgggccagagcatgaacggctcgcggatgtagaccacctgcggcgtcatggagatgagcacggaattgtagaacggatagagcaccaaccccgaaaagaccagcagaaaggccaggatgcacacgtccgttgcggtgacgcgattgagcttgctcttcctgcgcggggtcagaggacgggtttgcgtctgtgcggtcatgtttcttctcctttcccgtcaaaacaggccttcgccgttgaacttgcgggacacgacctccgccgagagcatgaggactgcgttgaccacgcccttgaacatgcccaccgcagtggatacgccgtagtccggcgccttctcgaaggtgatgcggtaaatataggtatccaggatgtcgccgacctcgtagaccgcggggttgtacaggttgagcacctgcatgtagcctgcgtccatgatggagccgatgcgcaggatgaacgtagcggtcacgatcgtggaaatgcccggccaggtgatgtagcggatgcgatgccagcggtttgcgccgtcgatcgtcgccgcctcgtagagtgcgggatcgatggccgtgatggtcgccatgtagaggatggcgttccacccgctctccttccacaggagcgagaagatgagcagccagcggaagattcccttgttcatgaggaagttgaccttctccccgcccatggccacgatgatgttgttgacgaccccgctgtttcccagcagattggtcaggatcgaggacaggatgacccaggacaggaagtgcggaaaggtcaggatgatctgcatcacccgcttggtctttttctggcgcacctcgttaaagaggatggccaggatgatcgggaagggaaagacgaagatcagctgcatgcccgcgatgatgagcgtattgcgcaggctgttccagaaatccgcctcggcaaagatgaagcggaagttctcccagccgatccaagggctgcccgccacgcccagatttgccgcgaactccttccaggccagctgaatgccgtacatggggacgtaccggaagaacgcgaagaacagcaggcctggaacgagcagcaaatacatgtaccggctgtcccaaatgttcttcagcaggcgcttcctccgccgcgccggcgtcagttggaagcgcgccactctcgcttgcgccattgaatcctcaactccttatggccaccgcctttttctgtttacaccgaaatcttaacatgccgaaagcgcctgcaccatggattcatctacaattcatgtggagggatctacagcctttgcccccgcgcgccgcgggacggcaagaaggccgaggggcgctgctcgcgtccctcagccctcttgctgatatgggtttgggtatggggtatgatggatcttcctcctccggaggaagcagaagatcctcgatggttgtgcccagcgcccggctgatgccgtacatcttggacacggatggattgcagtcccgcgtttccaggctccgcaggtagcgcacgctgatgtttccgcgctcggacaggctctcctgggtgaggttttttgccctgcgcatggcgcgcagcttttcgcggtcgacaaccgctcgcctttcctccccctcttccatccagcgctcagaggggcggaaatctgccgccgtgctccggcgcgcctgcccgcgtgcggacggcgaagaatttctcttgctcataagaaagcatccatttctccctgggataggaagaggcaaaagttttagccctatgataacaaccctttttcttgcccgttgtcgtatacggaattgcgatggaggtgattccatgatcggcaaaaagatcgcccagctccgcacgcagcacaaactctcgcaaaaggaattggcgcgcagaacgggcgtcagcgttgcaacggtcaagaattgggaaggcgacagctccgatccctgtctggaaaacatcaagagcctgtcgaacatcttcaacgtgaccaccgactccctcttgggccagaacgagaatcttcggctctaccatgaggagctggaggaagaggacatcgtcctgctgaaccagatcatccaatacatggtcaaccagaagcaccgcggcgtgcgcaagaggccctaggcgcataagagcggcggcagtccccttgcgttgcggaagactgcccgctcttttttactttgccttcttccgggtggcaggaaccttggactcgtaggagcccttgacgctcgccgcgcccgcgatcgcgttcttgcggacgacatccgcgacgatcttcagcataccgttcatctttcacacctcctgttcacgtttgcatatagtatacaggtcttttgcatggatttccattcttttccatttcggcaaattcaccgtccaattcagcgcagactgccccaaagggcaggcaaaactctaccctatgcggggccaatagcttcgcccaattctcctgtctgtaaattttgtcagaaagatggtatacttgtaacgtaaaatatcttccaccttttgggatgggcgaatgtagggcatggaatggtcatcgcggtaattctcgtcacatacttcatagaccatgttctcgataggaaatatccgtggatttggccttcgttgctttgcgcctccgggtttggaatttgctgttcaacttatttattcttagacatgccgattatagatacgtggatatttctcttcccattgttctattctgtttttttcttttcaaattcactcaaagccaaaatcctatggaatactattctattggctttgttttacggcatcgcaatactctgcacatcgattttctctaaggttttaagcccttcttcaagctatttggaaattggttcagcggatcgtgttgcctttgtcgtatccttcaacgtcagccttgccgtttcgctctactttgtcacgcgccccaagcgctccccgcgcgtgggcgcatgggtctttgcggtctttgcccttttgaattttctggtcgcggacatcatcgatctcctctttctcctgcgttccagtgaaaacctaaacgattccgtgctgcttctggccagcgccatggctctgggaatttctgcgctttcggtcttcctctattccgccatgatgcgctacgcagagcgcgaatatcaaaaccgccgcaggatcgaccagctcaaccatgccggagcagtgcctgcagaagctgcgctccacgtatgactcgctgcacagcctgcgccacgatctcaagaaccatctgcgcatcgccgtggagctcgctcgcgtgggaaggatctccgagagcgccgactatttgcagaagatcgacgcgcgcatcttctccgttttctccacgggctgcatctcgctggactccgcgctgacggtcaaggagctgcagatgcgccaaagcggcatccgcttcgagcgccagctctgtgccctggaggagacgcccatcgaggataccgagctctcgaccatcgtcatgaacttgctcgacaacgccatcgaggccatcctgcggcacgcgtcgccgcccgagagcccgccgatcgccttccgcatccagcgcacgcgcgagatgctgctcatcgaatgccgcaatcccgtggacgcggcgacgatccgccggcgcggcgagcgctttctcacctccaagtccggaagagggcacggagtatttcattcgaaaggggatcgtccccgaggcggaacgggaggtctgcgaatacggctttgccatcacgatctgcacgatcgcaagcgccctggggttcctgccgctggggctcctgctcggccagttcctcggcggcgcggtcctgatcgccatcttacacctgtcagtcctccggcggggggtatcacgcctcggccctgttgacaaaagcgccataggatacagcttagagctacgtcctatggcg

SEQ ID NO: 2487 - DNA, 8969 bp, Unknown
  16S sequences of unknown bacteria
catcgacgcttatatccccgatcccgcgcgcgaaagcgacaagcctttcctgctccccgtcgaggacgtgttcaccatctccggacgcggaaccgttgctacgggccgtgttgagagaggtatcgcgaaagtcggcgatcccgccgaaatcgtcggactcatcgagaagccccgcacgaccgttattaccggtcttgaaatgttccgtaaaatgctcgacgaagcgattgccggcgacaacgtaggcgcattgctccgcggtatcgacagaaaccagatcgagaaaggacaggttatcgcgaaacccaattccattcaccctcataccgatttcgaagcgcaggtttacgttttgacgaaggaagagggcggccgtcatacgcctttcttcaacaactatcgtcctcagttcttcgtaagaacgaccgacgtgaccggttccatcaaacttcccgaaggcgttgaaatggtcatgcctggcgataacgtgaaaatcgacgtttccctcatcaaacccgtcgcggttgaagaaggtctccgtttcgctatccgcgaaggcggcagaacggtcggttccggcgttgtttccaaaatcatcaaataattccgtttgaatcggatatgaaacggctcgctttttgcgagccgtttttatcaaaccgggagtacgagcatgacgatccatcacgataaaaaagcatacggcaaacttgcttctctttgcgaggagttctcggaagaacggcttgcggaaatggcgcaaagcctttcggcggaaaacgaaaaggaggaacctatgcgggaatatgacaagatgatacgcggcgaattgtacaacgccgcggacaaggaactgttcgccatgcgaaagcgcgtgcgcgaactcatgtacgaatataaccattcgcgcgaggacgaaacggaaaaacgcagaaagatcatcgacgaactgttcggcgcgcacggcaaggacgtgtacttcgagccgcctttccgtttcgattacggcaaaaatacctttatcggcgacgacgtgtacgggaatttcaatcttacagttctcgattgcgcgcctgtacgcctcggaaaccaggtattcatgggccccaacgtgacgctcgcgacgcccgtgcaccccttgctcgcctgcgaccgcaatatgcgcggcgaagagggggcgaaatacgactacgagtacgccaaacccatcacgatcggcgacaacgtgtggctcgcctccaacgtgaccgtttgcggcggcgtaacgatcggagaaggcagcgtgatcggcgcgggcagcgtcgtcacgcgcgatatccccgcgggcgtgatcgcggcgggcgtgccctgccgcgtgatccgcaaactgaccgaaaaagacaaaatgcgcatgccgaatgaataaaatcgcgcctgcaacgcctgtcggatgaatttccgacaggcgttttttcatacaaaaatcgactgcgtgcggcaaagttaaccaaaaaatccgtcgggcgcagccttataatggggatactttgaaaaagggacgggcttcgtaaaagaaggatcaacgataaggggaaacgatcatgcgatgacggtatatctggatctcatcatcctcgacaacttcgccgccgatttcgcgcttttatatctcgctgtgaaaacggcgcggggagaggtgaaactttggcggctcgccctcacggcgctggcgggtaccgcgctcgccgtgggatatacggtgttcacgctctattatacgctgccgcccgcggttgagattttcgtgaaatacggcgtcgccgcgctgctgcccgtctttgcgtcaaagtacaagaaaaaaagcacgctcgcgatcgccgtcggcgcctttctcgcctatatgttcgcattggcaggccttctgactgctctgttttccgatccgcagatcgaagagggcgggggcgcgctcacgtatacgatcggcggagtgccttcgggcgttctcgtcgcctgtacggtcctgttcgtcgccgcggcgaaaaagacggttgcgaaaatcgcaaagcggaaaaagatcttgtccctcgtcgtcgactgttcgcttttttatcgggaaaatcgagtcaggacccgcgcgtttttggacagcggcaacatggtcacggcgcccgacggcacgttcgtggcggtggcggaaaaagcgctcgccgtcaaactgttgggggaacacctctttacgggatctacgaacggtatcaggatacccgtggcgacggtaagcggaaaaagtttcatgaccgccttcaaaatcgacaaaatcgagatatattgcgacgggacaaggaatataatagaagatgtgacgttgggaatcagccccgacggagtgcacggggaatacgacttgattctgccgttcgactttgtgcgggagcaaaaataaaaaatcgtggaggcgtgagatgtttggcaagataatgtcgtcgcttaaagattttttacagaagatgagtataagcgacaacgtaatggattacatatgcgggagcgaggcgttgcctttgcctttctcgcccgaagaagaatcggatatgctcggaaaactctctttgggcgacgaagaggtgaaatccaaactggtggagcacaatctccgccttgtcgtttacatagcccgcaagttcgacaatacgggcgtggacgccgacgatctgatctcggtgggaaccataggactcatcaaggccatcaattcctttaaaacggacaagaatatcaaactggcgacgtacgcctcgcgctgcatcgagaacgagatactcatgtatcttcggcgcatggtgcgcctcaaaagcgaagtgtcctttgacgagccgctcaataccgactgggaggggaacgaactgctcctttcggatattttaggtacggacagcgacacggtgtacaaggacatcgaaatgagcgtggaaaagcaacttttgcgcgacgcgctgaaaaagttgcccgagcgcgaacaaaagatcatgtatatgcgtttcgggctggcgggccacgaggaaatgacgcaaaaggacgtcgccgatcttctcgggatctcgcaaagttacatatcccgtctggaaaaaaagatcatatcccgtctgaaaaacgaaatgagcaaactcgtttaagatcgtgaaagaattctctacataaaaaatatacggttgcgcatactgccgaaagaggtcgttacatactttcggaggtgaaatcgtatgatgcaaaaagtagagatatgcggcgtgaatacttcgggacttcccaaactcacgcagaaggaaagcgaggagctgatgaaacggctcaaagaaggggacgaagaggcgcgcgaacagtttgtcgtgggcaatatgcgcctcgttctttcgctcgtcaagcggttttgggcgaagcgcgccaacgcggacgacgtgtttcaggcgggctgtatcgggctgttgaaagccatcgataatttcgatctccgcgtgggcgtgaaattttccacctatgcggtgcccatgatcatgggcgagatcaagcgttaccttcgcgacggcaattctctgcgcgtttcccgcagtatccgcgataccgcgtaccgcgttttgaaaacgcgcgagagcatcgaggagaaggacgaagaggcgaccatcgaaaagatcgcggaaaccatgaacgtcgccctgaaagaagtcgtctacgcgctggacgcgatctcggatcccgtatctttattcgaacccgtgttcaaccagtcgggcgacgcgcttatgctgatggatcagatctacgacgaaaagaacaacgacgaagtgtggacggaacacgccgcgctctccgaggcgatgacgagattgggcgagcgcgagcggaaaattttgttcctgcgctactacgagggcaagacgcagacggagatctccgacgaagtgggcatctcgcaggcgcaggtctcgcgcctggaaaagaacgccatcaacgccatacgcggcaatatcgtatgcgactgttaaatgaaaataatcgaaaagacgggcttcgcccgtcttttttctattcgggagagcgcacggaactgcgctcgacgagaacggtgggaacgcgcacgacgtaatccccggcgggcacgcccttttccaactggcgcaaaaccgccgtcagagcgtttcgggcgatctcgccgaaattctgcccgacggtcgtaatgttttcgctgatggaggcggaaagattgtcaaaacccgtcaccgacagatcgcgcggcaccgaaagcccgcgcgcctcaaccgccgcggcgaaacaatgcgcggaaacgtcgttcacgcagacgacggcggtcggccgctgcgccgcatgaaatataacgtccgccgctctttttgccgactgaaagtccgcggagatgacgtcccccgcgctgcgcacgggcgaaagactgcccgcaagaaagtattcgggtacgatcgcaatgccgctgtcgataagggcggcgcagtagccgcggaaccgctccgcttcggtgggcagaaacgcgtcgctgtacggataataggcgatctttctgtgtccccgcctgatcagatactgcgtgagcgcgtacattccgccgaaattatcggaggtcacgaggggcgcgcggatacccgaaacggcaaaatccagaaaggcgagggggatcttatgtagcgagaactggctgagaaggtcgatgttcgacacgcgcccgaggggcatcaggatcatgcccagcacgttctgggtgagaagaaaagagaggatctcccgttctttttcgggcgagcgttcggtatcgaaaaaggacaggctgacgcgctcgcgttcggcgagttccctcagcccgtgatagatgcggttgccgcagttttcgaagtgcgggaaaaccacggcgacgaacccgcgcgtctgccgcacgaaaagatcctgcgccgcaaccaccgtgccgcgccgacggatcctttttacgagtcccttttcccgcaaaagatcgagcgcgtgtttggcggtgatacggctcaccccgtgccgttcgcacaattcctgttccgacggcagcacgtcgccgtttgcatacttgcccgatttgatggcgtaatacagttcttcgtagatcttcttatactttccatgtctgtattatatcataaaactattatatgatatatattattttaaaaaaatatgaaaataaaaatattatgtattatagtgtttcgcgcccgcccttgtcggacgcgggaaaacatggtacaatcgggatatgaatacgattaccgtcgcgggctcggctctgaccgaccttgtcaaaacaatcgacgcgtatcctcaacggggaatgctgaccgatatcactgccgtgcggcagtcggtgggcggctgtgtgcccaatacggccgtcgatttaaagcggctggcgcccgaactttgcgtcacggcggcggggcgcgtcggaaaggacgcgttcggggcatatcttcgcgaaaggctcgcaggagaaggcgtgcgggccgcgttcgcggaggacgagaaacgctccacgggattcaccgacgtgatgacgctgaaaaacggcgaacgcaccttttttcacgcgcggggcgcgaacgccgctttttccgcggacgatctgcccgaagaggcgctcgattgcgatttgttccacctcggctatttgctcttactggatcggttggacgcggcggacgcggaatacggcacggcggcggcgcggctgttgcattcgctgcaacgaaaagggattcgcactgccgtcgacacggtcagcgcggagggcggcaagttcaggcggatcgtcggtgcggcgctcgcctgtaccgattacgccgtgatgaacgagatcgaggcggccgcggtgacgggcgtccctctccgcaacggagataaactgatcgcagagaacctgaaagaggcgtgccgcgcgctgttcaaagcgggcgtttcgcgcgccgccgtcattcattgccccgaactcggatgcggcatggacgaaacggggaacttttgcgtcgtgccttcgctcgatcttccccgcgggtatatcgcgggcgcggtgggcgcgggggacgcgttctgcgcgggcatgctgtacgcctttatgaaaggactgccgatggaagaagggctttcgctcgcctcgctttgcgccgcctgcaatctttcctccgacgactcggtgggcggcgcgcgctcccttgcccaaacgctggcgttggaaaaacaatttaaaaggagaaaattatgatcacgaaacaggaatacgaacgcgccgccgcatatacgcggcgcgcgctgaaaaacgcgggtatcgctattacggacgaagaggcgcggcgcatcgaaatcgccgatttcgggttgggagatttggataatctcggcttgcaactgctggtttacgtcaataccgagcgctgctgcgccaaagaaatggtgctgcgccctttccagacctgccccgaacacatacataacggagggttagagaacgggaaaccctacgaggggaaagaagagactttccgcgtgcggcgggggacttgttatctctacgtttcgggcgaagggcataaagaaacgatacgggcgcgcgtgcccgatacggaagtgaccgtctttcatgagatcgttctgcgcgagggagagcagtacaccttgtctcccggtacctggcattggtttcaggcgggcgaagagggcgcgatcatcagcgagttttctaccaaaagccgcgacgaggcggacgtattccgcgatgcgcgcgtgcaaagaacgccccaaatagaggagtaggatatgcttgtcaatttaaaagaaattttatcgctcgcagagcgcgataaaaaggcggtgggcatgttcaacaccacgggattcgacagtttgcaggcgatcgtcggcgcggcggaagaactgaacgagcccgtcattctcgcccacgcggaagtacataacgcatacaacgatatttcgtacgtgggtcccgccatgctcgccgccgcgaaaaacgcgtccgttcccgtatgcgtgcatctcgatcacggcgtcacgaaaaagatgatacggaaggctcttcgcatcggctttacgtcggtgatgatagacgcctccgcgtatccctatgcggaaaatctcgcaatcacgcgcgagatcgctgaggcggcgcacgatatgggcgtgagcgtggaggcggaattgggcaggctcgtgaccgccgagggcggcgaacagttgtcgggcggcaatgcgagcgattattataccgaccccgacgaggcggcggcgttctcccttgaaacgggcatcgacgcgctcgccgtcgcgttcggcacggcgcacggattttacggcgcggaaccgaaactggatttttccgtcgtcgaacgcgtcgcgaaggcgaccggtctgcccctcgtgatgcacggcggcagcggcgtaaacgaagagggattcgaaaaatccatacggagcggcatccgtaaaatcaactactattcgtacatgtccaaagcggggttcgacgcggcgaaagcggccgtgctcgggggcgggagccgctatctgcacgacgtggaacatgccgccatgctcgccatgaaagaggacgtaaaacgcgcgatccgcgtattctcgcgcaaaaattgaaatttgaacccgctttcatagaaagcgggttttttcatttcggaacattgcggcggcctcgcgcatacaatgataagagggaagttatttttgcgggaggtatcgagcatggaaacttcgttttccgagttaaaacaaaaggaagtcgtgaacgtcgtggacggccgcaggctgggcaggacgtgcgatatcgtatttacatatcccgaagggcgggtgtgcggcatcgtggtgccagggagcaaggggcggcactggttccgcagcagcgaactgttcatcgatctgaaaagcattacgaagatcggcgaggacgtcgtgctcgtcaatctccgtcctgtcgtcaaatccgactgcaagcccgacaaaaagcggcgctgcggttacggagaagcggagtacgaatgcccgccgcccccgcctccgcccaagcccgatcggagaagttacgacgaatacgaataaccgttgacaaaattattattttgttctaaaatgattttatcattttgaatggaagggcaaagcgatgattttggaaaaggttgacttatacgaatatttcggccgcgaaagatgcggcaaagaaaaggggagtttgaccgcttatctgcatacgccgatccgtgaaatgggcataaaggaacgccgccccgcgattctcgtgatcccgggcggcggctacgctttcgtgtccgggcgggaaggggaacccgtggcgcttgcgttttacgcgcagggattcaatgcgttcgtgctcgattacagcgtggcgcccgcgtttcattatcccgcgcccctgctcgaagcgggcatggcgatgctgtatatccgcgaacgcgccgaggctctcggctgtacggaagataagatcgccgcgatcggcttttcggcgggcgggcatctggcggggctcatctccctcttttatgaggataaggcgcttatagaggcgttcggcggccgctgcaagcgcatccgtcccgacgccacgatctacggttatcccgtcgtgagcaccgaaaaagtgaacattcacgaggattcctttgtcaatctgtgcggcggcgctgtgcgcgcggaggattattctctggaaaaaaaggtcgtttcctcgtcttcgcccgcctttatttggacaacgatggacgacgagggcgtgccctgtttcaattcgttcgtgctcgccgaggcgtacgcccgcgcgggcgtgccgtgcgaactgcacgtgttcgaacacggcgatcacggtctgtccacctgttcgttcgacgtattgg

SEQ ID NO: 2488 - DNA, 32759 bp, Unknown
  16S sequences of unknown bacteria
gtggtatgctgtaaaaaagctgttttttccggtagacagcggcgtgccgcttcactttaccgcccagctcaatgaacggaggatgataatgaaatatatcaatcaactgctttacgaaaatgttccatatccgaccgatgcaaaaaatccggacagccctatgctgggcgggagtattaaacgagctggctgtggtttgtgttgcctatgtatggtggttgattgcctcaccacgcaatctctgcctctggaggaatgccgtgatcttgccattatgcataaagcgaatcttgatcccgggaccgacttaaaagttttgagtcctgttattgcccaaaagtatagtttgaaatattccagtaccaatgattctcaagagatgatccactgcctgcaaaacggcggctgtgcaatcgccaacgtaggaggagaccgggatgacggcaactatatcggcgttttttctcacggtgggcattacattacggtaatcagcgcaaacgaagcggaactatgcattcttgatccctctttgaaagacggtaagttcgaggaagatggacgaaagggtaaggttcgggtagaaggagattttgtttactgtgatctgaaagtgctggagcaggatacggacaaccgctctcccagttattatttattcacccgttaaaacacataaaaaggcggccgctggccgccttttttctttatcctcgttacaggacagaatacaattctttcaggtattttgtgagctttagattttcgccgtagtccactgcgcagtctacaatactggggactttttgcgcaaatgcttcttccaaggtaggaatcagtttttccgcctgccgaatacggtagccttttgcgccgaagctttcggcaaattggacaaaatccggattggtaaaatccacatagcggctttttccgtattgatccatctgtttccatttgattaaaccatagctattatcgcggaaaattaaggtcacaaagggatttcccagccgcatagcagtctccatttcctgacagttcatcaaaaagccaccatcaccggtcacagccaaaacctttttatccggattgattaatttcgctgcaatcgcaccaggcaaagcaaaacccatgctggcaaacccattggaaatcagacaggtattcggctgataacaatgatactggcgggcaatccacattttgtgcgcgcccacatctgaaagcaaaatatcgtctggtgcaagaactttccgcacatcgcttaaaactttttgaggccgcatggggaaactcatgtccgcttcataagcagcatattccttttccattttcagtttaatttccctcgcgtaggctgacgaaaaaggtttctccatctggcttaaaatactgcgcagagagacagaaatatcgccaaccacttctaccgatggctgatacagcttgttaatgtgggcgggtctggcatcaatatggataatgtttttatgctggtcgctgttccactttgccggtgcgtattctacaatatcatagcctactgacaagatcagatcggcgttttccaacactttgttggcataatccttttgcgggataccaatggtccacaaacaatagggattatcgaacgggatgatccccttggccatcatagtatgaataacaggaatatgcagtttatttacaaattccaccatcgccttgctggcactgtttcggacagcgctgctacccgccagaataaccgggtttttcgccatcatcaaccggataaccgcatctttgacgtattgtgaatctggaatttcaatcggcgctgtctgtttttccagcggctcctcccctgagctaacggacattttagaaacattgaccggcaaatcaatgtggcaggcgccgggcttttcgctttctgcatatttaaaagcaattcttacaatttcgctaacggtatccggaagaacgatttgtttggtacgtttggtgatcggttcaaacattttgcaaagatccaaaaactgatgggaagtcaaatgcattctctctgtccccacttgcccggtgattgctaccagcggggcgccgtcgctggtagcatcagccacaccggtaaccagattggtagcgccagggcccagtgtcgacatacaaacaccggccttatgggtcaaacgaccataaacgtcggccataaaggctgccccttgctcatgtcgggtggtgataaaacgaatattagaatgggaaagggcctccataatctcaaggttttcctctccaggaatgccaaaaatgtactccacgccttctttttccaagcattttaccaacatttgcgctgtgttatattttggtgtctgatcttcttcccgcatcttaaactcctcctctgaatttggatagcaagttatgtattactgtatacaaatattctttatgcattatatcacacatgaaaccccttgaaaatccctttttcaacaagatacaaaataaattaaaaaacaaaatcacgggcatagtatctgcccaagcattcttttttctgatcgatacatatctcgtcaacagggaaaaaacaattggcaagccaaagggaatacaccgtgtaggagaaaaatttcaataattttcagcgtttcctagctgattttaaccataaaaaagcctccctttttcattcgggaggcttttggattttatttatattaagcagaataagaacggttcggacgaatgatctctcctacggtatatacggttacaaaagcattaggatcttcgcggtgtaaccagttcaacaacttggaatattcgctatggttgacaatcgtgattacttctgttcgtttttgccggttatacgcaccggtagcctcatacaacgtagcaccgcaacgcaattcttccaataaaaaatgaagcaaaacttcctgcttttcagaaatgatacaaactcttttacgggtgttaaggcccaaaataaaatgatctaatacaatgccgttcagatatgtacccaagatactgagaaaaacgattttagtatcatacacaaaagctgaggttaacgcggcacacagaccggcaatcgtcatagcttttcccaaatcaatatgcagatacttgttcaatatcttggcaatgatatccaacccaccggaggaggcattgagattaaaaagaatcgccaatccaatgctgaccacaaaaatatagccaagcatatccaaaaaggaatctccggtcaaagactgctgattagggaacagctcttctaaaactcctataaaaaacgggagcaggatagaagtataaatcgtctttccgccgaaatcccggccaattgtaagaaatcccaaaatgagcagaacagcattcagtgcaaaagtcataacggaaatccggaacggcagaaaattagcaagcacaaccactagtcctgacacacttcctacggtcacatgactgggtatcaggaaaaaataaacagcggccgctacaatcagcgtacccagcgtaatagcgatatattctttcagcaaagcctttttatccatgctgacattcctttcgcactttcttcttgggtttggaaaaaatgattcggaaaagctctcacagagctggtttttgtctctattttgtagagtattataatatttttttcggcgttttgtcaatctataaaatccatattttgtggtgatgtgcaaatggcttttcatgtgctgcgaacgcagattttcccatttttgaacaggttcgaagtaaatgcgatccttttcttttgatcaaaaccttcaaattctgaaaaataatcaaaaaatcacaggcaggaaaatttctgcctgtgaaacgtgtcttcctatttgtttttaagagcctatttttccagtccaatcactctattctgccatatttacgaaagcgctcatatcgggcggccagcagctgatccggattttgcgaagctttctcccccagagttttccaaagcagttcttccaaataggcaaaaatctccggaaaacttagtccttcttccgggatgatacgctcgatcaccttcatctgcttcatatcctcagccgtaagtttgaggcattcggctgcttctttatttttttttgcgtctttccacaggatgctggcgcatccttccggtgaaataaccgaataaaaagcattttccaacatccagacttcatcgcccacagccagcgccagtgcaccgccgctgccgccttctccgatgagcacagcgataatagggacgcgaagtcccatcatttccatcagattttccgcaatcgcctgcccctgtccccgttcttctgcaccaataccgcaaaaggcaccggaagtatccacaaagcagattaccggccgatgaaacttttctgcctgccgcatcaggcgcagcgctttccggtatccttccggattgggcgagccgaaattgcggaacaccttttccttcgtattaccgcccttttccatggcgataaccgttacaggcctgtttcgcaagcgcgcaataccgccgacaatagctgaatcctccgcaaaacggcggtcgccgtgcagttcgataaaatcggtaaaaatccctttgataaacccgattcctgacgggcgccccttagctcttgctgcctgcaccttttcatatgccgttttcatttgctcatcccctttcgtgcagcatgagcagcctagtcagcaactttttttggctggctcgcggcgtaatacggtccacaaacccccgctgcaccaaaaattctgcccgctgaaacccatcgggcagcttcttacgaatggtctgctcaatcacccggggacctgcaaatccgatgagtgcaccgggttctgccaaaatgatatccccttccatggcaaagctggcagtgactccgcctgtggtggggtcggtcaaaacggtaatatacaaattgcccgcatcgctgtggcgttttactgcaccggaagtttttgccatctgcatcaaagataaaatcccttcctgcatccgggcaccgccagaaaccgtgtaccccactaccggcagcgaatgctcggctgcatattcaaacaagcgggtgaccttttctcccacaacggttcccatgcttcccatcataaaagaaggctccattacaaataaagcgcagttttcccctccaatggcagctgtgccgcagacaacagcctccttttcgccggaagccagtctcgcatgtttgagctttttatcgtagcccggaaaatggatcacatctttggcgcgcagatctgcgtccatttcgcaaaaactgccggtatccgcaataaaatcgatccgctgccgggcattcattcgaaaatggtacccgcagctgcaaactaggttattctcccacagttcgctggtcggcaccgattttttgcaggcagggcagatctcaccgggttccgcatggatttccgccgcagcgctgaccggtgtacgtccgcctttttccaattcgtttttcggctttttaaaaaatccctgaagctgcataaaagctactcacctctttttgccaaaaagtctgtatggtagtctccggccaaaaaatccggatcgctgataatctccagctgctcatccaaattattgggcaccccctccaccaccagttcacataaagcggaattcatcttccggatggcctcctccctggttttggcatagacaatcagcttgcccatcatcgaatcataatagggcagcatctcatagccctgatacaaaaaggtatcgaaccgcacccaagggccgccgggcacatgcaaaaatgacaccttaccgccgcctttggcgttaatgcgacactcaatggcagctccggtaatccggacatccttctgtttgaaatttaaaagaaccccacaggcaatccggatctgccatttgacaatatccacgcccgacacatattcactaaccggatgctccacctgcagccgggtgttcatttccataaaataaaaattgccttcatcatccagcaaaaactccactgtccccgcgttggtatagcctgcggcttttgccgctttcgccgccgcttcgcacattttttcccgcagagccagggaaatcgccggagaaggcgcctcttccaaaagcttttggttcctcttttggatggaacattcccgctctcccagacagactacgctaccaccctcgtcagccagcagctgcacctcaatatgcttgaccggagaaaggtatttttccatgtatacgccgccgtcgccaaaggcattcttcgcctcttccgacgcagttaaaaacgcgttctccaattcatctgggccgtttaccagccggataccttttccgccgccgcccgcacgggctttgatcaaaaccggatacccgatcctgttcgcttctttggccgcctgagtgggagaaatgaggatatcagtgccgggaacagtggggacgccggcatttttcatcagtcgccgtgctgcatctttatctcccatttgggaaatcacatctgcgctggggccgatgaataccaacccgtttttttcacacaggcgggcaaaatcagcattttccgccaaaaatccatatccgggatgaatggcctgagcaccggttaaaagcgccgccgtaatgatatctttttggcgcagataactttcgcccggcaatgccttgcccacgcacacactttcatctgccagagatacgtgcagcgattctttatcagcctgggaatgcaccgccactgtggcaatacccatttccttacaggcgcggataatgcggaccgcaatctctccgcgatttgcgattaaaattttcgaaaacaatggctcacttcctcacaacagcaaaagaaaaatccccgctcacggataattttccgtttacatagccttttccgctggcaaaataaaacgggcctttcgatttggtaatcacgcactcggtttccagcgtatcaccgggccgaaccggatttttaaatttcaccttatccagactggtaaaatacggggtggatccctccggcagtgattcagacagcagtacgcaggtggcctgggccatcatttcgcacaaaatgacccccggaaccaccggattgccaggaaagtgtccctgcaagaaccactcgtctccgcgcactgtgtatcttccatgcgccacaccgtcgacaacctgtgcctgctccaccaataacatattgtcccgatgaggcagaattttcatgatttcttctttgttcattgtgcttcccccactaagaacagccgctggcccacttccaccagttggccgttgccggcataaatttgcagaatctgcccgtcgcaatcggcagtaatctcgttcatggttttcatcgcttcgatgatgcacagcacatcacctttttttacacagctgccagttttcacaaaaggttctgcaccgggcgttggcgatgcgtaatacatccccaccatcgggctttcaatgaccacgccctgctgcggtgtctcgtggaaaacttcggataccggtacagcagcaggcgctggcatcaccggcgcaaatggggtctgggccaggaccgggacagcggctatttcccgtttcattcggatggtttttccctcttctgtgatttccacctgagtcagatcgtttgctttcatgatttccgccaatgcgcggatcgctttcatatccatcctgctattcctccatccgtttgaatgcaatgcaggcgttatgcccgccaaatcccagggaagtggacagcgctgtttgtacctgcaccttccttgcttgattgggcacatagtccaaatcgcaatccggatctgggtcgtacaaattgatggtcggcggaattacgccctcatgcagtgccagcacagatacgattgcttccaccgcgcctgccgcaccaagcatatggccggtcatggacttggtggaactgaccaaaacctgcgccgctttttctcccagcgccgttttaatcgcctgcgtttccgttttatcattcagcggcgtcccggttccatgggcgttgacataaatttgcccttgggccccgccggattcttccagcgccagcagaatcgaccgagccgccccttctccgcctggtgccggcgccgtcatatgatatgcgtcgcaggtacagccgtatcctgttacttcggcataaatgtgtgcgccgcgccgtttggcgtgctcgtattcttctaaaatcaacgcgccagcgccttcgcccatcacaaatccattgcggcgtttgtcgaaaggcagagacgcttcatctggattttcagatagagaaagagccatacagttggtaaagcccgccactccaatgggagtgatggctgcttccgcaccgccagccaaaatcacatccgcatagcctgcccgaatggcgtgaaacgcctctcccacttcgttggtgctggttgcgcaggcggtggtcaccggcaggcaggggccttttgcctcaaaccggatggcaatgttgcccgccgccatattggcaatcatcatgggaataaagaaaggagacacccgtttgggtcccttttccagcagtttctgcatctcattggacatggtgatcagcccgccgataccggagccgaagtacaccccgaaccgttctggcgccactttgccaaaaatcccgctgtcctccaccgcctggcaggcggcagccatggcatactggctgaacagatcgcttttgcgagcctctcccttttccatataacgaagcggatcaaaatccttcacctgagctgctactttcgctttgtattccccagtatcaaaccgatccaaatggccaattccgtttttaccggccagaaggttttcccaaaaagcagggacatcgttccctaccggtgttactgctcccaggccggttaccactacacgtctcatgtctgcatcctcctctctacatggccaggccgccgtcgacccggatcacctcaccggtgatatagtcagagccgtttccagccaaaaataccgccaagtttgccacatcttccggctgtcccatccgctttaatggaatcattcccgcaagctgattgccttccttgtcgattttggctgtcatatccgtatcaataaatccgggagcaatggcattacagcagaccccgcggcctgccaattcccgtgctaccgatttggtcaaaccaatcaatcccgccttggacgcggaatagtttgcctgtccgccatttcccatcaggccggacaccgatgagatattaataattttgcctgcgcgttttttgacaaaaatcgggtagcaatgtttaatcaaatgaaatgcacccttcagattcgtgtccaataccgcgtcaaaatccgattctttcatggtataaaccagtccatcccgggtaatcccggcgttgttgaccaggatatccacactgcccaaatctttttggacgttctgaacagtttctttcacccgatcaaaatctgccacgtcacactgatatgcccgggcctgcacgccatatgctgccgcctgctgacagacttcttccgctgcctgcttgcttcccgcataaatgaccgccacgttggcgccttccctagcaaaagccaacgcgatcgcccggccaatcccacggccggcgccagtgatcagggctgtttttccttgcagcatcattgttccaacaccgcctttgctgttgtttttaacgtttctgcatcctcgacatgataaattttagcttccggcagcgttttggccacaaggccgctgagcgttttaccgggccccacctcaataaaaatatcaaaaccgtctaccgccatattccgcagcgtttgctcccatcgaaccggattttccatctgctttgccaaaaggcttttttcttttcctgcttcgtagggttttgccgtcagattggcataaacaggcatcctgccgggcaaaaagaaagtcgcatccagcaccctggcaaacgcttctgccgcgccggacatgaacggagaatgaaatcctccgctgaccgccaacggaaccatacggcctccggcctctttcaccatcggcttcagcgcctcgatttcggaccgaagccctgctaccaccaactgtcccggacaattgtaattcaccggatacagctgtttaaaacgtccgcacagcgattccactgtttcatgattcaatttcaaaaccgccgccatagcgctgtctgactgtttcgctgcttcatccatcaaaatggctctgcggcaaaccagagaaaaaccggtagactgttccaacatgccgccaaaagtcaaagccgccatttcccccaaggaaaaaccagcagccccatcagcccgaacgcctgcctcttccaatgccaatgccgccgccaaatctacacagaacaggcagggctgggtatttctagtctcggtcaattcctcttttgaaccgaaaaaacattgcttcgacgtatccgaacggatttggtcggccaaggcaaacaccgaggctgcggcagtagactgttccgccagctcccggcccataccgctgtactgagcaccctgaccggagaaaacaaacgctatcttacccattttttcgctccattcaatacttcttccgcttctgtaaaaatctcgcggatcatctcagcggcaggctgctctttttttaccatggcggccacctgccctgcgaggaagcagccattttgctcgtcgccttctaccgcggccttccgcagcgcgccgacgcccaaagcctccagttcttcatccgatacgctgccgtcgtactctttgcggaaatattctcgggagtaggggtttttcaagcagcgcactggatgacccaaccgtttacctgtggcgattgtatcaatatcttttgccttgaggatcttatttttatagaccggatgtacgccgcattcctctgcaaccagaaaacgggttcccagctgtacgccaaccgcacccagcataaaagctgccgccacgccgcgtccgtcggcaataccgccggcgccgattaccggcagcggcgttgcatcgcatacctgcggtagcagcaccattgtggtcaaatcccccacgtgcccgccggattcaccgccttcggcaatcaccgcgcaagcgccctgccgagtcactagcttggccatcgcgaccgatgccactaccggaatcactcggatgccggcagattgccacagcttcatatacttaccgggatttcctgcgccggtagtaatgaccggcactttttcctccgccagcagctttgctacttcctccacatggggactcatcagcataacattcacgccgaagggctttttcgtcaagctgcggcaaatatcaatttccctttttaaatagtcggttccggcattcatggcggagataatccccagtccgccaccctccgataccgctgcagccaaacggccgtcagcaatccaggccataccgccctgaaaaattggatattcaattcccagcatttcgcaaattggtgtcttgatcatcgcttattccttctcgcccattttttcttccaccagtttgaccatttctccgacggtggaaattttttcatccaattccaactcgatacccagctcttcttccagttccattaccatatcgacagtgtccaacgaatccacgcccaactcttcaaaggtggtgtccattgtcacagaagaaggatcacagtctacatggtctgccagaacggcaactaatttttcaaaaatcatttcgatttcctccaaaattttatttttaaaatatatggaaaaccagatacccggtcttaccagcgaagaatacatgcggcgctggaaagccctccgccaaatgcacaaagtgccatcagatcaccccgtttgagcttaccggaacggttgagttcatccatcatcatcggaatgctggcagctgaagtattgccataccggtcgatattgacgcagaaccgctccggcgggatattcagtcgttttttcgctgcgtcgataatccggatattggcctgatggggcaccacccagtcaatatctccctcagaaaagcccgcttgggcaatgagatttttcaaatcgtgcgtcatagccgtaacagcaaatcggaaagtttcctgtcctttcatatggatataggggttttcttgttctcttttgttaaaaggagatttcccttcaaataccggcgtacggatgacttcgtcatcccctttcgatgacagttgagagacaagataattttccccttctccaagcaccatagcgccggctccatcgccaaaaatcacgcaggtactcctgtcatcccaatccagcagacggctgatccgctctgcgccaatcaccagcatcttctttacccgtccccgggcaaaaaagcccgccgcagtatccagcaaaaacaaaaagcccgagcacgccgcgctgatgtccatagccggacaggaagcgcccagccttttctgcacgacacaggccatggaaggggtggaaaaatcagaactgattgtcgcacagagaatcatatccagttcttcagcttttaccccactttgttccaaagcggccagcgcggcctgatacgccagatcgcaggccgattctttttcacagacatggcgctgacgaatgccggtacgttcccgaatccattcgtcagaagtctccaaaaaggaagctagatcgtcgttggtcacaacttttggcggagcataacttcccgtacccaatacgcaaaaactcattttttctctcccagactttctttcaaaaattcattcagctttcggattccctgaaaaaggctgtccttttccgtatcggtcaaaccctcggcaatctttgtaaccatattataatggtacaacctgtgaaaatggtcgattcgtttcccactccgggtcaaagtaacgcgaactgttctgccatcttcattgccagtttttttttccaaataacctcttttctccagtttattgatcgcgacggtagctgtcggacgagtgatattcatagcatcggcaatctcgctgaccgtccgaccctcgtcctctccctttccaactgcttcaatcaaatgcatttccttgatggagagatgaattcgcccgctttttttcagtgctttctcctcaacacgcaggatattgtgataagtatctaccagcacctcatttaaagctatcgcaaaagcgtccatactcgttcccccagaaaattagtttgataatctaactatttgaatataacgccttgttttctttttgtcaatagataatgtatcgcccccttgtgaacaaaccatgaataaagcttttctatttttggcacaatgcgaaaattctgggaaagctttttcttttttcccgtcccgctgccatccttttgcctataaaaaagagacgggtcaaccgtctcttttttataggctatatggaaaaggagccactgttaaaccttgattgttttccatttcccggtactgtaccgcagccacaccagcaaagatcgaagcagctgatctgccgccaaagccacccaagcgcccggcaagccccaatggaatacatggatcatcaaaagtgccaatccgggacgcaccagcagtactgtcataaaagtaataaccgcagttgcccgcgtatctccggcaccgcgcagtacacctgccagaataaactgagaggcctgaaacggctggatgaaagcgataaacatcaaaatggtaccgcccagagacacaatttccggctcgtcgttatacaaagcgacaatctgatgggaaaacagtacaaagcaagccgccagacagaaggaaacaatcatacccacccagcgggttcgccggctgtactcctctgccatatccggtcggcgttttcccaaacactggccaaccagagaagtggcggaaacgccgaatgcctggccattcatgaaagacaacgcctgtatgttcatgcatacctgatgggtcgcaaacgcaatcgttcccaaagaagctaccgttttggaatagataatcatgccagcgcgcatgaccagctgttccaccatcgcgggaaaacctatcttgaatatagccgcaatagattctttatccggcagaaaaccgtctcgcaaattcagatgcagatagccgctgccatgacgcattgccgcgtaaaaagccattaccatagctaccagctggcccagaatcgtggccaaagaggcgcctgcaactcccatagctgggaatcccatatgcccataaatcagaaaataattgagaatcacattcaccacattggccacaacgttgtaaatcatggccgttctcgagtctccaactccacgcaaaacagcggtaataaccgtggtcagagccattggcaaaaatccaatcatctgaatttgcagatagattgttccgcccgctaaactttccgcatcggccgcacccataaattgaaccatccactctgatgtaaaatacccgataaatgacatcgctatcgcacctaaaaaggtcatcatcagcgcttggcgcatcactaaattagccttatccgggcgccccgcgcctttatagcgggcaaccattgccgtcgcgcccacgttcattgcctgaaatatggtcataaacaaaaactttggctgagtcgtcagcccaacggaggtaagagcccaggcacccagctgccccaccatcattaaatccaccatagacgccagctgagtcagcaaaagctctaccatggaaggccaagcaattcggataacatccgagtacatcattttgttagtaacgccctccggcagaggctttttctttttttgcaccttctgctcccacagggacaggtcttttccttcttctacaaggtcaagagccagcccacgaacctttgattgactttcattcatgccttcccgccttccgccaccggcatccagcagatctcaccacctaaagtaaaaatattcatcacataatgtattaagaatattataatacaactcataccttcggtctatgatttgtaaggattttttatttttttcgtcaagctgatgtaaaaaagcggtgcaaaactgcaccgctttctctaaaaaatcgtttttttcgaaatactttattttcttgctgggttctcttttgccgcatagtggaataaaaccaatccaatcacaaaaatcagtgccaaaatggaaattccccagttcgtactgccagtcatctgcgtgaataatcctaccagtgcagtccccataaaggaagcgccctttccgcagatgtcaaacagtccgaaatattctcccgctttctccggcggaatgattttggcaaaataagaacgggaaagagcttgaattccgccctgaaacattcccacacacccggccagcagccaaaactcccaaacctgatccaactgaatggcaaacagagcgattgccgtatacgctacaatacaaattttaatcagcgtatcatttcgatatttttttgcagcttttccaaaaatcagtgcaaaggggaaagcaacgacctgtgtgagcaaaagcgcaagcagcaacatggtggaatcaaaccccagagcgctgccgaacgctgtggccatatcaataatggtatagacaccatcaataaagaaaaagaaagccagcagaaacagaaaaatatgcttttggcttttaatttcccgaaacgttcggcagagtgtaacaaacgtatccagtatcgcatgttcccgtttcggagaataatgagtctgattataatttctcaacaacggcagcgttaacacaagccaccatgcagcgttaaggaaaaaggaaattcccattgccaccgtcatggaaatccccagcgcctcattgccaagaacaatgccaaggctaatcagaaacggcacgcagctacctatgtaaccccaagcatagccatgggaagatacctcatccatccgctctggctttgttacgtcagacagcatggaatcataaaaaatcaggctggtagaaaagcccaccttggcaatgacaaacaccgccaaaaagaccacccaggaagtgggaaaggacaacgccgcacagccgagtacgccaaccatcatgctaatggtgaaaattggctttttaaagtttttcatatctgccattgtaccaaaaaccggcccaatcagcgctacaaccaatgtcgccaccgaagcggcatacccccaataggccagataatccacttcggaaattcccgccgcttctgccagactgttgaagtaaatgggaacaatggtggctaccagcaaaataaatgcggaattggctacatcatataaaatccagtatttttccagtttggtcagtttttcttttgtcatatcttcttcctcattcaaaattccggttcaaacgttcgtcaaaatcctcgccattcgccatagcatttacaaaagccttttcctgcaaaactgcctgtggaaccgtccgccgatacaaagccaacagatgctcacaggttatccggcaccgcaggtccgggtccggctcgatcacatgctgtgtaatcgcgttatactgtcccaccagatgaaggccttttttggccgtctcacgcaacagctgatttggcatcaccaacaaatttttatagcgccgcatggcgcggatacttctgctcatatcccgtactgaaacaccaggataaaacggggcgattccctgcgccaaatcttcatcagtcggcatacagtacccaacggggaaagagaccgggtcttttccatccaacagcagcaaaagccgttcgaattccgtttcgatggcaatatgccccacgccgattttttcaatctggttgtcgatatacggatggcaggcgctgtccagcataaaatggcacaaaaagcccatcaaataagaaagctgcgaaaccttttccccaccggctttccaaatttcccgagcattttccaaaaagaatcgcgctgtttttttatgcagggatcttcccacgttgccgatcggatgttccgtaaacggattgtaaaaaaataatacatccggcccctgcaatcctacccgaaacatctggggatactgcaaaatcggctgttttaccgagagcggtaattttgcggctacttttctgccaaaggtatcgtgcgcatacatcgcaggcatcctattcctcctatcctccccaaaaagggacggaaatttcaacggtctttttcgctgttatgctaacatttattgttccggcacaggtcaaatttatgtttgaattttgtaaaaaacgcatttttcttacaagtctatgctttttcttttgatccgccctcattttgctgtgccagcaaaacgccaaaacgttccagctcctgcgatagatttccaattctccccgccatactgcccaactgccgcttcgcctctatcatttcatcccgcatctgttccatctgccgcactttctctgctttcgcctgctgaagaatttctgccgcttctgtcctggccttttggagaagttcctccgattgctgctgtgctgttttccgcatctcttcctgttctctgtgtgccgcagcacgcaagtcctcggcatccttttgtgcctgtttcaacagatccgccgccacgcttttctcttttaaaacctgttccttttccctctctaattcccggcggcggcactccagcgcagattctccttcgcttcccgctttcttcgctttattgagaattgtctgttcttccattcttgccgcggcaatgatccgttcgctttcccggtgtgcagcctgttccatctgccgggcctcttctatccgggatttgatctggctagccaaaagccgcagcttttctaaatcctggtcctcctgatgatccggagaaatcttccctttttgctgttccagttctgtattgcgcgttttttcctgttccagttcccgtcgaagccggtcattttcctgccgcagttcctgaaccacattcgggctgattccctcgtactttttgtttagttcttccttttcccgctcatactttcggatcaaatcatttaaatattgagatacctgttccttatgaaatccacgcagaacggtggaaaataaatctccttttgccattttggtctctccttttccccatctattcccctggctttcagggatctgtttcttctatttttccaaacaatatggccaaaatttcggtatcaccgccacaaatacaaaaagcagaaagttctcatctattttatcagtataacacagattcttttcctataaaaggattctttttcccacacaatcaaaaaagcgccggtatatgctccggcgcttttgcagcttttcttttttatataataatacagatcaggcccgtgcatccctcattgataatccgttcaatggtttcctgcagcttcagccgcgcctcttgcggcatccggtacaatttgttatgcagcccctcgtttaccagagaatgaagagatttgccgaaaatattcgactcccagattttttccgggctgtcttcaaattcctgcaataagtacatcaccaattcttcggattgtttttccgagccgacaatcggcgaaatttcagtggtaatatccgccttcatcatgtggatagacggggcactggctttcaggcgaacaccataccggttgccttgtttgacaatttccggttcctccaaccgcagttcctccagcgtcggcatcacaatgccgtatcctactgcttctacttggtccaatgcgcccttgattttttcatagtcccgcttcatttgggccagttcaatcatacagggcatcagacctgcttcagaatcaatatccaaaccggttcgttcactgataatttcgtacagcaggttccccggtacctgcatcagcagcttgacccgaccgcgccccaaatcgatctccgtaaccgaagcactctccacatgttcctgctccgtggttttggacatagccgactccacatcccggattcggacgatttcctgcgcatggtccaaaatagaactgaccagttcctgccgcagccaatggtccttttccagtgagagaatccaacggggaaaatctacgcagatttccttaaccggaaactgatacagcactgcggacatgatatcccgaatgtcgttttgagtcagttccagacagttgaccggcatgaccggcactgcatatttttcgcttagctgccgagccaaatcctgcaccttggcagatcccggctgtgttgcatttaacagcaccacaaagggcttttcaatctcctttaactctgaaataaccctttcttccgcctgttcatattcttccctgggaatgtcgctgatggatccgtccgttgttaccacaaggccgattgtagaatgttcctgaatgaccttgcgggtcccgatttccgctgccatattgaagggaacttcctcttcaaaccagggcgttacaaccattctcggcccgtcgttttccacgtaacccaacgcgctgggcaccacataacccacacagtcgatcaagcgtacccgaaaggatgcctgatcatctaaaaaaacctctaccgcctcttcaggaatgaatttcggctcggtggtcatgatggttttgcccgcggccgactgcggcagttcatctactgcccgctcccggcggtaatcgctgtcaatattgggaatgaccagtgtttccataaactttttaataaaggtcgattttcccgtacggaccggacctacaagccccaaataaatatctccgccggtccgcatcgcaatgtcctgataaatgctgcggttttccattgatctagccctccttattgatcgctgctttttgcgggtatcctatgtgaaaaacggattggcgcggcctggccggggagcgctttgtttggccgtaatccataaaacaccgtcccctttgtgcgttttgctaccacaactatatgaaccttttgtccaaaatagtaccggagaaaaatacaaaggcgcagaaatcataaaagaagccctccccagaaatacggggagggctttggaaaaaaaatctattttgccaaaaaaccgacttttttgtagaccttttccaacgtgcggccggcaatacgggaggctttttccgctccggcacgatagcagctttccaaatacggtttatcattcatcagctggttatatttttcgcggatcggagccaagtggtccgctactgcctggccaacggccattttgaaatcgccatagccctttccggcaaactcgctttcaatctgctcataggactttccggtaacacaggaataaatagtcatcaggttattgattccatcttttccctcgcggtatgccacctgtgcttcggaatcagtaacagcacttttgaattttttaatgatggtttccggcggatccagaatatagacgcaacccttcgggttcggatcagatttgctcatcttcttggctggatcctgcaaggacatgatcttggcgcccattttagggatatagccgtccggcaccacaaaagtgttgccgtgttgaccgttaaaacgaatcgccacgtctcttgccagctccagatgctgtttctgatcaatccccaccggcaccaggtcggtctggtacaagagaatatcccctgccatcaacacaggataggtgaacaggcctgcattgatattgtccggattcttagcggatttatccttaaactgggtcatacggttcagttcgccgaactgggtatagcaggacagcacccagttggcctccgcgtgttccttgacgtggctttgaataaaggcaatcgatttttccgggtccacgccgcaggccagaatcagcgcatacgcttccaacgttcgctgttttaactgagccggatcctggcgcacagtgattgcgtgcatattgacgatgctgtaaatgcagttgtaatcctcctgcagctgtacccagttgcgaaccgcacccaggtaattgcccagggtaatctgcccgctgggctgaatgccggaaaaaataatttttttgcgcgcaggcgcttggttttccatcaataacaccttcctaaaacattttttgggtcaaagcccccaggcggttgataccttccacgatctgctcatcagtgggggttgagaaattcaggcgaaccgattcagaagttcctttatcatcggtcaaaaaggcggtgcccggcaccacagcgaccctttgttccactgcagccttgcagaacgccagcatatcgctgcctttcgggagggtacaccaaaggaacaggccgccctcaggattggtatgtgctaccgctggatgaaactgctgatcaatctggcgaatcatcagcgaagatttcttacggtagatctcccgcagtccggcaatatgcgcatcaaagtcatattccgccaaaaagcggtcgcagatcagctgagaaaggattgtggtatgtacgtcggaggactgcttggccaccgtcagtttggcaataatctctttgggcgctaccacataccccacccgcaggccaggggataatactttggaaaagcttccgcagtaaatgacgatcccctctgtatccatcgatttgatggtcggtacatcctcgccagaaaagcgcaattcaccgtaagggttatcctccaaaatcaaaacgccgtactgcagcgccagccggtatacttcctttctcttttccaagctcatcgtgataccggtggggttttggaaattcggaattgtgtaaataaattttgcattggggttcgctttgagcgcctgttccaacttttccgtatcaatgccgtcaggccccatttccacgccaaccagttgggaacggaaagagcggaacgcgtttaaagaaccaataaagctgggactttcactgatcactttgtctccatcgtccagcagacaatgggcagtcagacaaataccctgctgcgcgccggacaccaccagaacctgatcaaaatcccgaccgatgccataacgctctttcaccaaatgaaccagacggtcccgcaagggctgatacccttccgtaaccgaatactgcagcgccaaaatcgggttttcttctaagatctcgcgggtaattttctgcaccgcttctatcggaaatgcttccggtgccggatttcccgctgcaaaagaaatgaccgaaggatctgcagtcgctttcaaaatttcacggatcgccgaaggctgcagagaatctattttcttggaaaattggtagtgcataaaattcctcctataccgttgatatcaaaaagcaagtcccggcggcaggttgttctcacctgccgggccggcgcctcccacacaagagctttttctcttagcatcgtaattattttttagtatagcacaacaaagtgtgaaaaaaaaggaagattccacaaaaaagaggaggaattttgccaaaaacgcaataaaatagggctgttcacgcatgcgaaatccagtaaaatagaaatcagatcatttttgtcgcttgggcaaagcaacaggagggaaaacgatatggatgccggagaaaaacaatcacggcatggcgataccatcaaaaaactgcgccgaaacaaaacgatttcccgattgattcacgccgggacaattctgggccttttacttgcgatcggctttgccgtgtatggcttttccgccggcatctttaccagcgaagagagcctggaacagtttatttccgattcaggcgtaaccgcgcctttggtatttattctgattcaaatcattcaggttgtggttcccatcatccctggcggggtcagttgtttggcatcggttgttctgtttggtccgctgccgggatttgtatatagctatgtcggcatctgcattggcagcatcatcggcttttttctaggccgattttacggaaaaccctttattgtagctgtgacaaaaccagaaacctacgaaaaacacagtaaaatgattgataaaggcaagcgctttgaaatcttttttctgctggcaatgctttttcccgcttttccggacgacttgatctgtatgcttgcaggacttactaaaatggaaaacaaaaaattcttgttgattttactgctggctaaaattccaaccattgcattatacagtttggtctgggccacggcggaagacagtttctggcggctttttacctgatgtgcaaaaattccctctcgatttttcgggagggaatttttattttaccaaggtatattaatccaaaatcttcaaaaaatatgatttcatgcttgacaaagctttaaaggcacagtacgatagtactatacccctgtggggtatagtactggtaatcgcatggaaaaggagagatgcgtttcatgaagcaaaagttcaatgtttccggaatgacctgctctgcttgctctgcccatgtggaaaaaagcgtggcaaaaacgcaaggcgtccaatcggtagaagtgagccttttgaccaatagcatgcaggtcgtatatgatgaagcccaaaccgatccgtccaaaatcattcgggcggtggaacaaagcggctatggtgcctttcttcccccaaaagggctcgctgttgcccagcaggtatccgctgcaccgacggatgctgtcaaacaaatgaaacggcggctgattctatctttctgctttttaatcccgctgttttatctgtctatgggacacatgatggggttgccaatcccccatttttttcacggcacggaaaatgccctgtcctttgcttttacacagctgcttttgactctgccggtggtgtatctcaaccgcagctattttcagatcggctttaaaacgttgtttcgcggctctcccaatatggactccctggtggctatcggctctgcggcttctatcctttatggaatttttgccatttaccagatgagctacggtcttggccacggcgacttggaacgggtccggcaatatgctatggacctgtattttgagggcgcttccatgattttgaccctgattaccttgggcaaatatctggaaacccgatccaaaggcaaaacctctgaagcaatcaccagattgatggatctggcgcccaagtctgctacggtactgcgggaagggcaggaaatgcaaatcccggtggaacaggtcgtggtaggcgatacggtagtggtgcggcccggtcaaagcattcctgtggatggcgtggtgctggaaggttcttcctttattgatgaatcagccattaccggcgaaagcattcctgtggaaaagaacataggcgatacggttactgccgccacaattaacaaaaccggcgcgttccggttccgcgccaccaaaatcggcgacgatacgaccctgtcccaaatcattgcgctgatggaagaagccagcgcctccaaagccccgatctccaagcttgccgataaggtcgccggtatctttgtgccggtggtaatcagcatcgccattttagccactgtgatctggcttttgctggggcagaccttctctttcgctttgtccatcggtatcgcggtactggtcatatcctgcccttgcgcgctgggattagctaccccggtggccattatggtcggtaccggtaaaggagcggaaaacggtattctgatcaaatccgccgaagcactggaaactgcccacacggtcaacaccgtcgttctggacaaaaccggcacgatcacggaagggcacccaaaagttaccggtctttatccgtcttcgggtgtgacggaagaaaagctgctgcaaattgccgcttcgctggagagcctttccgagcatcctctggcacaggccatcgtttcattgtcaaagcagcgtgggctctctctgtttgacccctctaattttcaggctctctccggccttggcctgtccgcctcgttagagggaaccccatgtctcgccggtaatgagagactaatggaggagcagggcatccacttggatgagctacgcaccaccgcggcagaactggcacaggatggaaaaacgccgttgtattttgcacagagtcaaacgctgttggggattatttcagtgtctgacgtggcaaagcccaccagttcccaagccattgcggaaatgaaacaactggggctggaagtggtcatgcttaccggcgataaccaacggacagccgatgccatcggccgtcagctgggagtgtcccaggtcattgcgcaggtattgcctcaggataaagaacaaaaaatccgccagttacaggaaagcggcaaaaaagttgccatggtgggagacggcatcaatgacgcgccggctctggcccgcgcagacgtaggcattgctatcggtgccggaaccgatattgcgctggaagcagcagatatcgtgctgatgaaaaacgacctgttggatgccgtcaccgccatccatctaagccgggcagttatccgaaacgtgaaagagaatctgttctgggcatttttatataatacaatcggtattccgattgcggcaggcgttttcttctcactttggggatggaagttggacccgatgtttgccgcagcagcgatgagcctgagttcggtctgcgtggtatccaacgcgctgcgtctgcgcttttttaagccgtatcgcagccgtcaagctgacccgcagcccgttttggaaaaagtacaaacaaatgaccccatcacagaaaaaggagaaaaaagcatgaaaaagacattaaaaattgatggaatgatgtgttcccactgtactggccgcgtttcacaggtgctcaatgccatcgacggcgtttccgccgaagtttcgctggaagacaaggcggcgtatctgaccctgtccgccgacgtggctgatgacgttttgatcaaagctgttaccgatgccggatacaccgttaccgaggtgctgtaatatgatggcagacaaacaaaaggtctcacgtcttttaaagaccgctcggggccagattgacgggattttgaaaatgattgacgaggaccggtactgcattgatatttccaatcagattatggcgtcccagtccattttgaaaaaagccaatggcgaagtgctgaaagctcacctggaacattgtgtcaaagaagctgtgaccaatcatgatgcgacggaaaaactgctggagatcgaaaccattattgcaaaacttttgtagttttttcatcggaggattcgttttctgagcgcaggtatttttgcctgcgttcttttgctacaaaaaactggcttctctgtgctttttatggtaagctggatttgtttgcctgaaccgattccggtcaaagccaaaaaagaaggcaaaccgcgttacatcataaataagggggatctttatggaaaagaatcagcgctatcaaaaaatcaaccaggtctttatggtcctgtacctattggtctgcctgtggggcattgttgacagctttctgcactcaacgccttattatatggggctttctctgctttcccccttatttttgctgattcctccgttattttggaggatcacccggctcaagcctgcgtatctggtttctttgaccgtcaatttgtttagctttcttgcatttgtgattggaattgcctttcgcggatacggccgcttccctttttacgataaagcggtgcacaccctttccggcgtattattcggccttttaggcgtcatcttttattacctcatgaaaaaagatcgtgctatcgtcccccgcgacggtatttttgccggttatttcgctgtttcttttgcctgtaccattgggatgctgtgggaggtatgggaatattctatggactttatctttcattccgatccccagcatgtgctgaccaccggtgtccacgacacgatgcaggatatgatcgtctgcctgatcggatctctgtttgttttattttccgtatggcgctattaccgcaaaggcaaggcgggaccgattatgctcatttttctggacttttatgaattgaatttaaaaaaggaacagtaacatcggctctccggaagccaaattctttcctatccgaaaaagccgcccggcgtttatcggcgggtatctgtataacagttttgtgccgagattgaaaaagcggcacgaaaccgcatagagctgatcgtgttggagctggcgaagcgaaacggcgtgaccgaaaagctgaaagccgaaaaccaattggaatgggtacgacagataaacgcttgcaaggcacttatcagaagcgattgtgaagtttgaactgatttgtcattgataccgagaatgcccgggcgaaaaatggtcgggcgtttcttgtgctaacggttggtttcttcccatctttttgatatactctatttgaacaaatcctaatttgccgaactacccaaacccctttgggaatgcaagggcgcacttctatactctcctatctggagtatcgtgcatcctgcgagcttcattctctgtcggcagagaaaagcagcctgactgagaatgttcgtcacttcgttccgttagtgtgtctacactctcttgcaccgctaaagcggctattccctgtggatttgctggctttttacaaaccgttgccgccagcaagtttgaatcatatacataaataatcctccgtatgattttgaccatacggaggattaactgttttgtggacaccgcccttctccgggcggcttttgtaatttctgttttgtaccctattcttttctgcatgcactgacgaacgccgaaaacagcttagcctgctgttcagaatcatacatcttttccggatgccactgcacccccaaaaagaaagaatgtccgccggaaaacaccgccgcctctattaccccatcaggcgagacggccgcttcttttccatttgccggcagacggtgaaccgcctgatgatggagggaattgactccgatttcctccgcgtcgaaaatgctccgcagcggagaatcttcaggaaaaagaacaaaatgggaaaccgcattgcgcgggaacatggtcagctcatgcagccctttctctgcctctttttgcacatcctgatacagatcgccgcccattgcgacagccataatctgtaaaccgcggcaaatacccaacattggaatttttctggtcattgccgcttttaccaacaaaatatcctgttcatcccgtaccggaatcagccgtccgcaatctctcaccggctgattatatcgctgtgggtccacatcatttccgccactgaccaacaacccatccagccgctttcaaaaaccaaccgcttggcagcatcatcaaactgaggaatgaccaccggaagtgcccccgcccactccaacgaacggatataatctgccgccacaaaattccagtcctgcccaatagccccctgtccgttgacccgacccacttcgtcacgaaagtcataattgcaagtaacaccgatcaaaggttttttcattttcttattcgctccttttgctttggacacgcctgattctcttattttgcttttctccccagtacaacccggtcatttcccccataatcctgaacgacccgaaccgaatcaaacccggctgaccgcatcagggcgcaaaccgcttgcgcctggtgaaaaccaatttcgaaagccagcaggccgcccggtttgaggacttttttccataagaagggaatttcccggtaaaaacgcaatccatcatccgcgccatccagcgccaaagatggttcgtgctgaacttctcgctgcagctcaggcaggtcgcccgatggaatatacggcgggttagaaagaaccgcatccatattggccaagcctgcggtatttttcaatacatcagcttggacaaaacagcattgaggtgccaaagagaggatattttttttacaatattccccggcttttggtgaaagctccaataaagccacctctgcgtccggccgctcacaggcgactgtcaggccgatacaaccgcttccggcacatagatccgcaatccggggagaaggagtgttcgccaattcttccagcgcctgctccaccaaaatttctgtgtccgcgcggggaatcagcacactggggccgacggcaaaacgccgtccataaaactcccaccagcccagcagatattgcaacggctctcccgcttcccgccgggagagccatgattgtatctgcgctattttttccggacacagttcctgctccggatgtgccagccgctgtgctttggaaatagaacagctcccttccagcaagagatccagttcaaaaccggcggcggcaaccccggcctgctgcaagcggcgcagccaaagcggatagcaggtaccgacggtgcttaccatcggtcgctgccctctatcaaaggtagtaccggttccagcgaagcaatggctacttcaatcatttcgtcttccggttcctgggtggtaatacgctgcagccacataccaggtgcagaaataatgcgcgtacaaagattggtatagcgtcccgccagcttaatgatttcgtaagaaattcccacaattacaggcaataaaagaatcttcagcgctactctgagccacggattgctccaagtgacaaaagaagtcaccaatacgctgacgattacgacaatcagcaaaaagctggtgccgcagcgggggtgaaaccgactttgccggcgcacattctccactgttaaatcctcgcccgcttcataacaaaaaatcgttttatgctccgcgccatgatactgaaacatccgatggatatctttcattctgcttaccgccgccatataacctactaaaatggcaattttgatcaacccttctatcacgctggaaaaaatgcccaacggcagcagcgtattcagtcctttcacagcaaaagtaggaagaaccataaacatcaaaacagcggcgatcaccgcaatgacagatgcaaatccagtcaggacggcagtcgctttttcgccaaaatgctggttcagccacagatccaccttgtccggctcacccgcttcgctgcccgacttatccgcagatttcatcaggcatttgtatcccagacgcatggtgtctacaaaattaaaaataccgcgtataaacagtgcttttttgtaccacgctgtaattttggggttttcccaagtctccacatcaatgctgccgtcgggaatccgcacggccaaagatgttctttccggtccccgcatcatgattccctctatgaccgcttgaccgccgatagatgttttgtgctgtttgttcatttgttctttacccttctatttctgaaatttccgcttccgatttttttcctgccaatggcagtgttatggtaacggttgtacctttttgatagatgctaccaatttccagccgaccgccatgccgggtaacaatttcatccgccacagcaagtccaataccggagcctcgtttggtcgaatcacctttataaaacttggtcttaacctgtggcagatcctccggcttgattccttctccggtatccgcgatcgtaactgtcgcctcttcgccgatgcgccgtacgctgatagaaacggctccaccgccgggtgtatgcttaaaagcattgtcgagaatattgacaaaaacctgcttcagccgattgtggtctcccataacgataataaaatcctctggctcttcataacggatttcgatcttttcccgcgcggcccgctggtcaaacatcaacactgcgtcatccagttccgctaccagatccatccggtccataaccatcgccatacggccgctctgcattctggaaaaatccaaaagctcctctaccatgccggatagccgctctgtctccttgccgatcacctccatgcctttgtgcagcgtttgcgggtccggcctctcttcatcggccagcgtttccgcccaacccttgattgcggtcagtggtgtccgcagctcgtgagaaacagaagaaataaagtcgtttttcaactgctccgctttggacagctcccctgccatataattgattacatcacacaactcgccgatctcatcgtcattttccttttccaaccgaatactgaaatccccttgggcaatctttctggcagtctgccccacctttcccagcgggacgacaatggaattgataaaataggtactggaaagcaccacaaaaaagatgatcgccactcccaacacggtaatgataaccaccaaagagataatctgccggtcaaccctcaccaacgaggtgatatatcggatcgcaaaaatttcctcgtcactaacctgggaaatccgggtcagggccaggctattttccccatacagcattccttgaaaatacccctcgccggtttctgaccccaatgcctcttgaaaatccggcatatacaacttttcagttgcttcaaatccgctggaggacaatagcacatttccatccatatccagtgccatgatttccattttatccttatcttcaaaattttcgatcagaccgcgcacttcagtggcataatcggcagaagcatcctgtgcatattttttcaaaagtccatccaccaagtccgcgcgggataccaccgtttgtctaacgccgctgtaatagtaacttttcaacccataagcagagaggatttcaatggcaattaaaatcaaaaggataatgccaaagctgttgagtagccatcgtttggtaattttcctttttgccattcgctctcctcctctcttgcgcacaatgaaaggcggtgttagaccacccatttatatccaaatccccacaccgtttgcagatagcggggattggaaggttcttcctcaatcttcatccgaagacgccgaatattgacatccacaattttcacatcgccaaaatagttgcttccccaaacttcatccaaaatggcggaacgctccaacgccgtattgggattcttcataaaaaactccagaatttgaaattccacctgtgtcagatcaaccatcttcccatttttgctcagcgttctgcttttggtgttgagcacaaacggaccggaaacgacctcatcattttgctgctccacatcctttgccaaggacacacgccggtaaatggcatccacccgcgccactaactccgacggactgaatggctttgtaatataatcatccgcaccggtcattaacccgcggactttatccatttcctgggatttggcagacaacatgatgatgccgattgcattgctggctgcacgaattttttcgcacacgccaaatccatctatgcccggcatcatgatatccagcaccaccacatcgaaatctccgccgctctgttcaaacacctggagcgcctgctctccgtctggtacgtctactacctcgtatcccgccctttttaaattgatgacaataaaatcacggatgacgtcctcatcctcagcaatcaaaatccgtttcaatccggcaccttctttctttacgattttacaatggaaaaccgttcttgtatttcttctatatccagctgcacctgcgccgacgcggccgaagatttgattggagcagcatagtattcgtataccccgcgtttttccagctgctcgtatacaaggttgtcaaaaacgtcccgtggctcgtcctgctcataaacacg

SEQ ID NO: 2489 - DNA, 20302 bp, Unknown
  16S sequences of unknown bacteria
gggctcggagatgtgtataagagacagaggccgtaaataccggatgctccaccgaaaaaacaaaatctccgccgcataccagataggacgcaaccttttgcgccaccttttcaaaagattccacataatgcagcgccaacgaactcaacacaatatcaaagctttccggcgaaaaaacaatgtcttcgatggcgcaccgctgatactgcacctgtggaaattttgacttttcccgcgccaccgacaacattctttcggaaaggtctatccccacaacggaagacgccccctgctccgccgcatacatgcagtgccagccatagccgcagcccaaatccaatacccttttccccgcaaaatccggcagcagctttttaaacgcgccccattccccagcaccggacaatccctgcctggaacggttcacctggctgtacttttcaaaaaacaccgcatcatcataccgattttctttcatatgcttcctttccaatctttctatttttccagtatccgctccatcacaatccggcaggaccggtcatgcgcaaaaccgtcccgttccaactcagcacggattttttcattttgcggcggataggataccgtcaccgccggcagcccctgtctttgcgtgtatgcctttgcaaattgcaggcaccggcggccgtctccaccgtacatggctacgtgcaaccctcgttgccgcagcatgcgggcaccaatcacaacaaagttatactgtgcgtctgcgaaaaccattccctgctcccatacataacgccaagtcttttccccgcagcgaaaaaaagtattattcatcacgataaagtcttccatttcccagcggccgctttctaaaagcgtccgggccaaacgataatccgtaaccggcataaagcccctcggcaaataaagctctctgtcaggaatttttgccgtagcgccgatgtaggttcccgcaagcgaaaggccaaaccgttccgccagtccccggctgcggacatttttggtgccagtaaacatccggacagccgggcatcccagttgttgcgcttccttcagccagcggttgtaaatggcctttcctacgccctgcccctgccagtccgggcgcacccgcagcgtctccaaccaaccggacccatccggcaacagcgatagttttccaatccctaccggttcgtcgcctgacaaaaccagcgtcagctccccttttgtctgattcaaaaaataatcgctgttgtcccgcaaataacagctgttgggcagtgtttcctcttctacacacaccgcttctcctatatttccccaattcaccttttgtagcgtatattccatttgaaaatctccctttcgctttttttaattataccatacgtttcgcctgcatatggcattcttttgcccctttttactgccttgtctgttaaaaactctgttttcactgtattttatcctttttatgacatggttttttcgtagagagtggagcgctggtccggctttgagtctgcctcatccaaaaacaagcgcaagatttttgttatattttcctataaattatatatatcgtgcaaaataatacagatttttctacaaaacatttgacttttttcgttgtgataaccattttcaaatgatatacttttgaatgtaaggtctgttggcaggccttgcaaattctacaagacggaggaatcttatgagctggtcaaccgaattgtttcaaacttccaagccgattatcgggcttttgcatctggaccctctgcccggagatcctttctacaagggttctatggagcaaatcatagaaaatgcaacacacgacttgaaggcgctgcaaaatggcggcgtagacggcgtgctgatgaccaatgaattcagcggcccctttttcaccgatacgcccaaaccggtattcggagccatgtgccgtattttcggcgagatccgccatctgtttacggttccatacggagtggaaaccatcgctgacggcgagggttgtgtggaaatctgcgccgctaccggcgcttcctttacccgctgcctgttcaccggcgcctgggctggcgataccggcctgcaacagcgtaacatcgcccgcaccctgcgtcttcgccgggaattggatttggacgatctgaaactgtgttactttatcaatggcgagggcactacccccatggactgccgcccgctggcacaaaaggccaaatctttgctgaacggatgccatgcagagtgtctggtcgtttccggacccggaccgggcagtcagcctgacgtttcccagattgtcgaagtcaaacaggtcgccggggacacccccgttttctgtggcaccggctgtaatgaaacgaactgcgacgccattcttgccgcggcagacggcgcttttgtcgggtctgcctttaaaaaagatggtgttttcaccggccgtattgatgaagagcgagttgcccgctttatgcaaaaggcgaaagccctgcgaaaggactgattttgtggacagaaaaaaacgctgctttatgggcatcgatgtgggaacctatgaaagcaagggcgttttgatcgactcagactgccgcattatctgtcaagcttcgcaaaagcatgggctggaaaatccgcagcccggctggtacgagcacgacgcagaagaagtttggtggaaggacgtctgcaaaatctccctccagctgctagaacagtccggcctgaatccggctgaaattgagtgcgttggcctgtccgccctggggtgcgattgcgtcccggtggatgaagaatgcctccctttgtgcaaggccattttgtacggcattgattcccgtgcgcaggaagaaatcgaagaaatcaaggcctgttacggggaacgttttccgcaggtcttttcccatccgctggtatcctccagcatttcgcccaagattctctggatcaaaaaccatctgccggatgtttactgcaaaacctataaatttcttaccgcttcctcctttttaactgctaaaatgaccggccgctactgtatcgacaaatacctcagcggctcgtttgcgccattgtatgacgaaaatggtgtgaacgaagcggaatgcggcctgttctgtcggccagatcaactggcagaaattacgcttgccacagacattgtcggcacggtaacgccccaagctgccgcctgtactggccttttaccaggtaccaaagtgctcaccggcaccggggattccggggcggaatcggtttcctgcggcgttttcacgcctggcaccatcatgattcagctgggctccacctgctttttcatctataataccgaccgctcctccgctgacagccgcatccggccgggcccttatctgattcccggcacctactgtgtggcagcaggtaccaataacggcggcaccctgaccaaatggtaccgggatcagctgtttccggtgttgttggcgaaagaagaggcgggaggtgaaaacgcctacgctgccatggcaaaaatcgccgcgtcagctcccgcaggcagcgacgggctgtttacattaccttatttcgccggggaacgcacccccatcaacgacccccaggcccgcggcataatctttggcctgcactcccgccataccagagcgcacctgtaccggtcagcgttagaagggatcggatattccatcgcccagcattttgaccttctggagcaaaaccagctgccggtaaagaaaatcatggcagtgggcggcggaaccaaaaacccactgtggctgcagattatcgccgacatgctggaccgggagattctcgtgccggaggtaaccatcggcgcctgttacggcgacgcgattttatgcgccctttcctgcggctgctatgacaattttgcggcccttggtcaaaaaatcaaggtgtcccaaaccatccggcccattccggaaaaccacgccgtttaccaaaaggggaaaccgatatttcaggcactatacgatgccaccaaagagctgatgcatcaatccttgtaacttttgcaaaggaggtacttttgtgaaaatccagaagaggcagattgccggaatgaacctggtttataaattttattcctttgactactttctcgacgcgatggagcggttgggatatgagtcaatcgagctgttgcccaacgcacctcatttctatgtaccagacctttctgcaagcgatatgtctgccattcgccagaaaattcacgaccatcacctgacaaccatctgttatactccggatcaatgcagctatccggttaatatttcttataacagcgaagtggggcgccgccgttccattcaaagcctgacccgtcaaatcgaggtctgctcctacttgggcagcggccaaatgcttttaacttccggttacggatattttgacgagccaaaggaacaagcttgggcgcggatggtcgatagcttgggtcagctttcccgcaaagccgaaaaagagggtgtggtgctggtactggaaccgattcgcaccgatgaaaccaatctggtcactgatctgcccagtttaaaaagagccattcgggaagtggattctcccaatttaaaaggaatgctggacaccagccccatgtactatgccggagaatccattgcccagtatgctcaggaattgggcgacgatctgtggcatattcacctgatcgacggccgtcctgccgggcatcttgcctggggtgatggtattttcccgttggaccagtatatgcgtgaaatcgagcaggcgggatatagccgatatatgacgctggaattgacttctgccgaatattataacaaccccaaccccgctatggaacaatccatgaatgccctgcgcccgtatctggaatagaaggcgccaatccttccgttgctatgcctggttccggtttccgtctgattttgcaaaaacagaagcgatattcttttttctttgcacccgccggggtgggaacaaatgccgctgttatggaactttttcccaattcaggttagtattatcgttttctttgaaaaaaggcgaaccggaatatcccggttcgccttttttccgtcaccgaatctttcggcactccaaataaaatcgcttatctggtgcgcttcccatggaaaaactcttccggcacagcacgccatgacgcgccacatcgggaaaaagtttctctttatcgaatttcttccaagcaatcgccagccgatccgatgcctgacccaaccgtcgacagtcagcctctccatggatgtattccagctgcgcttcggggtgctggcccagccattcatccagcattggctgcagcttctgcagctcaggcgggttttcagcgtcgaaatccaaatcatgttgcactgctttgggatccacacccatcagcagccggtgaatcggttcaaaagccagcgccgaatcatatagattcaccagttccactaagccgaaccgggcggggtgccattcccgttcgtctgccgttaaactggttttcagcgtatcccagtgagctttggctgcggcaaacgaatgattgccgtcccccatggcgtataacattccatcaaaagcttcttcttttagagaaagcagcacatctgctaccatgtcaaaaatactttcttctttcaaaagccatccttttagccgtccgctgttcatcattaaaggaaaatcgtaaaaaggttctctgttggctgtcaaacggtccaatccgcccatcagccggtttttccggtcatccagcagcaccatgatatgcggcatttccaaggtcgcttccgcacgaatggccacgcgggcggcaaccgctccagaatggtcctttcggttgcccggatcagcgaggaggaaccgggagtaaaatcatactgttccaaatccagtgacagaaccagtccccgacgaatgcctgttgtagtggttcgatgcaaaaacatcatcccttcgccgatttcccgaagcgttccatccgtcagatattgctccattcgccccggcactgcttgggcatgggtctgattttttcccagccaagcctccggcatcatgagctgcaaagcggatggcgcagaccccacgaaattctgcactgcatcccaatattccttctgcgcgctgtactgatcgcaggcgactaccgcgaatttctgcagattgacctgctgctgcggaaaccacagccgcggtaccgccccatcctctataaaacgatagcagtcctggggcatttgggtatagacaatatcggaaatggggttaaattttttaccgttaacatcgaaaactcctcctttatttacgcaagcccgcttcgtaatccctcatgcaggccgccagtgcctccacgccctctttgggcatgccgttgtaaatcgacgcccggcacccgccaacgctgcggtgtcctttcaaattgatcatacctcgtccctgcgccatctgtaaaaatgccttggtgtcttccggggtcggcaatgtaaaggttacgttcatgatggaccgatcctcttttgccaccgggttttggaaaatttcggactgttcaatcaggtcatacagcagcgccgctttttcccggttgcgctgctccatcgctgccacaccacccattttttccacccactggaacatcaggcccgccatataaatggaaaaacagggcggcgtgttatacatggaatgattctctgccataactttataacgcaacatcgtcggtacaatgggatctacttctctctccagcaagtcacggcggaggattacgaccgtcaggccggcagggcccatattttttggggcgccggcataaatcagcgtatgggccgtcacatcaatctcgcgaccaaggatcgcgctggaccagtcggttaccaacggaataccgccggtctcgggcagggtattgtagcaggtgccgaaaatggtgttgttgccggtaatatgtaaataagccgcatccgggctcaacaactccggtgtgattttcggaatgtaggaaaaagtatccgccttcgaagaagtaactgcaaccgcttttccccatcgttcaccctctgccagcgccttgcccgcaaactggccggtaactgcatagttggtagtctgtccctgtcttgccagattcatcggaacagcggaaaactgcatagaagcgccaccctgcaaaaacaacaccgcataatcatccggaatgtgcatcagtctgcgcagggaactttctgcatcggcgatgattttttcaaaagcggcagagcgatggctcatttccatcgcgctgcaccctgcgccgggataagaaatcagatcttcttttgcctgctgtaaaatctcaaccggcatcatcgaagggcctgcagaaaaattgtaaacgcgttccatttgtcatgacctccaaatttaaaaacaaaaacaaaaaagccgaagagcgtatgctcttcggctttcacgacagatcaagattgtccggctttccatttcctgctgttcattcaaggccttgacaatcaatcgttccgaaaaaagcgtacaccaagcgcaggcactaccgaagtgtctgaacaacaagatgatgaaattgcagtaaagcaaactttcatctgcgtacgtcctttccaaaagtttatggagctatcttacatctatcttatgtggctgtcaaggatttttatgcatttttatttttctttatcccgtaaccgaaggctgcaaagatacatggcggccaaaaactcctcggtcaccgctgagcagagtacccggacagccgctggggaaaagcggtcttccatcatttcctccaaacagcggcagcagtataaaagcaccagctgcttctccagcccgaccagatgccgtgtcaattccttggacgaccgagcagccagaatctccgggattttttccacgtcctgctccagcttttcatagttttcggctaacttttcttccattgaccgggccgtatactcctccaacggagtcaaattcaaaaacctcgccgccgcctcgcaacaggccagtgcaatattgatatcatccaatctcccatcctgccgatccaaaagctgccgtagctttctctgcgctctggcctgtgcaggatagacgtttccggggatcaggtacatcccgcttttcgccagcaaaagttccgcctgtctttccactctccggtgcagcgcggccgtttcaccgggcaaaaaggtatataggcagccttcccgttttccaaacgctttcagggtttccaaataccccagccggatattccgagcggttacatcactgtcgaacaacaaaaaaatccccaaatcccaccggctttttaagtaccgcaatcgcactgcgggaaaattcatctttcgcacaataccaattgcctctaaatccaccgccacaacatcgtcggcacccatttccaccgccatcttcaccggcacattatccgaatatccgccgtcgatataggttttttcgccgatgacccgcgccttcatggctgggaaacaggcagcgctggccatcagatagtccaccatttctccctcggggactgtctcttttgtcaggattttgggttccaaccggggatattccaccgtcataaatccaaacgccacctgcgaagcgcgcaatttttgctcatcaatataagcccgcagcatctgctccagcggccgcggatcggcgccgccgtttttgacgatctcgctgataaaggcgctcaccttactagtgagatcctttctgccttctattttatctgtaaccgccacatccatcacatcgcgggtcttgagcttctgccacatcttctgagccaactcataatcattttgcaccatcagtgcgccgttgagcgctcctactgaggtgccggtgacaattttgtagtcaaagtccaactcccgcagtgctttccaaacacccacctgataggatccacgggatcccccgccgcccagtactactgcttttttccccatatcagccctcctcttttgcgtggcaaaagccttttcctcgcaatcttcccgcttttccgtaaagattttattccatcccattgacagacaaccctattttttgctatactggtcaaactacataatacatattaatacaatttcttgcgataccaaattcgttgttttttcacaatccatgtattttcaaagccgttcaggccgattttaccacaaagaaaggagccgttatgtcgaagctgaacgtcagaagtttttttggtgacaaattcttttacaaagaagtgactggaatcgccctccccattatggcacagcagtttgttacctcctttgtcaatctgatcgataacgtcatggtcggcggcgttggccagactgcgctgaccgccgtcacagttgccaaccgcttttatatgattgcttcctctatcatgtttgggctgtgcggcgccgctggcatctacattgctcaaaactacggtgccggcaagaatgagcgatgccagaaaattctcaacatcaacctttctgtggggtttgtcatcatggcccttttcaccagtgtactgttcgccgcccccgaatggaccattcatctgttttcccgcacgccggaaatcgttgatctcggcttagaatacattgtcttcgccaaatacacctacattccttatggtatttccattacctgcatgatggcaatgcgcgccattgggctgaataaaatccagctgaaagttggtatcattacggtactgaccaatactatcttaaactatatcctgatttatggcaagctgggtgtgccggctatgggtgtcaaaggcgctgcgctggccaccatgatcgcccgtctgctggaaatgatcatttatctgatgcttctaatccgtcagcagcacttctacaagctggatctcaagggtttgatttttctggattggaatctgatgaaaagtatgctggccaaagcgatccctctaactgccaacgagctgtttttctcgatcggcacttctttggtgttcaaatcttatatgcgcaccgatgaattgctggtagcggccatttcagtggttgatacagttatgaatctggcattcatcgtctttggcggtctttcttctgctgttgcaatctttatcgggggaaaactgggggcaggcaagctggaggaagccaaagcggacgccaaaaaaattattgttttcggcgtaatggtttccattgtgttgggggcagttttattctgtgtcgcaccctatatccacaatctttatgtcctcagtgatgaagcgatccacgcgctggaggtgctcatccgcattaaaagctgcctgatgcccatttatgtcgtcaacgtctgcactttctttgtgctgcgcgctggaggggatactttttccacaatgctgattgattccggttatctgtgggtcggcccggtgacgatttctacccttttgtccatttttactccaattggcgttgtcccactgtatatcaccattgaactgctggatctggtaaaaatgttcattgcgttctggtttttaaaacgaggccgttgggtccgcaacctggctgctgattaatagacatttgtgggccgggagcatcgtctttcggccttgtttttttaaggaggaaaaaatgatgccgctttctctttcgctcggttctttgtttgaggcttacgtcaaaaaagttatgtgcacttatgatgccagcggcatcgccgtcgctattgtcgatcgggaacagccggtaagggaattgtttttcggtttccgcgatcaggagcaaaaacgtctcattgaccaggataccatctttggactggcatccgtcaccaaatcctttacctgcctagcggtcttgcagctggcgcaacagggaaaagttgacctggatgctccggtcagccgctatattcccgcttttcaaaatgcccatcgcgaaaaaccggtgctggttcgccatctgatgagtcatgccggtagcttctggccggtagaacgcaaaacagtggaaccactggcccgaaggatggggctgtggaacagcggcgtcgatctggcttacagcgctgccttttctcaagccgcagtgcaggaagtctgtgcggacctggacgcacagcaaacaccgctgggggaacccggtgagtatctcagctattccaatgacagtttcggccttttatccgatattatccgaacacagggcacagaggatacctatgccgattatatgaaaaagcatgttttgcagccattgggtatgagccgcagcggatgcggctttcttttccctgcccgtgattccaatgctgcgattctgtacgaaaagcgcgacgacaaactgctgattacccgggattaccacgataatgcgtttgttatgatgggcggaggcgccatgaagtccaccctccgggatatggaacgctatcttcagctttttctgcgccggggagaacctttgctttcgccggactcctttcggcgcatgacagcagcttacgtttcttaccggcctagtgttggctatggatatggactttccgtaggccaactggctggatatccggtatacggacacggcggcagcctaacgggcgtgtcctccgccatcagtttctgtcccgatgctggatacggggtcgtcgtgctgtgcaacaccaccggtgtccccgccacttcgattgccgaagccgctatgctctggtgccttgggaaaaatccctgccccgtagaaccgaaagcctgcgagccttgggcgcaggatcttcagcgcagagcctgcggcagatatgtttctgccgagggtgataccgttgaaatcacaatgaacagcacggatctggaggttctttcctccggcaaaccccgtccttaccgtttttcagagcccggtgttttattccttcagtccaaaatgacctggtcggatttgaccttgtttcccaacgcacagggagaaatctttgccgtgcggtatggcggacggatgctatcgcgggtataaagtacgcagcccctctcccatcccaaaccgtttgatgcaaaaaaggaaggctgacgccttccttttttattggttatttttgcaagtttaactcaaaccgctcaaaaaatccgatcagattcccctcttcatcccgaaccccctgcatataatagcgttgattgcgggcatttacaccgatgaaaacttcttttccgtcgctcttcattttttcataggccactttgatccgctcccgggacatctcccgatcgtgacagtcaaacagactttttccaattagatctcggtacccccctttcctgatagtaatgatattgggcataccggttcaagtagcggatgatataatcattatctacaaatacaattggataaggataactgtccaaaattccttttaaaatcgtcttttcgtccattgttgcattttctccttttttccggaaatgaaaagccgaaagcagaattctgctttcggctcttttctgtttatttgtagtagtccaccgcaccttggaaaatcaggttttgcagcatcttatccgggacgtttttatacagattttcaccgtaacgctccgaatggcccattttgccgaatacacgaccatccggcgaggtgattccctcaacggcctgaaccgaattgttgggattaaagcggatattcgaagtgggattaccttctaaatctacatactgggtggcgatctgaccattctgcgccagcttttgcaccaacgcctcatccgccacaaaccggccctctccgtgggaaatcgccacggtatggatatctcctaccttgctgtgcatcagccatggggacttgttggaagcgacccgtgtgcgcaccagcatggactgatggcggccgatggtattaaaggtcaaggtcgggcagctgccgtcggtatcgatgatctcgccgaaaggaaccagacccagcttaatcagcgcctggaatccgttgcagataccgcacatcaaaccatcgcggttctttaacagctcatgcacctgctccttgatctgcggattgcggaagaatgccgtgatgaacttgccggatccctccggttcgtcgccgccggaaaatccaccgggaatcgcaatgatctggctttgggcaatggctttttcaaacgcctccaccgattcctcaatgtcttgcggcgttaaattgcgcacaacaaagatttctgcttcggcgccggcccgctcaaaggcccgcgccgtatcgtactcacagttggttccggggaatacgggaatcagcacatggggtttcacgatttttgccggcgcttttgccggagcggcgcaagcgtaagagaaagtctgaaccggtttctcttcttcgcggcttaaatacgggaacacaggctgcagtttgtcctcataggtcttctgcagtttgtccatgttcacagtagccgacggcgtttgcagtgcatagccttttgcggtgcggcccaccaggatagcagacccgggcagatctaccggcccatctaactcacacaaaaacgcgccgtaacactgttcaaacagttcgttttcattgaaagattcgtccagctcgaagccgatgtgattgcccagcatcatcttcatgacgccttccgccgcgccgccggcgcccagcgtccagcaggacagcacccggcctttggaaatcaggttttccatctgctcaaacacagcttttacgctgccgaaatccggcaggccgttgggataataaaagggcttcatcaagtaaaccggatgatccacacccttaaactctgtggaaacaatgcggtcggccttcgccgtggataccgcgaaagaaaccagcgtcggcggaacgtcgatatcctcaaaggtgccggacatggagtctttcccgccgatggaaccgatttccaactccagctgcgctttcagcgcgcccaaaagtgccgcaaaaggcttgccccagcgctcgggatcgttttgggtgcgctcgaaatactcctgaaacgtcaaccaacagtttttagcgctgccgccagcggctacaactttcgccaccgactcgataaccgccatcatggccccgtggtacgggctgcggctggacagatacgggtcaaagccccatcccatcaaagaacaggtggtggtttcgccgcccagcaccgggatcttggccgccatggcctgagacggggtcagctgccatttgccgccgaaaggcatcagcaccgttccggcaccaatggtggagtcgaaccgttccaccagccctttttgcgagcagatgttcagatcgtccaccagtttttccatccggcctgcaaaatccagatgctccagcgttgccgcttccggctgcggctgcagcactgcgacggtggtaaatttcttcgcgccgttggagttgaggaattctctggataaatctacgatggtgcggccgtccaattccatcaccagacgaggctgttcggtcacttcggccacaacggtagattccaggttctcggtagaagccagcgcgcggaatgtttccgcgtcctctttggctacaaccaccgccatacgctcctgggattcgctgatggccagctcggtgccgtccaggccctcgtattttttcggaaccttgctcaaatcaatatgcagtccgtcggccagctcgccgatggcaaccgatacgccgccggcgccgaagtcgttgcagcgcttgatcaggcgggtcgcttcgggattgcggaacaggcgctgaagcttgcgctcttccggcgcattacccttttgcacctcggcgccgcagctttccagcgactccagcgtgtgggatttggaggatccggttgcgccgccgcagccgtcacgtccggtgcgtccgcccagcaggatgactacatcggacggcgcgggacgttcacgaatcacgttttcctgcggagccgcgcctactaccgcgccgatttccatgcgctttgccacatatcccggatggtagatttcggttacatgcccagtagccaaaccaatctggttgccataggagctgtatcctgccgctgcggtggttacaatttttctctggggcagcttgcctttcatggtctgatccaccggcagcagcggatccgccgcgccggtcacgcgcatggcctgataaacatagctgcggccggacagcgggtcgcggatggcgccgcccaggcaggtggccgcgccgccgaaaggctcgatttcggtagggtggttgtgggtctcgtttttaaacatcaaaagccaatcctgctcttctccgtctacgtccactttgattttaaccgagcaggcattgatctcttccgactcgtccagatcgtgcatttttccggcggctttgagcaccttggtgccgatggtggcaagatccatcaacgttaccggcttgtcgttacggccggcatacagctttttgcgcagctccagataattttcgtaggtctctttgatatactccggctggatattcgcgtcttcaataatggtgctgaaagtggtgtgccggcaatggtcggaccagtaggtgtcgatcatgcggatttcggtgatagtggggcagcgtttttcctcgtccttaaaatactgctggcagaatttgatgtcatctaaatccatggccaggccgtattgcttgataaaatccgccaggccctgctcgtccagttcgttaaagccgtccagcactgcaaccggatccggttttgcatagttttgcttgatggtagccggtttttccatggctgcttctctggcttctaccgggttaatcaaagtctctttgattttatgcttttcctcatcggaaagtttgcccttgatgtaatacacccttgcggtttttacttccgggcgctctttacaggtggacagctggatgcactgggcgcaggaatcggcccgctgatcaaactggccgggcagatattccactgccaacacccattcgtctgctgccggtaccggggcggtttcctcgtaaacgtcgtctacctgcggctcggacaggatggttttctgcgccatcttatagtcggcctcttcgatattttcaatatcgtagcggttgagcacccgtacgcccgtaatctcctcggtgcgaagcgcggtgcgtaaatcactcagcgccccggccgcttcaacggcaaagggcgttttcttttctacaaaacaacgataaactgccatattctctctcctattttttgccgatgtcggtacggtaatgaaccttttcgaaggtgatctctttcaccgcgtcatacgctttctccagcgcctgcggcagattgtctcccagtccggtcacgcccagcacccggccgccggcggttaaaaattttccgtcctgctttttggtgcccgcatgatagacgatcacgccgggatgtccgccgtcttcatccagcccctcaatggggaagccggtctcgtattttttcggatagccgccgctggccagcaccacgcaggccgccgcgccggtcaaccactggatatccagctcgcttaagtgctcgtcgcgcaccgcacgcataatggtgaacaggtcggtttttaaaagcggcagcaccacctgcgtttccggatcgccgaaccggcagttgtattcgatcactttcgggccctgttcggtcaaaatcaggccgaagtacaagcatcctttaaaggggcagccctcttttttcatcgcttccacggtgggcaggaagatttcttccatgcagcgtttggccacgtccgccgtatagtagggactgggggcaatggtacccataccgccggtgttgggtccctcgtcgttatcgtaggcccgcttatggtccatggacgacaccatgggcgacaccgtgtgggaatcggtaaaggccagcaccgacacctctttgccggtcaaaaactcttctaccactacctggttgccgcttttgccgaagattttatcctccataatggaatgaacagcctctttggcctcttccagattcttagcgataaccacgcctttgcccagcgccaatccgtcggccttaatgactgccgggaaacagttctcccgctcgatatattccactactttgccgggatcgtcgaacaccttatattttgcggtgggaatgccgtattttttcatcaggtttttggcaaacaccttactgccctcgatctgggccgcttttttgctggggccgaaagcggggacccctgcttcttccatcgcgtcggccattcccagcaccagtggatcatccggggtgaccactgcgaaatcgatgccctcttttttcgcaaaggcaaccatgccctccacatcggttgcttttatatccaccggcgtggcctgcacgctgatgccgccgttgcccggcgcacagtaaatgcgttcgatctccgggttttctgccagctttttaaccactgcgtgctcccggccgccggaaccaactactaaaactttcatgctgcttcctcccgccgattagtgatggaacagacggattccggtgaacgccatagcaataccgtatttgttgcaggtatcgatcacgttgtcgtcccgaatggaaccgccgggctgcgcgatgtattctacgccgcttttatgcgcccgctcgatgttgtcgccaaaggggaagaacgcgtcggagcccagagatacgccggtcatggtgtccagccaggcacgcttttcctcccgggtcagtggctcaggtttttcggtaaagaactgctcccaaacgccgtcggccagcacgtccatataatcgtcggaaatgtatacgtcgatggtgttgtcccggtcggcccggcggattttttctttaaaaggcagctccagcacttttttgtgctgccgcagataccagacatccgctttgttgcctgccagtctggtgcagtgaatacgggactgctgtccggctcctacgccgatgacctgtccacccttggtgtagcaaaccgagttggactgggtgtatttgagggtaatcaaagaaatcaccaggtcgattttggcttcttccggtaaattcttattttcagttactatatttttaagcatttcgctgtcgattttcaaatcattgcggccctgctcaaaggtcacaccgtaaacctgcttgtgctcgattttggcaggcacataattggaatctattttgatgacgttgtaggttcccttgcgtttggatttgagaatctccagcgcctcatccgtgtagccgggagcgattacgccgtcggacacttccttgtggatcaaattcgcagtgtcggcgtcacaagtatcggaaagggcgataaagtcaccgtaagaactcatgcggtcggcgccgcgggcacgggcgtaggcgcaggccagcgcagacagcggctgatcgccagtaaagtaaatcttccgcaatacgtcggtcaagggcaggccaaccgccgcacctgcggggctgacgtgcttaaacgacgctgccgccggcaagccgatggcttctttcaattcttttaccagctgccagctgttaaaagcgtctaaaaagttaatgtatcccggtttgccgttgagcacctcaatgggcagctcgctgccatcagccatgaaaatacgggaaggcttttgattgggattacagccgtattttaactccagttccttcgccatggttctgcctccttatttattcttattataaatctttgtctcggttttgccagtggccaaatcaatggagcggacaaaaagcgaaaccttgttgtcttcgtttaacgcattccacagcttttcgccgaatgcttcaaatccgtcttccatattcacgcgcaccggctcgccctcgaaagagggaatgggatttccgttttcccggtaggtgtggatgacatggccctggccgggcagtgcgtcagtgtagtcaaagaaaaagcgatgcaccgcgtccgggttgccgtcggcactcttcaaaatagaaagctgatagcccgcgctgcaaacggtgccggaaatacggggagtaaagttggggccatccggttcaaaggtccgggtgcgaagagcatcctcaaagctcatgcccttagccataaaatcatagatggtgtccgtctgatcgccgttggtcacaatggtgcttttgcccagcacccgaaccggcgagtaaatgatcagcgacggatcggacaatttagccggatcaaacgcctctgtccggattccttccccctcggtgacaaaaacccggttgcggctgttttcactgcgtcccatgataaagtatccaatcagcatatggcgttcgtctgccgaccgtcccagcacgattccacgtccgggatattcgttgcccgaaagatagtcgtacaagttcatcgctttcatcccatttgcccctttccaaagcgtataaaaaatcataaagtacaaattgtatttgttaatttcctgtttccgcgtccagctgctcgcacagcattgctaccgcctgcggtagcagcttccactccgcctgctccataacccggcgctgcaaaacctccggcgtatcgccgggcagcacctccacagccttttgcagcaggatccgtccgccgtcagggatttcgttaaccagatgaaccgttgcgccagtgacctttaccccgtaatccagcgccgcctgatggacccgcagtccataaaatccggcaccgcagaaagacggaatcagtgacgggtggatgttgagaattctctccggatatgcttcgatcaccggtttgcccaggatgcttaaaaatcctgccagcaccaccagttcaatgccgcggctttgcagcgtttccaccaccgcccggtcataatccgccggatcgacaaagcttttccggctcaccaccaccgattcgatccctgcgtttttcgcccgttccagcgcatacgctttctggttggacgccatcaccagtgcgatctccccattggggaacgccccggccttctgcgcgtcgatcagcgcctgcagatttgttccgccgccggaaaccaaaaccgcaattttgatcataccctcacccccttaccgaaaggaaacagtatgctcgcctttttgaatctcgccgatcactttagccttttccccacaggcgcagagaatctccaccgctttgtccgcgtcttcttttttgacgacaacgcacatgccgatgcccatgttgaaggtgttgaacatctcccgccgggggatgttccc

SEQ ID NO: 2490 - DNA, 32759 bp, Unknown
  16S sequences of unknown bacteria
ggtcggttcgtcctcatctccgtaatcgtcgtcaatcgggaaacgtgtgtctatctcgcccacatagtcgggttgctcttccgtttcttcctgttcggaaaaaatgcggtcaagctcttcgctttcttcgggcgataattctacaagttcaggcattttcggttcttcgacgtgagatttgatgaaaacaggttctttgtccggttctacaacgacaacgcttactttatcgagcagtttttcgatatactgttccgtaacgtgatacggaaaaccgcacatcggcactcgttcgggcaaaccaacattccgtcccgtgagcgttaaatcgagaatggtcgcggcttgttccgccttttcgcctattacttcgtaaaaatcgcccaaacggtacacgacaatgctatcgggattagccttttgaactcgtaaatactcagcataatacggcaaaatcgtcgatttttcttcctgagctacgggctgttcgtccgctttcggaattacaggctcgtccgaaacgtactcttcgtcaatgtcgtcgataacgggtacttcgttttgcttgttgtaaatcgcgtcgtttatgtcctgttgtaagacttccaccgctttttgcacttcacgaaataaatctgcattttcctgtaagccatagggatagcctttcagcgtgattccccgttctttcggaaaacccgttgtcgaatacaacgaatacgccacgccttctgcaatgagtctgttccttatctcgtcgttttcggttagaaaatcgttctgtccgagataagttacgactcccgaaagcataatgcgataatcgccgcggttactctccgcaatttccgtgccgttaagtaagtcaagcccgtccaaaatcttttttacgggttgcgttatgcgcctgtaacgattttcgccgtgcgtgtctgcaacgtcgaatacgaaatatttattcccgtcgctgtcgtaatacggaatgccttttcttccttttgtaactcttcgcccctgcgcgttccactcttcaaaagaaaagcatacgctcgcgttcggtcgctcgattacgatctgacaggcgtcgtgcaatgcgatatgcggattgttcgcaacgaaacgataaaacgttttcagttgttccccgtccgtcatcatcgcttgaattgcacgatttctgtctgcgtttcttctgatgtcactcaatttttcttccacctcctttgtctattttcctgcaagggcaactcttttccgaacacctcaaaatatatctgctgccgaagttcaaaggtcggaaagaatatcgcaaagcaagccgcagacgcacccatcgtttcaatcagaatccgcagatgttctctgccgaacagttgctttgtcttgagcttgtacacaaattctttttcgtcaatgtcaagacgttccgcaatctgacttaccgtgtagccgctttctttcagccaagaatagaacgcgccgctccgtaaggaatatccttcgatttttgttctgtctatttcgccctgttcgggcaaatgtctgtttttaatttcggtcattgcgtcctacctcctgactgccgttttttgttcgggattcataccccctcactactattggaaagtttcggggtgtcagtacacggtctggcagcataaatcttaatttttttctaaagtttttttcaaggcggcataaatacgttgcattgcgttacttactgcttgtttgcttatgccaaaatactcggcaacttcgtcttgcgatttgtcctcgaaaaaaaccatctgcaccatagcctgttgacgcggattaagttgtcgaagtgctttatgtacttgcttttttatttcggattgccgttcgctctctataaactgctcttccgggttcggattatcgtccgcaggctcgaaacccgattcttcatacatttcatcgagtgaagaacatttttcgtaatatgtatcttccgactttgtaaagcgatccatttcacggttcagcatttttaccgcttgttcctgctctgcggtttccacttcgactttggttacttggtaacggttaagtttgtaatagactttctttttcattgttgaaatcctccgattttgatttttgtgtttgaaaatcgcaatcggacagattcctgcccacaacgaaaaaagcccgactgcgaggtgtaaaatcctcacaatcgggcataaaaaggcatcaaaaaagaagcctgacaaatagactaaccctatgctttcaggattttactatctgtcaggctcctcttaactttttaataagtccagcctcataacgagatgtcagaaaagaaatacaacggcacttctttccccactgtattatttagttttttgagtttgaataaattcaggcgtgttgctttagtttcgcagaaacttctgtaggcgtaaagatcggctttttgctgatatgtatatcatcttcttcgatgataacggaagcaaattctccgcacttcggacactccatttccacttttgttccgttctcgcccttacacaggcgacgaccgcatttcggacacattgcgtatttcattaaatacaacctcctttctccctaaactcacaaacgatttgaatttatctaactgctacggtatggtcgggataactcctatacaatagtcaaacatcatttgtaatccaattatatatctttgcgttttcggggcaaaaacgcttgataccgatttaattatatatgtggatacagcttaccaaaacgccctgtatctcacagtctttgacgataatatctttcatttctttgttttccggatgaagcaccactttcccgttccttttataaaaacgtttcaatgttgtttcgccattcatcatagcaacaattatatcgccgttctctgccgtgttctgctttctgattacgacgagatcgccgtgcttgattccgatgtctatcatactgtcgccgtgcgtatgaagaataaataaatccccaccgccgaaaatcgctcgcgggagcgtaacgctttcttctatctgctccaccgcgtcaacaggttgtccgcacgcgatagaaccgacgataggcgtgattgccactccgctcggtttcaacttcggcaacatatctatattgccgagccttgtccgctctatcctgccgctgttttcaagcgcaaggatatacgttcttacaaggttaagcgaactcatattcaatgctttcattacctctctgaaactcggcgatttgccttttctcttttggtagtcgataatgtaactttccatattgtccaatgtcgtcgtgttgagcgttctcatccgtagtacctctttttactaaactgaactttgcgttcaatttagattgtagctgtattatatcacaaaagactatctatttcaaattttcatttcccaatattgggaagtgaacgatatttttttattttttccgaaaaaaataatgcccttaccgaagtaagagcatttgtttgagtttcatctcaatattcttcttttattttagcaacaaaggcgttaaattcatcaatcacctttcgcggtgatttgattttcactttaccctgcgttccgacgatccacgcaaagaatgtttttgaaatctgcaccgttacgtcaaccgaataggtttcttcatcggctttctttatgcgtatgtcatctccgaagcggtcaaacatatccgacaagatattcgccgtaaacagtaacgtaatgttctgactttcccctccgaacatcgaaaatacttgtttccgatattcttccgtgttgaacaattcgtattcggggtgtgactcacgctcaagctcttccacttttacgctttccattttatcgagccgatatgtaactatatcgtcgtgtcctttcgagaaacacaacaagtaataattgtccttgttccataccataaacgcagggcttacggtataacgattgccgttcttccgataaacctttttatgcttctcgtcgtaattgaagtacaggaacgatatttgcttgttctcgtttatcgcgcgttcaatagcgtccacgttataaataaatgaactgttaccccttctgcccttatcaagcgaaataatatgctttgaaatgctctccgcttggtgagtacaaagcgtttccgcaagtctttgagcaagtgctttcttttgtgcaacgggaagtttcgacgcattgataacgtccgcaagcataaccacttctgccgtttcaagcgaccgattgactacataatagtaatggtatttctttttgtaggaaagaacatcataaccgttgtcgcacaaagtcgctatatcctgaacgagaattttacgcgacacattcagtccgcgcaaggcaagaagctcggatatttcgtcggtatttaaggcgtggttctcatctgtgtttttacagagaatatcccataagacaagcagtttgattttatgcgcttcgtttgccataataattcccttatcagttatcggtcagatttttgcttttatactttaattgcgattgtattttcctgctccgcagtccgttgttcaacataaagtttcaaaagatccgccgcctcatcggtgataacgtgttccatacgacaagcattttcttccgcaatatcattgctcgcgcctataagtttcagcgcactcgcaatcgtctgatgtttctgctttatgttcttaactttttcaataccgcacttcgtcaatgttattttcccttgatgaaatgttacatagccaaactcttcaagacgtttcattgcattatgaacgctcactttactatatccacgttcatctgcgacatcaacagaacgtaccatcccgtttttcttttgcaacgcataaatcgtcgtcaaatacatttcttgcaattctgtgttttcaagcattttcctttccttatgaattcatcattctcttcttgcgtttcactacaactataatagtcacaactactcctgcaagaataactaccgctccgaccaaaatcaaagcgtatccccacatcggcatatgaaacgccacgcccggaatacagacgataaacgttcccgttttatccgttgcggtaacaacgtatcttccgtatccgctcgcggaaagttttgtcaaactgccgttgtcgtccatatagtaaacttcggctttcgtgcggtcaaaataatcgtccgcgcggaacaacagttcaactttaccgctcaaggttatgacttcgccgtcttcactcagaaattcagcagaataaacctcgaaattgtccgcattctttttcattgcggaagccgctttttcgtaaatttccgagccgaccgcaagttttcccgcgacgattcccgctttttcgggcaaaacgttatttgcatctctgaatttaacaatatcgttttcgcccgccgcggaacgaatcgtaacaacgtattccgagaacgaatcgttacccgatgatgtcttatattgcgagttaatcgccttatagaccaacttatacgttccgactttgccgagaacaagtttttcacccgacacatcgaccgcctcgtcgccgtaatacgccgaggtcgtgaccgggcaatcatcgtcgcccaagtttgccgtcgcttcgggaatcgggaaaaccgtgccgactttcaaagaatattcagccgccgctttcgttgaaataacgggaacaaattccgcaggccgttcgcctaaatcgcgaacggtttcggaagttttttccgacgaagataaatttagcgttgccgtaaaactcatctcacgcgacatcgcgtttatgtacgccgaaaacgaaagtttgcttttcagattgttttcggaaagcgtataggtataatacgtccaaccgtctttcttttcgcttgttttaccgacttctttcccgtcaaggttcaggttcagatagcctatcgacgaagagaacccgaacgtcatataatacttgccgccgaatttctccacggtaacgggatttgtaaaattatccgcacccatcttcaaatcaaggtttacgggaacggtatacgttccgtcaccgccgcttatcacctgctcgcttgcggcatagctaattgaaaccgattgaaacaatccgcaaaggatcagtgcaaataccgctatacttacagcaaagatttttttgaattttaccatacttcatttccctcgctgcctgtaaacaccgcgacaagaacggtatctttagtgaacttataggtcgataagtcaattatagtcctgctttcatcgccctgaacaaaccaacccttaaacgtataacccgtttttgcaacgaccgttctgttcgactcaagaccgtttccttcaattacggaatcgtttcttataacagaagcggaatatgtcgcattgattgaatattttacggtaagcatttttttgtatacggcgttaatcgtaaaataatcgctatcatcggtaacttcgttcagataaatttttccgtttttaacgccatcgcccaagaaaccgcccgtccaaccggcgagaacagttccggcaggcgcataaactttatacacggacaaatcgataacataatatccgcttgaagaatccctgaaataatgttttactctatcgtcgtttccttccgattttgcggtaacggaaataccgccgtcccatattgcatacaacgttacgttctgcgaattatacctgcttataaaattgtctatgccgtttttaacgacgtctttggacgttgcgtccttgccgatatattgcgtccaaccgaacagaatatcgtttcccgcaaattccttttcgttaagcgcgttgatgttgttgctcagattgtatgttaccgtccgctctaaaagcccgtcggaaaaaggatgatccttatccgtaacaaacgtgatcgtaacgtcgcagttatccgataaaacgttgacgatctgcccgaacgaataagacgttccgtttatcgaaaaaccgaaaccgacgtaaaactcacccgcctcgttaaacttcaaggaatattcgtattcgcctttattaagcgtataagtcctgtttgcgtaaaaactgttgtcggttttaccgccgattctgtgtttaacgcttacgtacgactttgcgatttcattgccgtcgtcgctgtaaaggcgcggaatgttcatcgtatacaaagtgtttgcaaaatacgaattatatttcagcatatccgtagttttttcaccggaaaatcctacgccataaatataattactgttgaatttatttccaaaatacgaaaattcaagcgatacggtaaaccaggaatatttttccgtatagccttttatttctttcattacggaatctatatcgccgcttccgatatcacgagaaatcgtcgtactacgattgtttttatccaccaaaaaggcagaaaatcctgtcagactcatacgagaaggcgcgtcgtcgccgatcatcatactgaaggatctcgaaagtttttcgtcgcagttatccttagtcagatataccgactcgcttgctttgacgtcttttatttttccgtactcgtcgtatttaacgtcgccttcgtccattatttcaccgttatcggactcgatacggtacgtttccttttgcgaagtaacgtatttgaaccgaataaattccgtttccccgtacacgtttacgagttcgtagcacacgtaagtttcatacgcggacgccgtaaaatcttttttctgatgcccgatatacgtcaaagaataaacgccgttcatattcgtgaaaatgccgacgtgaagcggatttatgcacgattcgtcgtcgtaccaattatttctgaatcgcacgtttttcacgcccgtccacgagtaagtaagtgccggcaactccaccgatgcaccttctttatctatcgtatcggaaacgtaggcattatcttcttccgaccatttccaagcgtgattttcgtcggttattcgataatccggattgcttttttcgacgagttcgacgatcgccgtttttgtgataccgtcgtcatccgtaaaggtaaacactattgcacaatcggaagaaaacgcaaaagccttatttaccgtgatttcttttgaaaaatcgattttatcaccgcttaaagcaaaccctttgtatcgaaccgtcgaaaaatcggtgtcttcggatactttttcgcggtaaatatcttcgagccttaaaacatcgccccgattgacggtttttcctatcctgaaattcgacgattcacgcattccgttcgcgccgaacgtctgcacggacatggaatcgtagtataattcttctccgttctttctgcttttttcggcgtcatacccgtatatatttgtctgaatatcgaaatgggctatctcatatcttgcttcggatacgtttttcgagtttgtttcgtcggtaggtctgaacgttattttactgttatacactcttctcgcggcatacggtgcgtttacgtcggttgccgaataccagaagttgatcatccttgttgacaaaccgtttttcagcgtttcgtcataagtcaagtttttatcgttaagatcggaatagtttccgggataaaaacttcccgacgtttcaaaagaataactatcgcccgaaagttctttataatcgacgttttcgtcggatagttttatgatatggtcgtaatccatatacaaaatctgcacgcccgatcccataccgcctgcaacctccataaagcccgaaacggaatacataattccgaattcgcgcttgaagtttgttccgagatcgataaccgaatataccttatagtcgtccgtatgaaattccaccgaataatccacgtatttcttcgctttgtaagtttcgggataataattcgattcgacttctccgtcaaagcccgtcgtgtcaagctcgaaacaatactgattgggcataaaagacatcattctgtaaaacagattttgataataaggttcttcgagttttccgagcgtaaacttaacaagccccgcataaggcgtaaaaggcttaatcagtttatatttcccgttttccgctttcagataagaaaaaaccgaattgaagccgtcacccatagacgatttattttctatcgtcttattataacttcttacaagataatatccgtcctcaagcggaacgcttgtatcgacgtaaggcgtcttaaatcctatcagccttgttattctgaattcgacggtataagttgtggtcgtaccgtatctttcttcatcggaaagcccttccgcattccagttagtcgtttcgatatcgagatatacggggtttgataagtccgtatccgttatgcggatatatatcgttttcaccgtatccgaaagcgaattcacgctttcttttatataaacgcttgacggatttttagtcgcgtttaccgttactttataggaatcggcaagcgcgccgtaaggctccggatcaatgcagtcgtattcgattttaagcaataaatcgttatccgatttttcaatgtatgtattttcaaccgaaatgttttcggggaattttttataaccgccgaattcatccgcggtctgccctttttttatcgtatcttcgagaatttcggcttcaaaatctatatcgtacgttccgcttacggtcatatcttctttaagccactttgcataaagcgttacgtcgctcattgtcataagtagcagattatcctgatattgcgtatgatattccttatcaaaaaaccagccgccgaaaacatagccgactttctgcggcgaaggtaaaacggggatgctttttgccgtgtacgtcaaatcttccaaaggttcgtcaagcccttcggacgaaaaagagattttatattccgtatcgccgtacgcttctttaataacgtcctgcggcgtctttacgtcggttttaccgcaagcggaaaatgcggcgagacatgcgacgcacaatataaatataacaacttcagaaaaaaactttttcattgcaccctctataaagcggaatcgtatacgcccgcaaaatcgggcgtataccgttccttttgtctcttacaggtaaaaatcttcgtgatcttgaagcctactcataaatgtattttcggagttcgctctgccgttgaaccagccttcttcaaagagggaagaatcctgattcttgactttatccgcgtccatccagatatcaaatgcgcagttattgtatatggcataatgcgtttcttccatatcggtaaaagcattcttgtgaatctttgagaagataccgaaagagatataattgaaagcgtttccgagatagtataccgagccttccatcacttcgtaacgataaacgtaatgctgttttgccgcgaaatcctcactccatgctccccattcgtatgctttaccgcgaagcgaataaccgattcccatatgtccgcttgcgtcattgaatccgcccgctgtcgccacataacgaacgtcgtaaatcgtaatcaaatcatcgtttcctacgttgtctttcatcgttttcgtgtcggtattttttacatactgcataataccgtaataatcacccgacatactttccacgaagaaatactcaccggctttcgcagctgccgtcagctttctcggattatcctcgttaccttccgattccgttgcggtaaatacaaagatacccttcgttttgaacgcataaggttcgatattcttcatttttgcaagcggcaatacgaatttgattccgttctttttgatgttttcatttacggtaatcgtttctccgtttacaacgcatcccgcattttcaaacgctcttgttttaatctcttcaagcccgccgtccgaaacgatgaatttcgtaaggttagacgtgtttgcaaacgccttttcgccgatacttaccacctgagaaccaacgtaaacttccgaaatatagttattgtctttgaaagcattgtctgcaataacgaccttgtaggtctttaatgcctcatcgtcaaaactgatacaaattctgtaaactccgccgagatcgaacgccgtatctttatcgaatcccgttacggtaatcgtttttgtcgcatcgtctttcgtgtaagttacgccaagaatatttcttgtataggttactctgagatacaggttgtgatccagcgtaccgggggtgtaaggcttgccgagttcggtaatttcataagaatagcttccgtcgttgattccgatagcgttaagaatttcatcaatcgttaaagttcctgccgactttttacccgttatggaataagtcctcttcgtcgaggaatctcttgtatcctcacccactatgtgaatgataactgcttttcttttcttaaccgcgcctatgcaaacaaccttttcgagagtagttccgtcgctttcggtaagttcggtatacggcgttttgccctgcgtgaaagcatattcgctgattccttccggcatagaagcgacgttcagataaacgtatccgaaatcgttcgacgtaagcccgctgaacacggaataagaatcgatcgccgatttttcgtcgggggcttgtactctctgcatatcggtaagcatagaacccgtataatacgaaagttcgtacgttgcgttgttttcgtccgatgtataagaaattttcttaaacgtggacggaagagaaatatatttaacggtcaaacctttaaatgctccgacggatacggcttcagcgccttccgcaacggtgagggtttcattggcaactttatcctgataagtacaaacaagcgttttataagttacgccgccgacagtacggtttctaaaaagttcgccttcctcgtaataatattcgctaccttccgcaaatttgagattggacggaacggttacgagcgtattaacgctagcgggaatgtttacggtaaacgggaacgcgctcactcctctgtaataaccgaccattccttccatataatcgccccaaagcgaatcgataatgatctcaagcccttcgggaagttcgagagatttaagatttctcatattccagaacgacttttcaagcactttaaggctcgcgggcaatttgacggtttcgagtttcgtgcaagcctgaaatctgttgatatattgaatgccgtctgcaaaatacgcatagaccgcagaatcgcactgatcgacggttgccgtatacattcccgccgaaacggagaagtccgccgtaaccacgttgcaatctttaacgccgtcaatcgttacgtttttggacaggaaagaaattgcaggaaatctcttgatattctgaaactcttccgaattgctcgacttataatcgaaaccgacgaccgcataatcgtttgccgtaccttcaatcttctgatatgcaagatagggtgatttccacataaccttgatagccgtatttttcgtaattacaagcgaggaaaagtcaacggcgtttccgttctcgtccacataagacaaatcttctttatccatataataaggaacgaaatcttcatattccttatcgggggctttcatagtcgaattgattccgacctgaacgctctttaaggtttcataaccgttatcgaacgtaaccgtagcgcagtagcgagcgtaaaggttgtccgcatcctgcgtgttgtacttcgttccgtaagcggcatcgatataccaaccgtcgaacgtaaggtttttgcttgtcgcgtcctccgtgtattctgttgtctttcccgcaagttcttcgagctttatatcggtagcggcttcaccgttaacggaaatgccgacgtgaacaggcgcaaaatacgcgtataccgtaagattttctttcacttcggtatctttggtaaattctgaaccctcgtcgaaggtcgaagttgtataccaaccgcggaattcataaaattccttttccggatcggcaggcatagtcaccttaccgttcaccacgtccaccgtttgcgttttgccttcaacggtaaacgtaaccgacagatccttgcttccgcacgctgtaaacgcgcagacaccgacaagaagcatcacaagacacataatagcaccgatgacgttctttctgaattttgtcattttgaatgacctcctaaaaaaatttttgtattgtatgttcactcgctttcgcgggaaaaacatctgattaaatatcgtatctcgccaaaatctccgacggagactgtgtgagaacgaacaaatacggaataagcgatatgcaagtcattgccgctgcgcctacggcaaaacttgccgccgcaagacctataaagcccgcgaacgctacgttcataatcgcgtatcttaccgcaacgagcgcaaccgtgatcgccgagaacacaaagaaactaaaaacgttatgaacgaccgccgtgacgcactctttgaacaaaagattgcctttgttgacgccgattgcacggtaaattccgtactctttactgtttttgatacttgccgacttctctatgaagaaatagatgatgagaagcaggacgatcacgagaagatagagatacaacccgcttgccgcgtcttgtttttcttcttcgttttcctgttcatacgccgcgccgacgtttactgccgttacgcccaaatcccttaaatcggatttcagcgaagcaagttgctccggactttccgtagttatctcgaaataatactgtgaacccgtagacgaaagcgcgtcgaggtttggcgatatgtaaacgaaaatattatgaagaacgtttttgttgacgtaaacccgaatgtctgtgtccatgacatcgcgcgtgatttcgaactgctcaacataaactttactgcccgttacctgtattgcgtaaggcgtatttttcaaacgggagttcgttttgttgacttcaaagtctgcctgcgtggtatcggtcatcattttgtagagcgaatttctgttgatttccactctgactttatcgtttgcgatctcgccgtcgtacagcagaatctccgccgtaaacgaagccgaaccgtaagtatctttgaagaagatctcttccccgtccgagaaaccgattttgttatacacgccgaggaaattgacgtaatcttctttgttcagataaatgattttatcgtcgccgcccgtgatacctgtaatcggatattcgccgtcaaaggtcatcagcgtgattgctttatccgtattcaattctttcatacggaattctcttttgagttcttccgccattttgcgggaaacaatcgcttctcctttttggggaagtctgccgtattctacggcaatttcatcgccttcttcgattgccttcggcgtatatttgacttctatacccgaaagactcgcaagcccgccgtatgagaaacttcccgttctcatttccgtatcgaagaaatcaatactcttgtagtggctttcgtccgttttcctgagtaccgaataagagttcagatttgtataaacggtattttttccgagcgttttgttttcggtaaccgccgaaagcgcctcgaacgccgagaacgagaaaaacgtcattaccacggcaagcgcgagaataaatatttgcttgaatacgttgccgaccgaatacgctttttcgccgcccgcgttattacgcttgaaaattgtctttaaggtaaacagtctgccatttcgcttcgccgtacttttggtaaaggtggtcagaacgctgtgcgtttcgttcccctcttttatgttgtcgtaagttgcgggcgcaaggtcggtttcttctatttcgccgtcctctacaagctcgccgtccacgatttttatatggctgtcggcatactttttgataagcgaaacctcgtgcgttacgataaccacaagttgagttttggatatttcctttaatatatccatgaccttcatcgtgttttccgcgtcaagattgcccgtcggttcgtcggcaaggataacgtcgctgccttttacgattgcacgggcgattgcgactctttgttgctgtccgcccgaaagcgcgtcgccgagtttgtttttgaaacgctccatatcgacgagcttcaacgcttcttcggtgcgacgggcgatttccttttcgtccttgaaccccgcgataatcatctgatttctgaggatttccgctatcgtgtagcctttttcaagatagtagttctggaaaatgaagccgatttttgcgtttctgatcttatcggttttaccgctcgtacattcgccgtcgatataaaccttaccgctatcggctttttcaagtccgccgataatattgagaagggttgttttaccgcttcccgatttaccgaaaatgcacgtcaagcctttttcgggaagttcgaacgaaacgccttttaaaaccttgtttgcgttgcgggagtgtcggttaaacgtttttacgatgttttctactttgatttttgacatattaacctttcgacccccttctcaaagattttctgatactctgccccgctatcgcacggttgaagccgaacgctacgaactcgacgattaagagcagcatgatttctataaagaagtaattgcccgccgaaataaatgcgattccgcctcccggtatcaccgccgcgattaaacttacgagcggcaaaaatacgattgtcggcaggaatatgagcgccatctgaatataaagcgaacgcgacgaaattttgcttgaaataccgagcgttctgtaaaccgcgaagtcggtttgaaaaacctttacgcttcttccgaaaatcacagatatgagagcggcaaacaaaaggcaaaccgcaatcagcgcgatatagtagattacgttcatcgcgtaaacgtcgcccgcgctttggacgtatactttgctcgtggaaagcatacccatcatgccgtccgggaattttccgagcgcgttttctgccgcctgatcgtcggcataatacagcgccgattggcttgcatctgtttgttcggtttcgaaaatcgcggcgtagtcgtcgggattcattttaacgatcagttttccgcttctcgtttcgtctttttcaccgtcggtcgcaacttcgtaagaccgatttgattttaccgagaaaaccgcagaatatttcgttgcctgataggtattggaatttacaaggtttatttttccgctttcaaccgcttcgtccttttcaaaggcattaaccgtaacgactgtttcgccgagtttcatcgtcgtattgatcgccttgattttgactccgttttcttccgcatccgcgtgggataagtaaagaagaacgttgccggaagaaagcgtcgttttaacgcttacactctctattcccgcatttgcgtttacaaacgtttcgacgattgcgtttttatctttttccgcagatttcggcagcaccaaaaccgcttcgcttctctttaagttatattgataaggcgcatacagacaagtgacgctgtaagccgaaagcataccgcttctcttgggaacgtttaccgtaaattcggaaaattccttatccaaaagatagaagcctgcgtttgttttccctgccgcttcgtcaagatcgtcgtttgtaaggtttcccttttcgctcgaaacgattacctttccgttcacgcccacggtatcgagcgaattcgtaacgggtttaatgagcgatactccgaataccgacaacacaacaaacagcgttaccgcgcatacaagcaaagcaaaactcatcatcgccgtgaatttcggtctgcttttgtaattcagaacaccgatatgtaagatatctttaatatttttctttctgctttgcttaacttcggggatttcaacgtttttcgtttccgtcggcttttcgattactttatcttctttgacagagccgtcgaaaatggtaattcttctcgttgcgtattctacgaaaaattcgggattgtgcgtaaccacgatgacgagtttgtctttggaaacgtcttttaatagttttgcgatttctctcgaagatttaacgtccaaattccccgtaggctcgtccgccaaaataatcggtgcgtcttttgccaaagcacgagctatgaccgtacgctgtttttcgccgcccgaaagtttactgccgcgttggttgatttgcttgataagcccaaccttttcgatgagttctcttgccttttcgcggcgagtttttttatcgtcaaaacgaagcaacgcaagctcgacgttttcaagcaccgtaaggttttctataatgttgaaatcctgaaagacggttgcaatatacttttcgcggtatttttcccattccgtcgcgccgtaatgcgacgtttcctcgccgtttatatacagctcgccctcttcgtaactgtcgttcgcgccgatgacgttcagaagcgtagatttaccacttccgctctcgccctcgatcgttacgaattcgttatagtcgaaatcaaggttgattccgcgtataccgatcgtcagaatatcgttgctgtcatatatttttcctatgtttttaagtcgtaacagcaatgtttttgctccttgtttaatgcctctttatttggttagccaaggctaactaaattccattttataaccgctctttcgagcggttgtgtacaattaggtattgtttgctgtattcgtcagaatacagcaaaaggcgtacgccttttgcctcgcttggattcaatttctttactcgttatgtcgcttttcccaagtgcgccattattatagcatatattccattttaagtcaatagaacaacgctgaaatcaagaaaattagcgtaggctaaaatttttaattaactccgatttgaatgaaaaactcatcgacaagctcttttccgccggttttataggtctttccgttctttatccacacggatttatcgcataaagcggcggcgcaacgcttgtcgtgcgtaacggttatcatcgtgttatgcgcttcttcgtgaagtttattaagaacttcaaccatttcgcataagcctttgtagtcctgtcccaccgtcggctcatccaatatgagaacttcgggatctgttgctactaccgccgcgatggaaactcttcttttttgtccttccgacagcgactgcggatgacgggcgtataaatgctttatcccgaatttttcggctatttcgtcggcatattcgtccgacttcgcgccaaatttgatctccttttcgaccgtctgcataaaaagttgatagtcggggttctgataaaccacgcccacctttttataccactttttgctctgtttactcttttgtccgaatttgtcgtctatattctgcaaaatcacgccgcgagtaggcttttcaagacgggaaataagtcttaaaagggttgttttgccgcaaccgttttcgccgagtaaaaccgttcgtgagccttttaatatatcgaaagtaactccgttcaatatgtctcgctctttcaccgcaaacgctacgtccgcaagcgaaaacgcgggtaacgtgccgctgaaagtcgaacaggtatcttctatttcggttgactgctctttcaggtaattttctctgtcggttatctcgtttacgtttctgtttccgacgtgaaataccttatccacgaacggcagaacgacgtcgagcctgtgttctattacaataatacaatatcccgctttcgcaagagattttaatgtggacatcagcatttccgcgcccgccgtgtcgagatttgcaagcggttcgtccaaaattactatcttctgccccatcgcaagcgtggaagccgttatcagtctttgcttctgtccgcccgaaagtttgcggctttgccacgacttatcgagcttcataaggcgacaaaccgtgtctatctgtttgcttattttttcgggtgaaaacgcaagattttcgcatccgaaagcgatttcatcctctaccgttttttgtataatttgttcgtcggcattttgtaaaacgacgcccactttgcggcatatttccccgagtcgtttcccttgaatattttcgccgtttatcagcacttctcccgcaagttttccgtccgtgatattcggaataatgccacttataatgtacagaagcgtgcttttcccttcgcccgaatgcccggcaataagattcacttcgccgtaagaaagcgtgagatttacgtttccgagaatctgcgtttttccgtcgtaggaaaaattaacgtttttaagttctatcgcgttcataacaccaccgtacaaaccgcgcccgcggctatccctaaaataaacagcacgtccgatatgcatacggtctcttttttatacaccgtatacggcgttttttccagcgaaaatccgcgcgtttccacggaaagcgacaatgtatccgaaatgttcacaagccgcattacaagcggcaccagaaaagccctgtaaaaaatcttcgggttgaacacgcttcccgcaccgcgcgttttcatcgcttctcttaccctttttatctccgcgccgagtacgggcggaaatgaagtcgcgataagcataccgagcgtaacgcctctcgtcattttgagcgtggaaagattcctcgtcatatccgcaggttctacgctcataccgagcgcggcggcaagaaatacggaagcgaaacggttagccatggcaatcgcggtattcaggtcttttccgtaagcaaaatacgcgataacagcaaataatccacctacgataataaacgcgggcaaaacgcgaaagcaaccttttcggcatccgaacagcataagccacacgaaacatcccgccagaaagtaagaacatttgacgttccttgccatgcacaatccgaatataatcaaaaacaggctcgcaagaaatacgaatatgggatatatcttctttttgaaagaccaaaatctcattttttcagaactccggcttttttgagctcccttgcgataagcataccgaccaccgagccgacgaaacagagcgcgacgacggcaatcgaaatgccgacaaccacgccggggttcgctccgccgagaaacatactcgtagccgctttttcttcgcccgtaaccgtgtaaaacgcgttgtaataaagccacatcaaaggaagggtgagcggcatataaagcgttcccgcaaatacgcacgcccaatcgtttttatacccgcggaagataagaagcgcaagcgtttccgaaacaagcgcgcacacgataatcagagccatcggcgggaacataaaaatcaggaatacagatataaatatcgactgaaacagaagcgcacccggctttcttactttcatcatcccgattacgggaaaaatcgaaaattgaagtcccaaaccaagttgcacgataccaaagaatggcacgtttacaagtaacggcatcaccgcgcccgtaataagcgtgcaagccgtgattatcgcaagaaatacgatgtctttaattttgtatttcttgaatatctttttgtcgtttttctcttccgatgtcgccgatttttgtttgtttatcgacttataggcggggttttcatcttcggaatttgcaataagagccgccgccgcttcttctatatcactcaatttcttttgttcgtccattttacgcttcctccgtcataacgccgcagtcaaccttatagattctgtcggcaatcgccattgtagattctctgtgcgatacgagaataatactctttttgttcttttgctcttttaacgcctttaagataataccttcgttgatactgtctacgttgctcgtcggctcgtcgagaagaataagttcgctgccgcgaaggaaggcgcgggcaagcccgatacgctgtttttcgcctgcggaaagattatcgccgagcgcgccgacctgcgttttatatccgtcgggtaaagtcattataaagtcgtgaatcgaagccattttacaggcgttttcgatttcttccggcgttgcgtcgggcttcgcgatacgaagattatcctctatcgtttcttcaaacaaataggtgctttgcgaaaccatagttacgtttttcaaaagcgaatttgtgttgattttatcgatatctatatcgtcgtaatttatttcgccgccgcttctctcccaaaatctcaaaagaagtttcaaaaacgttgacttgccgcaaccgctttcgcccacgatacctataatctcgcccttttcggcgtgcattttgatatctttcagcacctcggtctgtccgtcgtaactgaacgaaagatcttttacgtcgagtttttcgtaatcgaaatctttaccgcttttaaccgcttccaccgcaggtttttccgcgagaagattaagcactctgtcgccgcttgcgaaagtctgcgtaaggttgccgggaagcgaaccgaccgcgattaccggaccgaacgacgagaacaccgttaccataccgataatcattctgcctaaaggcagcatatcttttttgacaagcaaaattcccaccgcaagcgtgatcagcacgaacacggacaccataagttcgattgccgaacccgcgcaggtaatgttgtgcttcatctttttggtttctttcaggagtccgtccgaacgcctgtttacttccttttctctttcctcgcccgcattgtttaaaacaatatctttgatacccttgatactgtcaaggaaatatgccgagaacgaagcaaattccgcgcggtattttacgccgctttccttgagttttcccgacgagataagtggaactacaatgccgattgtaaggaaacctgcgagagccacgagcgcaagataccaactcgaaacaaaccctacgaacaggaacacagccgtagatacaagcacggcaatacagatgggcgaaatggtatgcgcatagaaaacttcaagcgtttcgatgtccgaggtgatcattgcgataatactgcccttttgtttgctttcaagttttgcggggcaaagaacgcgtaatgcgccgaagattttatctctcaaaaccgcaagaagtctgaacgcgatatagtgattgctgtactgctcgaaatagcgaagcagaccgcgaagaactccgcaacctatcgtaagcccgataatccacccataggaaagcgcaattgcttctccgagtgccttcgcaactcctaccgcgccgaataccgttacgcccatcgcgcagacgaaacccacgcttccgtttataacggctaaaatcattatgtaagacaaactaccgagaagaagtattagacttgccattattttcgcgccgcttcttctcaaagtctttttctgcgtactcattctaccacctccgcataagcctgttcaagcgttttctgcgcggtataaaggcgcgcgtatccttgccgtgccgccataagcttttcgtgcgaaccgctttcctttatctcgccctcttccatataatagatattgtctgcgggaacgacgtttgctaagcggtgcgaaataacgataacgcttttgctttccgaaatcgccttgatattcttcataataacggcttcgctttcgatgtcgatattgctcgttgcttcgtcgaaaacgtaaatatctttacccgatacaagcgcgatcgcaagcgcaaggcgttgtttttgtccgcccgaaatgttgttcgcgtcctctgtgataaccttatccaacccgccgttttcttcgataaactctttcaggttcaccttttcgagtgcggcgaagatttcttcgtcggaaacattttctttcgccatcttaaagttatctctcacgctttcgttgaagatataggtattgtaactgaccgccgaaaggtgcgaataccaattctcgcgcgacagcttttcaagctgtttgccgccgacggtcacttcgcccttttgcggacggaacgcgccgatcagcatattgacgaccgtagattttccgcaaccgctctctccgacgatagccgtcattcccttttcggggaaggtcatattcacgtttttcagaacgtcgcgtttgccgtcgtaagagaacgtaacgttttcgagtttaatctctttgccgtcaacggtttccgttccccattcggggtcgggtgcgtttagcagcgaaataatctttttacccgcgcttgcgccgttcatcgcaacgtggaatgccgaaccgaacgcccgaagcggcaggaaaaattcaaccgccacaaggcacaggaacaatgcagcaatcgggttcagtccccaaaacgccgcgccactgattgcaagcgcgatacccacgcccgcgccgccgtatgcaaccaagtccatgatcgtggtgcttgcaagttgcatgacaagaaccttcattgtgatgactctgaattcttccgcgctttcgttgatcttaacgtgttgagccgcgtctgcctgaaagattttgagttctttcagtccctgcacgctgtcgaggaacttatcgcccatcgaagtgtatttgccccaatattttgcgaaaatcttcttcgcatacttacttaccgctacaatagatacagggataagcggaacgcaggcgataagaacgagagccgttctccaatcgatccatacgcatatcaagaacaatattacgggcgcgatcatcgcaaaaaagaactgcggcagatatgacgaatagtaaaggtcgagttgttctacgccttctaccgaaacctgcgtcaagcccgccatactcatcccgtcggtagtcttaacgccgagttttacgattttattgtatactctttcgcgtaaatcttttttaacgcttctgccaagcttgtcctttatatcgcccgtagcgcgtgaacagctatatcttacgataataccgataaccgcgccgataagcggataaataaattgtatccattcggcgttctgcgtcaacaggtacacggcatagcagacgctccccgttatcgtaacgttcgcgattaaacctatcgcctgcaacaatacggcgataaatatgtacttcttatttccgccgatgagtttaaatagttctttgtctatcatttgtttgctccttgtcttaatcaatcagtgcttgctgcgcgcccttcatttctgactttataaaatttgccactccgttacgggttacgtccgaaaacgcgcaggtggcgttaagagcgtcttcataagcctgattttcagtcgttccgcaatgtaacgacaaatgcgccgacataaaacgtataatcgtcatatactcgttcagaacttcccttccgcgatccgtaagaacgattttcctatcattcttctcgatatattctttttcccgcaacctttcaatcgcgttatacgcactcacctttgttacgtgaagtctgtttgctatatcagtctgtttaaccgactgcagctctttggcaaggtcgtttgccgctatcagataccttaattccgacgaactcatatgtaactcaccatccgttttatttggttagcccgcgctaaccattcctaaaaaaattttgcgccatgcttacacagaagcggttagttaaggctaacttttgcgcaaaaattaacggccttttttcccaaagccattttttattatactcgtatatagaaaaaagtcaaccgaaagttagcggttgactaaaatttttttgtatttacacgttaaaatattttttgatagcctcgaacgcttcttcggtgataacgtgttccacgcggcaggcgttttcttccgctgcctcgggcgaaagccccatcactacaagggcttgagtcagcgatttatgccgggaaaaaatattttcggctttatccttacccgtttcggtaaggtctataagtccgtcggcatgcacgactataaaaccgtcttttttcattattcccacggcgcgggaaacgctcggcttagaataaccgagttcttccgctatatctatcgcccttacactaccctttttcttttttaatctaagtatcgtttcgagatacatttcctgcgattcgttgtctaccatatttttctcccgcgctttttatacattatatcacgttactttgaaaaaagcaattgaaaattccgtccgggctttaagtcggattttcctccgaaggacggcacaattatttaattttccactttccgcttgccgattgcaaatccaccatacgagcgtaaatgccgtttttattgtacaactcactaggttttccctgctccgccacgacgccgtccgccaaaaccacgattttatcagctcccgcgaccgttctcattctgtgagctatcacaagcacggttttatcttttataagacgggaaagcgccgattgtatcatcgtttcgttttccacgtctaaacttgccgtcgcctcgtcgagaagaataacgggggcgtctttcagaaacgcgcgcgcgatcgaaattcgctgtctctcgccgcccgaaagttcgcatccgttttcgccgatattagtgttccatttatcgggaagtttttcggcaaactcgtccacgtttgcaagccgagccgccgacataacttcttcgtccgtcgcgccctttttgccgagacggatattttccataatcgtgttatcaaacaaagttacgtcctgaaaaacgatagaataaagactcatcaatttttcggggtcgatttcggcaacgtccattccgccgacggtaattttacctttccgaatatcccaaaaccttgcggcaagccttgaaaccgttgtttttccgccgcccgaaggaccgacaagcgcggtgacttcaccttgctttgcggtgaatgaaacgtcttttaatacaacttcgccgcccggatacgcaaagccgacgtgatcgaaaacgacatcgtaaccgctattcgtaagcgtgtcgtttccggtctgaacgggatattccagaatttcgttcatacgcgcaacgtttgttcgcattgcgatgattgccgcaagattctgaagcgccgcctgcatcggatcgtaaagacgggaagcgacaagcaaaaacataaagaaggttaaaactccgagcgttccgtttacgagcagagccgaaccaaccaaagccacggtggctatgccgagttttaaaaccattcccgcgcccgttacgaacacggcggtagtgagttccgcttttatgttactcttttcaacgcccttaatcttattctttaatcccgaaaggtagtttccttcggcgttgtttgctttaagatcgcgtaccgtttcgatatattcctgtataccgtccgcgcacgacatttttgccgtcataaatttaacaagcactttatcctgtaccttataacttaaaatgacgataagaaccgaaacgggaataacccaaagcgcggcaagagccattcgccaatcgaaaacgaaaagccctgcggcgataagaatagttgaaatcaacgagccgaacagtcccgggataaaatgcgaagtactcttttctatcacttcgcagtcggacataatcgtactcgtcaggtcggcaagatctcttttgccgaagaacgatagaggaagtttacgaagtctttcggctaaactaagtcttctttttccgctttcttcgtaagtggtaaaatacgtgttgttatactggaaccatgtggttaaaaagataagcgcaaagcatatcacgcatccgacgacgtaaaaagttattcttccaccttgcactccgccgccaagcatatcggaaacgagaaagtataaaagcgtggtcggcaacataaacgccatattctgaaacgcgcaggcgattattcctttaataatcccctttgctccctgctttgaagaagccgtctttttttgtatcgttttaacgagcgacattgctttcaccctcctttgccactttccattctaccgacgcggcatattctttccacatttcggcaaacaccccgttcttttcgagaagttcgtcgcgcctgccgctttccgctataagaccgtcttttattacgtatatacaatcggcgttagccacagtcgaaagcctatgagcaatcataataaccgttttaccctttgaaagttcggaaaacgctttctgcactttggcttcgttatcggggtcggcaaaagccgtcgcttcgtcgagaataataacgggcgcgtttttcaatacggcgcgtgctattgctattcgctgcctctcgccgcccgaaagaaatactcccttcgtaccaataaccgtgtccgctccgtcggggagtttttgtattatatcgtcgcactgcgcagtatgaagagccgccgcgacttcttcgtccgtcgcgtcgggttttccgagttttacgttttcggcgatagtcgctttaataagttttgaatcctgaaaaacaaacgaaacggcgttcatcagttcctctttcggaatttcccgtatatccgcgccgccgacctttatgcttccgcttttcacgtcgaaaaaccttgccataagccccgcaagcgtggatttccctccgcccgacggaccgacgagagccacggtctgtcccgcgcctatattcatcgatacgccgcgaatcacttcgtttttaccgtcgtaggaaaaatgcacgtcgttaagttcgacggacgaatcggcgggatactcaggggtttcactttcactcatgggactgacggataaaacgccgtcgatgcgttcaagcgcgtctttgacaatcatattgttttcgctcatatacatcattttagtcaaggtaagcgaaataacgggcgtaatcacgatataaaagataagattgagtaaaaatccgttcgttacgccgtctgccgtaaaccataacgccccggcaatcaaaaaggcaaatacgccgtttatcgcggctgtgtaaaacatcataggcacgcgcatatccttcgtgtaagcgactacccacttctgatattcgtctatcgtacttttgaattttttgaacgaaaaaaccgactgcccgaacgttttaactaccggtattccgcggacgtattcaaccgcttcgttggacatattttcaagcgcgttgttatattgtttcattttttccgccatatgcttacccgtcatcgatgacattacaagaaaggcaagcacaacgggaataaggcttaaaagccccaatcgccaatcgaaaacaaacaaaagaacaagaagcccgacgggcgttgccaaagccgcatatttatcgggcaattgatgcgcaagataagtctccgtcgcacctgtggaatcgtttatgatttttcttaattttccgctgccgaaactatccgcaaatccgagcggaagttttgctatatgctccgtaacggccacgcgcatattcgttgcgactctgaacgccgcaagatgcgaacacataagcgcgcttatatatacaagaaatgatacaatggcaaaaatcattgccataatcccgttatgcacaagcccggttgccgatgaaaaattcggggcaacgtcaagcacttcttttattatcttccagatataaacaaaaggaagaagcgcgataagcgcgcttatcaccgcaagcaaccacgaagcgtaagtaaaatacctgtgcttacccgcataccccataagccttgaaatatttgattgttttttcaatgtaaaacctccctggattggattttctggttagcagcgtctaacaatataacatataaaaaaggaaattcctttccctttttaacaagtttattattcgggcaacgtccaatcggacggaagccctaaaattttatcccaaccggcgttgaaaaaatactgtaactgttttatatattgccgcgcgtcgtcttttgaaaagtcatgtcccaccacttcgaacattccgttgaacatcgcggtggcaagcatatgcgaaaggtccgctcttaccgacttaacctttatccccgcagcgttcatgtcgtttataaaacgaacggtattttcggtttcgatttcgataagactatcgatatacttttcgtattcgctgcccttgcttttacagatgataagtttgaacccgtcgaaatcaccgtaaacgatatccagcatttcgtctatccttttatcaacgtaaacgtgcatgtctttatattgcgtttcgggcgataaacccgcaaagttttcctgcacttccgcataatacgaataaagtttttccgccgaggcttttactatcgctttgaacagttcgcccttatctgcaaatctaccgtaaagcatgccggtagtataacccgcattttcggcaaccttgcgcatagacgcgccctcgaatcctttttcaagaaattccgttttggcacattccattatcttatcgatggctaaatcgtctttctttctcattgccgaacttcctttgttttaataacggtgttattataacactgttatttaataaagtcaagcattttttctgcctgataaattaaaaagcggcaaatttgtcttcgccgccgtttagattatttggatttaaattatattcgttgaagttttcatatgtttgattaccgcttatttcttcgcaacaatgcacagccagtgttttttagcatctacaaaactcttaatatcacaaaatccaactttttccagcattgtgcgaagttgcatttcattgtaaattttcatcccgcctattttttttgcccatttttcatccttgggatttgtaccatcgctctcgttgcatataaggaatgtaccgccgtttttcataacacggtgaacctctgcaaagcatttttcaagatcttcccaaaaatataccgtctcaaacgcagaaacacaatcaaaagcctcatcatcaaacggcatagacgatacatcgccataaacaatatcacacctgccttgcttgattgcgatagcatttagttttttcgattcctctacgctgacttttgaataatctatccctgtcacatgccctgttgaacatttttttatccagttgacaatatttgccccaccgccacaaccgatatccaataccttagaatccaactttgtgtaaattttggtaaaaccccactttgccaacttactatgaccggtgttcatcatttttaccattatcctcccaccgaatccttgtggctttcgtgtattttcaaaaaatcccatatttatctcctattattcgctatactgcgttattctctttgttttttatttctttattttactatgccgatgaccgttttacgaccatacatattgtttgcatgccctattatcccaagccacgacataatttttagcattaccggatccgtatattactcctttcggcgtgtatgtcgttatttacaaacgacggtaaagccgaatattttttctgttcgaacgccattgcctccggctaatcataccgaacgatttctgattttcttcacgttattattcatcaaatgtctgcctataagtcgataaacgcacttttttaataagttcatcgtctgtccatgttctctcagaagagaatcgggctcgtcatacactccgaaatctcgaacgattccctctttttgtatataggtattgcaacaattaaattcgaccggcggatttataaagtttttcgtcgcaacgccgtaaccgataaacgaaccgtcattattcggcttaaaaattttttgcaatgcggaaaggtattttttatcgagaataaacccttcgaggttataccattccccgcaaacgtacgcttctacataactgtggaaaatctcgtcgggcgcaaacttatacaccaaacccgtcatcgcacctttctgcagaattttatctatcataaaaccatgtattcggcaaggaatacccgaggcacgaagaagagccataaaaagcgtccccttggtgttgcattgcccgtatccgtctttcagcacccgactcgcctttacgccgtcgtcaacgttatatccgaataaaatctcatctttaacgaaattataaattgctttcacccgttccgtttccggtaaattcttccacccacgaccttctacaagcagttgaatttgtttagatgaataatcgagtatttttgtttctcttaaataatttgtacaattcgagcaattcattatttatcctttatggtcgtaatggcaatcgcaatatgctccgccgcccgctaaggtatattcccttgtgaaaaccgtattgttaagagccgccatatcgtagtcaagcgtacacattgcgggtatatactctttaagtccgagtttggtcatgagataacagattccgcaagtgtaaaaagttgcggtatactgatttatcgtctttccgtcttcaacggcaaatctccacgaataagggtttttagcagccaaaatctcgcttttttcggcttgctgtttaagtaattctctacccttctcggtgtacgccttacttttcttcgatgcgactttcgtcaagaaattgtcgcacatcgcaccgcggtaataaatgcgcacttcttccaatgtatacttattttttaccgagagcaaaattgacgaaagcaatgcgcaacttaatatattgattaaaaatctgtcgcctttttcaaactctgttacgtctgccagaatttccttgtattttttatgagcctctttcataacggccttcgggtcggattctcttaacgcttcggaaagctgttttttaaatgtccctttataacctgcccacattaacttctgaataaaaccgtatttcatttgtttatccactcctttatggcttttgaaagtcttttatctatatcaattctcgtttccttacattctttcgggaactctttcgccgctttgaacataactttcaaaaggatgttcgccccgatagggaaaatggttttaaaaaggctttcggggaaaacaaagtgtgaaccgtgcttatatgtgacaaattctgcgtcacaatcgtgcgatttttcggacaatcgcttttccgctcttttaacgtattttgcagcgttccataaacaatcgtcttccgagcctatcataagaagtttgccctttatgttttcgatttttataaattcgtcttcggtgatgggatgcgcctcttccgagtcgtcaaaaatctttttagaatcgatcatatttcccgacttctttgtctccgatttcactacctgccaatactcggggtgcttataacaaaacggcatatacggcaacggctttccacaatatgaaaacagcgattccccctcgataggccactctctacagccgtcttttttgccttgttcaaatccctgccatataaaatcgcttgctgtcatcgctattgtaagcgtaatgtcaggaaaatacgacgcagcggtcagcgcaagcgtaccggtggtagagccacccacgatgcctatttttttgtttccgttgtttttgagccactctatagctttttcgatcctttcgagcggataattatggtggctgtaatttttctttcccggagacatcgtaagcacgtttacgcctttcttcataagccattttacgcatgacttcgccatataatcctccgcatcgtcaccgagcatggcaattatcgcgctgttcgtctcttttttatttttccaatacgcgccgtaaaatccgtccgttttcacctcgaaatgaatctttttcataccttctcctttgcaacgattaaaacttattaagttctgaattacaattcagttatctttttcgcttctctatctcatttttattctgtaacgaataccttttct

SEQ ID NO: 2491 - DNA, 4420 bp, Unknown
  16S sequences of unknown bacteria
tccgaaagataggcaaacggctccggcagcgtttgggcaaacgcctctaccagccggatggcctcgcggcaggtctgcttggtaaagctcgtcaacggatacaacccatcgcggtactgcgtaagccccaccggcaccatcgccacatccaaacacgccggcctgaattcggccagctccgtcagcgtatattgcagggcctccccgtcgttgacgccggggcaaagcacgatctgcacatggaaatcaatgccgccctcctgcagccgtgacagctgctcgcggatcttggccgccttggggttgctcgtcatcttcacgcgcagggccggatccatggtatgcacgctgatgaacagcggcgagatatgctgctcgatgatgcgttgcagctctgtatcgcttacgttggtgagcgtggtatagttgccctgcaaaaagctaagccgccagtcatcatccttaaacttcatggtcttgcgcacatccggcggcagctggtcgataaagcagaaaatgcatttattatggcatgccttgggacggtccatcaaagggcgctcaaagataaggccaagatcttcatcgtactccttttcaatctccgccgtcagctcttgcccagtaggggaaacaaactgcacctccaacgcatcctggtacaacaaaaagcggtagtccagtacatcggctaccggccgcccgttgatggataccagggcgtcccccggttctatgcccaattcctctgcaatggagccgggctctacagcagtgatgagatggtttgccatattcccctccaatgttccgtttattataccatgcttttgccccgcccgccaaccacacaaaaaaagcgccgctctgcaatctgcaaaacggcgttctccctgcctcaggcgctttgatgctccggctctgtcggtatagaggcttcctccaagcgggccggcgcttggcgctgccctttttccctgcggcgtcgcagcagcccggagcataagcgaatgacttcgcacaatgccagcataacaggcacaaccagcgcacagggcagcgcatcctgtccgctgcccagggtcatggagccccaagcctggggcagcacgcccagcaaatagcccaacagccctgccccataatagcctaggattgcacaggtcagcgcggtatggtgctctccgcaaaacagcaatgccgaaacaatacatgcgcaaaatacgatccatggcgctccatggaaccatacgtccgtcagcgattcggtgagctgccccatcaaaaagccgatgagcatggtgagcactatataggcccccacatacctgcgttttccctgcggcccctgggccagcagcaaaataccgcctgccagcggcatgaaaaagccgccggggctcacatacaggcggggcaacagctgcacctcttcaaatacagagaagaacatcgtgaaaaggcaaaatatgcctgccacggccgggtggatgcgcgcccgccgcagcggaccggacacggcgcccgttacgcacaataagaacatgcaaagataaagattcaaagtaccaggcatgcttccgcctccttttggttttatccttgccaaaacgcggcgaattaatcaacttttccttgtgttgatggcgggcgtctgctattttgagcataggaggaaggaacatgagatatgatcactcacagctatgtcttgtgccagtaggcagtcagcataccgaggacatctttttatattttaccgcagaagtggcccgttatatggaggctgtgccgccgaaaagccgggccgagaccgctaaaatcatctgccgatggcaaaaagcggcaaaggacaacgccgtatttgccatagaatgccttggctcttttttgggccttgtgagcctacaccatctgcaaacagcgccggaagccggtctttggttaaagcgggaagcgcagggccggcgctatggcagccaagcgttttccgccctgctccgctatgcagatcatctggtcattgccaccctgcgctatccggtggatattcgcaacacgccgagcaggcggattgccctggcctttggggggaaatgcgaccaagccccgaaagccgtttcaacgcaagatcatcgcatgctgtatctggaagtgtttctgatcccttgccgccaaaatacaaccgccgcagactaagcgcctgcggcggtattttatgcttccgttttatctgcctttggcagcgttacgatgaacgacgagcctttgcccacttcgctttttacctgaatatcccctttcatgctcattaccacatgctttacaatggcaagccccagcccggtgccgccggtggcgcggctgcgccctttatccacgcggtaaaagcgctcgaacagccgcggaatatccttttccgcaatgccaatgccggtatcgctgacgacgatctttacttgcttttcatcggaggacagctgtatttttacctgcccgccctctggcgtatagttgatgccattggccacaagattcatcagcatctgctgcactttatccccatcccccatgcagaaggcgctgtgatgggggtcttgctccagggtaaggtcaatgtgctttttctgcgcatttttgcttaatagctccactacgtcgctggccttttgcagcacgtccacaatctccggcacgctttggcgatagctttccagctcggacacatacaggatatccgaaatcaagcgcgttaggcggtctgtttcggaggagatgatatgcaaaaaccgcttggcatgctcgggatcgtccacgccgctttccagcgtttccacaaagcccttgatgctggtgagcggggtctttaattcgtgtgaaacattggcggcaaactcggtacggatattttccaggcgttttagctctgtgatatcctccagcacagccacagcgccggtagtcacgccgttttgccgtaggcgtgagccgcggatgcgcaaaatctttttttgtctggtcacgccaaagccataagaaagcgtgatctcctcgctgattttgtttgtgccttccagcgtacgcttaaaaaagctctccaattcctgtttgcccgtagcgacaaacaagctctgccccacggcggaccagccaatgcccagcacttggcgcgcggcggagtttgtcataatgactttgagatcggaatccaccgccacgacgccgtttgtcatggcctccatgatggcctgaagcttgccgttatccgcagccagcgtttcgttggtttccaccaatgctgtggacatggaattaaacgcatgcgccagcacgcctatttcatcgcggtaatcggtacggatctttcgcccgtactgaccgtcggcgtattcttttgccacggaggtgatctcattgatgggagatacgatcaccgtcgtcatccgccaagacagcaccagcagccctgccaagcatatggtgagcaggaaaaatatttcccatgccgtttggcggtttgccgccaggatatcgtctacctggatgctcatgcgcaccaccatcgagccatcctcggtggccactgccacatagctcatggttctgtccatggtcgtggaatggcgctgggcaatgcccacgcccgtttcaaatgcctgctttacctcctcacgctccagatgattctgttctgggctgccgcttgccagcgccggctggcgataccaaacggtgccatcctttagaatcagggttacattcataccggaggcctcggccacgatatccgctgcatggcgcatagacgcctcatcctgctcagccgcgatgatttttgcattggtcagcaaattttgctgtacggcgtgctcggaggcattgttgatgcgcatcgtggccaaatatcccactaaaaacgtcatcagcacagcgatgactgctgtgccgataaaaatccttcgtttcattctctctccaattcattgaacatatagccaaggccacgcactgtttcgatatgctgtcccaaagcacctagcttttggcgcagatggcggatatgaacgtccacagtgcgcgtttccccaaaatactcatagccccaaaccttgttgagcagttgatcccgatttaagatacgccctttgttttggatcagcgtgcgcagcagttcaaactcctttaaagtaagctgcaagcgctctcctccggccatggcatggtaggttgtgagatccagcgtgatgccggctgcggagagctgggtaggctgctcttcctgcttatgcgaaccggatctgcgcagcagcgccttgacacgcgctaccagctcccgcacaccaaagggcttgaccacataatcgtcagcgcccatttccagccccagcaccttatcgatctcatcgcccctggccgtgag

SEQ ID NO: 2492 - DNA, 5116 bp, Unknown
  16S sequences of unknown bacteria
ggctggggctgggccgcctgggcaaagcgctcgtaattggccccgttggggataaatacgctgccgggatttgccgtctgcaggcgctcgcacaggctctgggccgtggcaaagacctgatctgctgcgcctgccagctccaactccatgcggtccaccagcgccggatccatctgcccgccataggcagaatgccggtccacacagtcatagaccagagcgctgtgagggacctcccgcaccaggtcgcagcagaccggcgaatacacccacaggaccgggtcataaatcccgtgctgctgcattttcttgcggatgaaccgggcgatcttcttctgattccagcggttgatccaccggaagcgatagaaaaacggcaggaccggcggcaggctgtagacatggatattctcctgcggtgtcagcgccggggcgcggtaggccttgagctttttcttcgcctcccggtcccgcaggggggcaagatacgtcacagacgggtcaaaatataagatctgcgcatccgggatacggctcatgacctgctgctttctggtgggaatcgggtaccacggtgacgtggcaaggcacacgatctgtttcataattcctgcaaaacctttctaaggtatttctcattttccgccgccagctgctgcagccgggcgacagacgcctgatctggcacgccgctgcgcagcgtccctgcaatggcctcccgcagggcggccgggctgacctgctgcagcgcgagataattccgctgccccaggtactccaggaagccgtccaccttcgggtcatagacgatgcccagcagcggcacgccctgcccggcggcaaacaccagcgcatgcagccgcatggagatcacaatatccatccggcggaacaggccgatcatcttcgcgtccgtatccggcgggcacagccgcaggctcgggcagtgcagctgggcgatgacctgatccatcgcccgcaggtcctgcgccggttccatggcaaaaaataccggaacaagcccctgcgtatcgtaaagccactgggccgcctgggcaaagtcctgcacatgggcgctgaaattctgccaggggcgcagcacgaacatcgcatagtgccgcccctcctccaggcccagctgggcatagagcccctgcagcgcctcctccggcgcctggtcgatgagcagcgccgggtcggctgtgatatgccattccggcttgctgacgccaatggccgccagctcctggccgcatttatcgtcccgcagggtgataaggtccgcgcagcggtccagcacccgtgcggtccggcggcggcttccggcgccccggatcggcccgatgccgcagccgtagagcatgaccttgttccccgccgcgtgggccatgcggatgctcattaaataataccgcagggagcggttgctcgtcgcattctgcatcagggtcccgccgccggagatatacagctttgtttttcgcataatttgccgaaatgcgaagaaattaaagatatggcacgcgccgactcggtagcgcagcttggtctgctttggccgccgggagaggacgtcgatgggaatatccgggtctacatggcgcagctgatccaggattgcctgcaaaatcgcatcatccccggcgttgccccggccataggcgccacagatcaggacgccgtcgcgcccctgctgccgccgcgctgtcaggcgcaggatcttctcatagatctcccgctgccgcgccaccgtcgcctcgacggagaactggcgcttggccttttcataaagtgcctcctgcatccgcagccgcgccgcttcgtcgcaggccatggtctgcatatgggccgccagggcggcaatatcccgagcggtgaagagcaggccctggacgccatcctcgatcaagtccggcacgccgccgactcgggaggcgatcgtcgcgcagtgcatccgtgcgccctctgtcagggcgtaggggaaggtctcagaaagggaggtcagcacgttaacgtcgatggcgttgtagaagctgtccgtatccgtcagccaaccagcaaagcagaccgtgcccgctgggcagcacgcggaagccaggtcccggatctctgccgcctgctcgccgtccccggcaatgaccaggcgaatggacgggcactgccgcaccgcctggccaaaggcgcgcaccagcgttgtcatatccttgaccggcgagattctggccgcgatgccaaacacaacgctgtcgcgttctgtctgcaggccaatcttctcaaaaaaggccgcccggtccagcggcggcgtgaccggggtaaagtcgacgccgttgtagattgagaacatccgcttcgggtcaaagccgcggctgatcagcagccgcgccatggaatcggaaacgccgatataataatctaaaaaccgcagggcgatcttgttgattgtcccaaaggtcacccggtgcaggggcctgcccaagtagtccaggcgatagtcactgtggaccgtcgtcaccaccgggatctgcagatggcggcgtagcagcgcgcccatcatgttcgcccgggagccatggcaatggatgatctcatagccgccctggcgaatgagtgcctccagcgcgcggcaatcagcccgcaggctgcgggatttgacgatcttcgtcgggatattcagctgccgtgcctcttcggcaaaggggccgtccataaagcagaccagctggacctcctccgtttttgccaggccgcaaagcagcgaatgcacatgcgttttcgccccgccgacatcgccgccggaaatcagatgtataattttcatagagatttcactccgtttttcactttcctcttgagaattttcccgaaatcagctacaatagcaaaagttataggcaattctggccgcaaagcgctgccgttgtgctattataatataatttgtcgggataatcaattttttccgcaaactttttcaggaggtacctatgaaacaaacccaatcgaacgaacgcgccccgaagcggtttaatattgtcgacgtcatcattctcgtgctcgtcgtcgcactggtcgccggggcggtctggaagctgaccagcgcctcgacctctgccaatgaggaggccgccgcccaggatgccatccagcattttgacgaatcgccccatatgcgcttcaccgtcgtctgcaccggtgttttgaaggacgctgccgagaagattgccgcgtctgacgatttgcagctcttcaacggcgaccaggacttggccgcttatatcaccagctgcacagtccgcgacagccagtatgacatcaccggcgacgacggtatgcacttcaacttcaccaacccggacacctgcgtcgtgacctttgtcgccgagggctacttcgaccgcgacaccgccacaaaggacaaggcctaccagcttggctcccagcagctgcgcatcggcaagaactacattatgaagaccaagagctttgaggtgaacggttacattaccgcgatggaggtcgtcaatgaataatgccctgcatcccacagcgctgcagcgttttgctgcgcggctgcgggcgctgtatctggcaagcctgtgctgctttgtgctgcagaccatcggcactgcctggcgggattcctggtgctgcgcgcagctgtcgcgcatattgggaaagccagcggcctgtgcgtccagccgggcccacgcgattctggcgcggctgagcgtccgcatggaacgccacagcgaccgtttggctggcagaatgcatgagagcatcttctaccatatctgccaggcaatcctgcgggccgggcgggagagccgcctgctgggccggctgttttccggcggtgcaggcggactgctgctgtttgccatcggcgggtatgtcatttgggactacctgctgcgggacgttttctccattccggtgctctcctcattctgggacgaagcgctgctgctgctgtgcctggtctacctgctttaccagcgcaagacagcccagctgcggctgccggtctatgacacgccgctggacctgccggtcgtcttcttcctggtcatctgcacagggcttttgctgctggatctctccgtcccggcaatcaatatctccggctaccgggcgacggtgcagtatattctctggttcttcgtcgtcacccgcctgctgcgggacgaccgcgactgcaagcagctgtatttgacaatggtcgccatcgcgtcggtcatcgggctgcatgggatctatcagtatatcgtcggcgcgccaatccccgccaactgggtcgaccagtctgaggcgtctgtccggacgcgggtctactccatcttcagcagctgcaatatcatgggggactttatggtcctcttcgcgcccatggccgccgggctcgcctacgcctgccgggatttgcgcctgaagctcctcgcttggggctgcacgctggtcatgtgcctgagctgcttgctgacaatgtcccggggcgcctggattgcgttggtcgttgcgatcctgatcttcgccgtgctggtcgatctgcgactgctggctgtcatggccgccggcggctgcctggcgatgtttttgcccttcgtccagagccgcatcggctatctgtttaccgacgccttcgccgcctcgacaaaccgcggcggccgcgctgtccgctggcagaaggccattggatatctttatgacgcgaatccggttctcggcatgggctttggccgtttcggcggcgccgtcgccatgcagaacaagacaaacccggtcctggagtatttttacacggataactactatgtgaaaattctctcggaaaacggcttcgtcgggctcatcagcttcgtctttatgatgctcggcgtcctctgggccgggctgcgctcctggttccggacacggcaatccaaatcccgtatggcgcccatgtgcgccgggatgctctccggcatggccggtgtgctggtgcactgctactttgaaaacatcttcgaagagccgtatatgatggccattttctggaccatcgccgccatgaccgtctatctcggcttcctccgccccacacggcaggatgcttaatacaagaaaacaggcccgt

SEQ ID NO: 2493 - DNA, 11496 bp, Unknown
  16S sequences of unknown bacteria
atcttgtgaaatcacaatttattcttgtagcctgccgctgataccgtctggattgtgcttttcctttctttttgttccctttaattagccatgaactgcttcatgccctggctcttagcgccgggattgtccgagccgtagccctccaaaaggttgatgacaccccagatgccaagaccggcaccgagagcgatcacgagtgtctgcaatacgtcaactgcgctgttaaagaaatccataaattacctccattattcagaattgatttgtgtttggtcagtagtacagccgcccttatcggcggctgcttcgtccgttttgattgtccggctggacaggcctgcttccgcccattcttttagggcaaggacatacagatactctcgttccatcgcaagccgtcgatccacttcacgcgcagcgtcctccgtgtcaatttccgtgtaggggatacccagagcatcgcactcctgtatcttctcccacagcactacaccgcagaggatagcgcgggtgatctggatcagcgggttcagacaatccataaaagcctcataattcgagcgttccatagctgctcctttcattcgccgctttcttctgcggccatattcatatccgacaaatcaatgtcgtaaaggtcaaacggttcctccggcgctaccaccgcaggggtgcgtttcttctttctctgcgcccggatgtatctctcaacatcaaaggcatttttcttgtcggcgtcggaaaggtatttataattcgggtgctttgtaatatcgtatttcttggagaaaaacggtctgatgccgcgcacctgcaaaatacacattcctccgtccatcgttgcgatttcgtcttgtgtcatcagctcctttccgagtttttgataatttaagccgtgggagatttccttgccccgattctcgctggtgttgaaactgtcaatcgtttctttccctaaaatctccgagatctctttgagcgtggttttctccttaccgcctaaaaacagcatggtatcgcagttgcccactatggtatcggcattgtcccgatagatcgcctttagctggctctgcgactgcaaaataatagaagccgatatttcacggcttcggatagtagcaatgagtttgtcaaactgcgggatctgcccgatgttggcaaactcgtccaatatgcagcggacgtgaacgggcagcctgccgccgtacacatcatcggccttgtcacataacaggttaaatagctgggattgcaaaatggcaatgacaaaattaaaggtcgaatctgtatcactcatgatgaggaacagggcggtctttctgtcgcccagcgtgtccagttccatttcgtcatattccatcaactcccgcagctcccgaatgtcaaagggagcaagccttgcaccgcaactgacaaggatcgaggcacgggtctttccggcactcagcaggaacttcttatactgccgtaccgcaaaatgctctggatccttttcttccagacgggcaaacatgagatcaacggggctttgaaactcgctgtcatcctcctttgcttcgctggcattgatcatgtcaagcatggtggtaaaattcttttcttcctccggcgcttcgtagaaaatatatccgatcagcgccgaatagaaaaggcgttccgacttcacccagaaatcctcggcgctctgtgcgccctcacccttggtattgacaataatcgtattgaccagcttcaaaatgtccttttcgctgcgcagataggcaaaggggttgtagtgcatactcttggaaaagttgatggtattcagcaccttgatccggtactttgccctttgcaaaagctgtcctacctcgcaaatcaggctgccttttgggtcagtgatcacataggagctgtgaagctgcatgatgttgggtttggcgaagaagcgtgtctttcccgaaccgctgccccctatgacaaggatattcttgtttctcgcgttcttcggatccttcggacggttggacatcatcaaccgttcggtctgtgtcagcagcacattgttttcaaacacagggtcgataaagggcttgatgtcggcgggcgtaccccaacgtgccgtgccgtattccatacccttgcggtacttcttggcgtttttctgcttggaatagaccaccagccggataatcaccgcaccagcaataccgattagcagatcgagggggtgaaagctgggcgcggcactggaaaaggctgcggtaaagccctgcccgatatgcagcaactttgcggatagatcgataccctgcgccagccggaacgcctgtccgactttcccgaacagatatacaaataacagatacgggagatttaacaaaatcagttttttcacttccggcttcatcgatcaatccccctgtccattttcttcaccgtatcccgtgctgccgtccgttttgcagcttcggcttttttctcaccaatatcccttcgtacagacggcttgcgctccatgtccagtttctttgcagagaactcgcggaacgctgcggtcagcacatctgcatctctgcctttgaagaacacaaggtagcggtcatctgtttttttcagtgcaaagtcaacgccgtactttttggcagtttgggaaaaggctttgatattcgcgacggtgatttcgatattggaaacgccggtgccgtgacgcataagctgtttcaacgtttgtttgccacggtggggcgtatcccgtttcttgcggtaaagctgcatgaactgtcgcagtgctgcttgcagcacctttccgtccagctttgccgtcttaattgcaagtgcaatggtcttacttgtaacttcttcctgcaaaatgtacctcctttcgcagctttacaggtgcctctctaaggtggatgcacccgctgatacaggcaaatcctcataggctgtctgctccctcatagctgtaatccgggatgctgcttttgggcttgccccaatccggctgtgccatatcgtgcgcaacaagggcggtatagtagctgtcaatggtgctgggggcattaaacagcaccgcccggagatattgccggatgttgcggatcttagtggtgttctcccgcagacagtcaaagacaaactcgatatggctgctgttcagcttcataaacttgctttttaccagctctgccggatagtcgtcaccggcaatgcggatcttcttgcgggaactgcataccgtttccagaataatgtccacgatctcgtccaggcggtcacggtcaatgcgcttatcctgcaaaaggatgtcgtattcgatgttatcgcagataatctcccggtaaatcctatatgcttcattttcgctgtctgccgtttcctttcgcttccgttccggcggcgcagccgcttgttccccgtccacgctcaaaggggaggggtaaggggaaaggataggaatggaatcggtacttgatagatctgtaattgatttttctttttttgataagtcagttcttaatatatctttatttaattgcgttggattttccaacgtaggtttttccaacgtaggattttcctgtgttggattttccaatgttggattttccaatgtaggtaaatctgatactggcttttgaggaagctcatagattacgtagtctgcgccgcgcaagcgtcctttttcgtcgcgttcccggctgcggacaatatatccggctctttccagctcccgtattgcctcccggatcgcgtcaatcttttcccggttgataagggacagacctttcagcgtgtagtcccagttatccggcagggacagcatttgggacagcagaccctttgcttttagggaaagctcctgattgcgtaggtggtgattggacataacggtgtagccgctgtttttttccacccgaaatactgccataggttatcatctcctttcgctcactctgccttgctgcgccggattgcggtttgtctgcccggttcatacggacactcggcatatacacaaaaccgatatttccagtgcggacggtagaagtggcaggtgttacaatcctcatgctcggtgcagccgttctcgtaccggtcaaatctgggctttccctgcatgagcatttcaaatgcgcggcttttaccgctcataaagtacattccggctgcgcctcctttctggatttgggcagaaaaaaacgccgcagacttctttcaaaatctgcggcgttggggtatgcgaaaagggatgctgccttgcggtaacatcccttttctcgcttggttattcaatttttgagctaacctgtttgcccactgcccttaaaagcgttgattttactggattcttgcttgttttcttatgtcaacgctcttaacgggtgcgtttttttactcttcccaatcaaattcaacgctatatgcggtaaatgcaagaatatagtcggataaaacaacgacaaaatcgttttcattcacaaaatgattcaggtattcgagtttttttccgcatatttttttcctgaaatcttccgcatcaaaaatttcttttatttttgaaccactttttttcttttcgtagataaaaaaagtgggggcggaaagatttaccgaaattgtaagcccgtgaaaattcaaacccattgctcgaactgaatcatattcacatacgtcagcggaaaattcaaaagacaccgcattttcggtttcggttatatgttcgacaatgcagtcatgaggaacgggaatcaacggcagcgaaccgttttttccggataaatcataatttattttcataattcaaacctgtaaattcttttcaaaaatccccgacgggaagtttcgacaacaaagtttccgctttctgttctcggggacttttcatctccgaacattacaaaatattttgttatgatataacctcgacggcataccgcatcataaatattgacgccgagcagcgaagtttcaccgtcgaatataacgtcgtttttcgctattgcacggtttatcagttcgtcggcacgggcgaaaaacgcatctatctgcggctgcataaacaaggatttcgtaaatgtcgcggcagctgcgttttcaatcagtttttcgggaaatgttttatcggaaaaagcctcggatgcaggaataccgttattcttgcaaaccaaaagcaaaagcgcgccgatatcatagcaggcaatgcgaacgggaaacagacgttccgtatctgcgaccgatgaaatcatccgttgaagttttcgcagatattttgattcatcaaggattttcagcgtttgcagttcaacaaaatttgccgttccctcgatttgttcgattgacgtctcataacgaaattcatattcaaactgttcggcacgcattttgcgaagcccgagaaatcccgtgaattttgcgtaatcaaaatgttccgcaagttccgataggagcctgttttcttcggcttttaccgaaaggttttcatttgaatagcaatattcgaacaaggcgtccatctcatcggcgtaacgcttctccccgcttatcgtctgaaatccgtggaacatttcgtgcacgattttcgaggtgagaacatctgaatccgtcggttcggaaacgttccatatagcaataacttctccgttaaactctatcgccgtgttggcaaagaaatcatctgttttttcgatgtattgtccgtcaaagaagcattttttatcgttatacagcgcaaatttcaaaggtttgaagtctttccacagagcgtcaaagtcaattttttctatgcggctgtttatttcggaataatattcgtgcagttccatattttcccattctattggtcggagaacacatcggcatagagattatagagtttgtaatactccccttttttctccataagttctcggtgtgttccggtctcttcaattccgttttcggtcagaaccattataacgtcggcatttcttattgtggacagtcggtgcgcaataataaacgtggttctgcctttcgaaagtttttcgagggatgtctgaacgacaagttcgctttcgttgtcgagcgctgacgtagcctcgtcaaaaatgagaacggacgggtctcgcaggaatacgcgggcaatgcagatgcgttgtttctgaccgcccgacaggcgcactccgcgctgtccgacatgggtgtcgtaaccgttttcgagagccataataaaatcgtgagcgcccgcaagttttgcggcattgataatctcttcgtcagtcgccccgggtttgccgtaagcgatattgtcgcgaaccgtgccgacaaatatgtaaacatcctgctgaactatgccgatattctctctcaaagatttttgcgttacgtttctgacatcttcgccgtcaacaagcaccctgccctcggtgacatcgtaaaagcgcgggataagactgcaaagagtggtctttccgccgcccgacggtccgacaaccgcaacattcgtgcccgacttgacatctaagttgatatgattcaggactttgccgagatccttgccgtaagagaagccgacgtcttcaaaagtaacatctcccttgactttgcctatatctacggcatcgggcgcgtcttcaagcgcgacaggagtatccattatttcaacatagcgttcaaagcccgtcataccctgctggaactgttccgtaaactgaactattcggcttatggcggtcagaagcaaggagatataaaggacgaatgcgacaagatcggacgggtcgatttttccgagcgcgataaacgttgctccgaaaacgactaccgaaagatacataaatgcgtcaaaaaagcgtataccgctgtgaaaaacgccgaaatagtgataactcaacttctttgcggacagaaactcatcggacgttttgtcaaacttttcgcgttcgacattctcgtttgcaaaggatttaacaactcgaacgccgcttaaacagtcttcaacgtttgcattgatattacctatcttttctctgcgcaattttgcggcttttcgcatttttttgttgtaaataaacgcaaacagaaacataaacggcaagatagcgaagattatcagcgtcagcggcacgctgaccgtgcaaagaataatgaacgctcccgttattttcaagcccgcaagataaaactcttcgggacaatggtgcgcaaactccgttatatcgaacaggtcggtcgttatgcgggacatgatctgcccgacttccgttttgtcgtaatacgaaaacgaaaggctcatgagtttgtcgaaaagtttcattcgcatatccgtttccatatatgcgcccatgatatgtcctcgggactcaatataataatttgcaaacacgtcaagcacacgcataagcaaaatcgcaagtcccgtcagccatataaagcgtagatttgtatgcgtttccgacgcaacggaggtgttcatcagcatacggacaagcaaggggaatacaagttcaacagccgcgaccacggttgcacagccgagatcgcgggcgaacatctttttatatggtttataataaggcaaaaaccgttttaacagggattttttactgctttgtgccatcagaatttaccgtctttcagaattgatttcagttcttccataaaggtgtttatatccttgaactgtctgtatacggacgcaaaacggacgtatgcaacatcgtctatatcgcggagtttttccatggcgagttctccgatacggctagacgggacttctctttcaagttcgttgagaagcgtactttctatcgaatcaacagccttttctatcgtctcgtaagcgacgggacgcttgttgcaggcacgaagaagactgttgaacagtttttctctgtcaaattcctgacgtgcgccgtcctttttgacaacgacaatgggagcgtgttcaaccgcttcgaatgtggtaaagcgttttccgcatttgcaacattctctgcgacgtcttattctgtcctccgcgggacgggaatcgataaccttgctgtcatcaaaaccgcaatacgggcatttcatatatttttacttcctttcaaaaagtcggctgagttttttatatgaatcaataatttcgcttcggtcggaataattctgcgaatacacctctatcgtaaacattccgtcatacccgttttcggaaagttgccgacggaaaagagagaggtcaaacgtgccgcaaagagggagcaaacaatcgcttgattcgtcaaaatcgttgcaatgaacaagttttaatttgccttttgtggcgtcgataaaatcaaacgggtcaaaagacgctctgtgcgcctgttttatatcaagtgtaaaacgaacatcgtctccgcatttttcggacatataccgaataaactcggaactgcggctgtggcagcggctgacgttttcctgacagaagtacacgccctcttttcgcgcttcacgatagtattgtgtatacacttcgcaatacttttcgggagtaacagtctgctctctgcgcggaccgtgaaaattaacgacttccgcaccgagcaatgccgcaatttcaaaaaagcggcggtacttgtcaagcgagtccgcctgtctgcgaggatattcgcagaagaggtagtaatagtcgcttgtggacataaacggatgtacggaatatacgcgaacaccgtttgcaagcgcgatatgtttcagttccgagacaaaagacggcgtaagttcggagtcggtgttgaaaaatatctccgtattctttattccgtttttcgcaagatattcaaaagccttttccgtttcgagcggataaaggcaggctgtcgagacgcctatcattttgcaaatactgtcctttataacaagttttatattttctgtcggcaaaaatcatttacggttcttgtcttttaacttaaccgcaaagaagtaacaaacgaccgcaatggtcgcggtcatacacccgccgccgaatatctcgaccgttgcggtgtaattctgagggtaaaaaaagacggaataaaccatctgaaaaattgccagaacagaaagagttttcagcatataaagcgtgccgttttcggttttgaatatgctgtcagaaagttttttgaatgttttttcaaacataaaatatcatctccgtaaatctcaaaaatcaaagttttacggatatatgataccatataaaaactacggttgcaatgcacaaaattcagcaatcgcgggaaatttcccctgtcgcgttttttcgcttctcttcgaatttcagaacggcaataagcggaatatacgtcagaacgccgcagacgacggaaacgcacacatacacgggaagcaatccgagaacggagacggtctccgttacaaaagcggcggcaaggagttgtccgaaaacgtgtaacacggagcctgacacattgacgccgagaggtgaaaaaaggccgcactttttagccgctcccattgcaagaacggcaaagaccattccggtcagagaaaatatcgcggacgaaagtcttccgagaaaaagcattgaaagaaaacttctggtaagtccgaatcccgcggcggtcggaaagccgtactcgtaaagcacataggtcagaagcacgttgcctattcctatctttacgccgggaacgacgatattgagttcgagaacgctctcaacgtaagaaagtatcagagcggttgccatgagaagcgcaagccgaacgattttttgaactctaaccgacaacggcgtcaacctcccctcccgcatcaacgacaacggcaagacggtttggcatacaaattacggaattacccgaagaacttatcttacccattttttcgcacgttttgtcggggcaggtcatatcgcagacaaacgcttttccgtcttttacgacgacttttccaactccgtctatggtgtattccctgtccttgtcaagcggcatttcgcaaacagtgttcccgttcaaaataacggaaacattttttgcgggctttccgcgcaggaacagccaagggacaaacgccgccgcgccaagcacgattataagaacgaaatccgctatgcgcacacgaaaccgtcggtgcggctgcacggatttattcatctttgacaaagtcgccggaagtcaattcaaaattgatatctccgtaaacgctgacgcggcaacggctgttgacaagcaccgcgcctttgatatagcctttttcaatggctgattcgatataggatgcgctcttttcgtatccgagcacgacaaacgccgtagcaagagcgtcggcataagcgccgtcttccgcaacgacagtcgcactcaaaacatctgtatctgcgggataacccgtggacggatcgattatatgatgatagcgtttgccctcatattcgaagaatctttcatatgttcccgaagtcacgacacaaacatctttacacttgatattgccgagatactcggacgtctgtcccgaggacagcggacttttgacagcaaccgtataatccgaaccgtcgggcttatctccccaaacaacgacattgccgccgagagaaagaacgcctgcggaacaacctgcatttttaagtgcggaaacggcataattgccagcatatccctttgcgataccgcctatgtcgataccgccgaaagactcaaatgtaacggttctgtccgcatcattgaatttgagttttgaagttccgacgaacgacaacatcgcggcaatggccgcggcgtcgggcggtgttttattttcgggaatattccaaagttttgttacgggcgctatcgtcatatcaaacgcaccgtccgtaaactcatacatctccgctccctttttcaaaagcgcgtactgttcctcgctgaaagaaagagtggtgtctttatccgcaagagaaatattctttccgtcggagaaaaatttattgataacgtcaaccgcatcggcggctacgtttgcgtaggaatcgtcatcaccgtaaacagtcaaagaacaatcggtgtcaagcgaataaaaagtatatcttttcgcggttttgttcttttccgaatcgtctttttgtcctttgcacgaagcaagcaaagcaaccgcaaaaacggcaacaagaacggcagaaagaattcttttcatcattcgtcatctcctatcttccaatcgatgggttcaagtccgtgtgaaacaagaaaacggtttgccgcagaaaacggacggctgccgaaaaaaccgttatacgccgaaagcggcgacgggtgtgaagatttgattatataatgtcttttttcggttataaggcattcttttgattttgcgtttgcgccccacagaataaaaactatcggggtcgggcgtttgttgagtttgcggattatgttatccgtaaatatttcccacccttgccctttgtggctgttcgggcttcccgcgcggacggtcagtaccgtattcaaaagcagtaccccgttctccgcccatttttgcaggcagccgtgattcggcggg

SEQ ID NO: 2494 - DNA, 8034 bp, Unknown
  16S sequences of unknown bacteria
gctcaggcttatagcccgtcttccacttcttgaaacgggctttgtcagtggtctgtgtcagcgaagctgactctgatcgttgacaaacctctggtttgccaacgaatctgcccgaccacttgtcttcgcactgtgtcgcctacggcggcccagtgttccggcgctgcgcactgcgtgtgctcgcgcctccagccgcttcgcggcctccaacggccagcggtcggggcgggaatgcatttttacccacagttcgcaatcgtcgatccacatcgcacgcaaagcgtgcttgtggctcttgttgctcactgggcttacttcggcctgtttcgcgcacagcgcgcggccttcgtgcgccccgcaaaaaatgccagaaatgacgtacacgccgtcatttctgattagagcctcgttcttccgatactttgtcaatactctgaggccgcctccagcgaggcggcctcgcaaatccgaaaagggcgtttagttgttcccgcccaccagcacgctcttggccggggagccgcggtcttccatttgcgcctggcggcgctcgagcacggccagcgcgatttccacatcttcatccacttcttcgggcgtcaggcatccaacggtcaccatatcgcaggggcgcagcgtggcgtaggagaagctcaggcccacaaagggcgtcacccggcccgcggccatggacttgatggtcatcacgggcttcttcgcaccccagatgattcggttcacgccttccacctcgagctgcatcaaaaagcccgcgcagttatacaactgaatataggtctccacgtcgtattcattttcatcagaataaatgatcaattccggcatgtgcgcggacaggccgggaagcatgcccgcatcgcggatcatggaaagataatccggcaggcgtggaatctggcccaggtttttgttcacgagcgcttccgcgctggtgtggtggatcaggcaaaagtccgcacctgccttggcgcaatcgcggatcttctgctctgcctcggcgcgcgcggcggcgttgtcgtccacattgatggtgggcgtatcgatgcgaatgatgcgcttgccgagtttttgctccgcgtcgttcagggcatccatcagcgcctgcgaggaggtgatgggcgccatcagcgcgtcgatgccgtatttggcaaacgcgcagatgatgtcgcacatggcttttgcgttgccgttccgctcgaggatcatgtggttcatgggatgcgtcttgtggctgaagcccaacagccagttggtgccgatcagcatgcgcggcagggaaaggccgcccacctgcgtgcggggaaactgcgggtattggggcatggggattcctccaatcgtttagaagaatttctgagcaaagtatatcgcatggaagggcaactgtcaatacaaatccacggcgaaaaatgtaggcactgttcgtttcattgattttgcgcgatcagataggcggcggccgcgtgtttgggcagccgcagggagatttcgctctggatggaggatgcgcttcccgtccaaagttcaacgcattgggctgggccttccagctccagatcggccagggaaatcgaaatttcgcaattctgatcgccaatgttgaagacggcgacatattgtccgccctggcacgaaaccgccgtccacagcgcgatttcactacccgcgattttcctgcgccataccggatgggcatgacgggcgtttttgtgcatggcgaggattccctcgtttgtgagcaggcgcaacgtgaaagcgtcgagcttggtcaactcgccgccgatcatcaggggcgagcgaaaaatacaccacagggtcatcatggtgatctgctcgtcttgggtgagctccgtccacaaatcgggagaacagtcttgcttgattgcgccgaccggcagcatgtctgcatccgcccagtggcctgcgccgttgtgcacggtccatttttcgcagcgttcaaacatggcatacagggagggccaattgtcccaaaaatcatccgtcatgcgccacatggtggcggtttgcttgtagagttccgctttttccagcagcgcgggcccaggcgagagactcagcgccatttcccggccgcagcggcgcagacaatcgctgattagaaccatttcgctctcctcgtgcggcagctcgcgggcaatgtcgtcgcacttgatgaaatccacgccccattctgcgtacagcctgaagaggctatcgtagtattctttggctccttcctttgcaggatctacgccgtacatatccgtgttccaatggcagatgctatcggttttggcgatctgccgggcagttttgccgctgcagaggattttggtattccgatgcacagcctggcgcggaacgccgcgcatgatgtgaatgccaaatttcaaacccagattatgtacgtattccgccagcgggccaaaaccctttccgcccgcggcggaagggaagcgattttccgccgggagcaggcgggaatattcgtccatgcacaactcggtaaaggggatataggcatgggacttggcgtttggctcataccactggatgtcgacgacaacgtattcccagccgaaaggcttcagcaactttgccatggtttcggcgttttgccgcacaatggcttctgttacagacgcgccatagcaatcccaactgttccaacccataggaggcgttttcttcatggcaatcttcctttccgcagtgcggcgtgcatcaatttctaggtatcattgtaccctcaaattgggtatgcgtcaatagaaaacgttacaaatggataggggaatcaccgcgttttttttatattgccaaacgaacaggcatgcggtataataatgccagaaatatgccgctggcaagggggaatgggcatgaaaattgtggtgctggatggatatggtatgaatcccggcgatttgtgctgggatgcgctcggcgcgttgggagagctaacggtgtacgaccgcacgcggcccgaggaagtcgcttcgcgcatcgccggcgcgcccatcgtctacaccaacaaggtggtgctcgacaggaagacgatcgaggccgcgcaggagttgcgctttatcggcgtgctggccacgggcgtgaatgttgtggatgtggaagcggcgcgggagcggggcattcctgtgtgcaatgtgcccgcttacagcaccgattccgtggcgcagatgaccatcgcgctgctgctggagctgtgcctacacgtgggcgagcacagccgcctggtgcgcgagggcgaatggacgaagagcccggatttctgcttctggcgttatccgttggtggaactcgcggggaagacgatgggcatcattggcctgggcagcattggcagggccgtggcaaagatcgcttccgcgctgggcatgcgcgtgatcgcttaccggggccatggggaaggcgtggaaatgctgccgctaaaggaagtgtttgcgcaggctgatgttttgagcctgcactgcccgctgacgaaggaaaacgcgcgcatgattgatgaagcggctctggcgcaaatgaagccgggcgcgtttttgctcaacacggcgcgcggcggcctgctcgacgaagcggcggtggctgcggcgctcaaaagcggccgtctcgcgggcgcggcggtggacgtggcttcgagcgaacccatcgcggcggacaatcccctgctcaccgcgcccaactgcattttgaccccgcacatcgcctgggcgaccagcgctgcgcgcgtgcggctgatggacatcgcggtggaaaacctgcgcgcgttcctggcgggcaaacccatcaacgtcgtcaatctctaaaggaggataccgccatgccgcccattcccgtgacgcatttcaccaaccggcaggcgcggcagttcctgctcctgtggcacggcctgctgggtccataccgctttgtaggcaagacgggcgcgctggaattcgtgcggcaggcgggctgtatccagttcgaccccgtggacgcctgcggcaaaaatgcggaactcacgttgcaatcgcgcgtgaaaggctttaccaaggcgatgctgggcgaattgctctatgcagaccgcgcgctcgtcgattatccggacaagaatctcgccatcctcccggcggaggattggccctatttcgcgcgctaccgccgggcagcgcgcgaaaatggcgcgcaatttgagggccttggcgcgctggaagcgcaggcgctggactacattcgcgcaaacggccccgtgagcgcggaggagttgcccatcgcggggaaaattcactggcattcttccatccattggagcgggaattggagcggcgaatccaacgcggcgcgctcggtgctggagcagctctattccacgggcgaattgatcattcaccacaaaaaaggcgcgcgcaaattctacgacctagcggcgaaccatttgcccgccgccctgctctccgcgcccgatcccctgcaggaagaggacgaacacctcaaatggcgcgtgcttcggcgcattggcgcggtggggttgctctggaaccgcccctccgacgcgtggctgaacatttggggtttgaaggccgtgcagcgggaagaagcgtttgcccaattggttgaagaaggcaagatctgccaggcgcgcgtagatggcgtgcgcacgccgctctattttcgcgcggaagcgctgccgctggcgcatgcggtgtgcgcgggcgtatcgccccggccgcgttgcgaggtgatcgccgcgctggattgcctgctgtgggatcgcaaattgattcgggaattgtttggctttgcctatcaatgggaaatttatgtgcctgccggtcagcgcaaattcggctattatgtgctgccccttttgtggggtgagcgctttgtgggccgtgtggaggccgtggcagacgcgaaagcgcgcacgttgcgcgtgaaaaacctttggctggaggacggcgtgcgctgcacaaaaacgctccaggcggccatagacagctgcctgaagcgattggcaaaattcaatttgtgcgatcaggtggcaggcgaggtggaatccttttcgccctcacactgaccgcgcagcttgcggcaaatgttttgcatgcgctcgtcgatatccgcgatggcaatggcgcactggtagagttcctcgcgcacatcgtccggcacctgggtggccgccttgtatttcagctggtgctcaaggctggcccagaaatccatggcaatggtgcgaatctgcacttccacgggcatcaacagccgctgctccgaaaggaaaatggggatctcgattaccagatgcaggctgcggtagccgttgggcttggggttggcgatataatccttggtgcacagcaacgtaatatcatcctgtttcacgagcaaatccgcaatgcgatagatatcatcaatataattgcaaatcacgcgcacgcccgccacatcgtgcaggttttcgcggatggaagggatggtcaccggcaggccccggcggcgcagcttttccaccatgctgtggggggatttcaaccggtattccatgtgatggatggggttgtgatcgaatttcacgcggaactcatcgtccagcacttcgagcttggtgcgcacttctttgatggccgcgccgtattgttgctgcagggcgaaaaagccctggagtttttctataattgcaggatcgcccatcggattgttttccgtaaggttgatctgcataatctgttcgtttccggcaaatttgggcacaatggtcaccttcttttttcgcaagttcgcgcgggcttctgcccagcgcggcagagcatcgctccgcatctccattatagcacaagagcagcggaaatggaagggaatggatgtggcgaaatgttgaaaaagaatcagaaatgttatgaaatgcgggcattgtggaggaattctttgcaagggccaaccgtttcgcgcgggcaaagcatcttatcaatagacaagcaaaggaacaggaggcgaaggaattggacgaacgccagtttttccagcgggtgcgcgcgtgcgagcaaaagctgtacaataccgcgcgcatgctcctgccctgccaggccgattgcgaagacgccgtgcaggaagcgcttttcaaggcatgggcgcgcctggattctctgcgcgataccgggcggtttgaagcctggctgatgcgcattctgatcaatgaatgcaaaatgctgttgcgccgccgcagagcgcatcgggaaagcgcgctcactggcgcggaagaggatttctgcgtgccggacgcgccgccgggcgcggaggaaatgcgcgcggcactgcgggcattggaggaaaaataccgcctgccattgctcctgcatctggcggaaggattcgaggtggtggaggtggcgcgaatgttgcggctttcacagggagcggtcaaatggcgcatacacaaggggcggcaactgttgcgcgccgcactggaacaggaggtgcggatatgaacaggaaggataattggcagacgttgctcatgcccgtgtccgagggctttcataaccgggtggaagaaacgcttgagcagattggcaaagaggtgaaatccctgcaagggcacaggaagcgtacgcgggctgtacgctcgcttgccgtggcgctggtggccgctctgctgctggcgggcacggcactggcggtagggcggttggcaggcattctggatttcgcttcgccgcgcgtggaagatgaaacggcacgccaatatattgaacacaacctcgccaccacgcaaagcggacgcatacgcctcactgtgcgcgaaggatattacgatggcgaagtggcgcgtaccatcctagaaatcgcaccggtgcggatggaagacagtattgttttgcacgattggtggcattatcccaatggggaagaattttttgcacccggggaaacggactggcaggaaggcagtgtgcattccattgcgccatcgctggaaaaagctgccttgccgccgggaacggacggtgcgatcgcggtggtgggcgaaagcaaaaattacaccgaggacaaagccgaggatttaacgaattgccgggccgctgccgtgcgggaaggcaacgccgttgtcctctatatcgagggacgcattcacagctatgtgggggaagtggatcttggttattccgtttatacggaaaatggggaagccgtatcggtacggtttacgctgaaggaagagggcgtggaaaacgtgccaatggaatttgcggcggtggaattttatggactggctctgcaaaaggtctgcgtccaatacacgccctttgccgcgtttctacaagtggcgtatgcgcctgcgctctctggtgaggccgtcgctgaaagcggcgcgtacgatcccgcgggcatctattatggcacggaaggcgggaattacggacatgtcgtcccggattgccagggaatggcgaacgccacggaatggacgggacaagaattgctggatatgggccggccgccctgcccggtttgagtggtgccggattctacgaaggacaaaaacagttttttggcgcaatatggctggaccttcgacctgctggcggcagatgggcagtccctgctcgatgcggacagcccgtggacgcgctataacaatgccagcctctatggacagccggaggaatggcgcacggtatcccttcctctgcggccggacgcctcgctgggtggcgcgctgtcccttgagccgtatcttgcagaggatgatatcgccatagaagcgccgcgcatcccctgttggctggcggagactgcgcccgtcggatgaaccctggattttggttgctaagggatacatgttgtggtataatgagggtgtgggaatgcacgccggcattgctgcgccagcgctttcctggaaacggaggtggccgctatggaggaattccctcaggattggggcgagatgcgcgctgcggatatcgacagcgtggacattcgggacgatttcatgttctcctacgtgatgtg

SEQ ID NO: 2495 - DNA, 2241 bp, Unknown
  16S sequences of unknown bacteria
gcataaagcgtagtagtggagcgtaacatgtccgcgtctgtttatttggcttagatttacaaaacgttagtctgttctcctacggaagcaaaacgaaattggacgttcgcttcatttcaacgcacaaactctcgcccatccgcggttagcctaatccaattcacgtatgatttggtattctcacccccgcgcgatgaataaataccgattttaacgaaactacccgcgtctacctccaccgcgcgaacatgctaatgccactactaaggcttatgcgtagccgcgcgactgagctgttcacgggggcgatgatgaagtttattgctaaactgaactccaccgcgagccggaactcacagaggtgcggcgtttgagcatctctgtgcgccctccgcgtaggagcgtcccctcaccgcagtgagatataataaatctgaaagggcgaagctctttctacttttttcttcacttaggatttaagtgaaacttacatcaggggaagtctcttagaagacccccgtcgtctaaggtaaaaaaatttgctggcgcgatttttcctattgaattcacaatattttgtggtataatataaaatggcaaaaggttttgtctttccaaagatttaattattacctgtgaggtgaaaatatatatgcttaaaactaaaatcgtctgtaccctcggtccggcgtcaaattctcccgagatgatcgagaaaatgatgctcaccggaatgaacgtcgctcgcctgaacttctcccacggaacccatgaggagcataaaaaagtcatcgaccgcattaaggaagcccgcgaacgcctcggtatcccctgcgctatcatgctcgataccaaaggcccggagatacgtctcggcaaattcgagggcggctcagctgaactggctaccggctcgcagtttaccctcgttacctcagagatcatgggaaactccgagcgcgctacaatctcctacgccgacctccccaagcaaatcacagccggatgcagaatcctcctcaacgacggcgctatcgagcttgcggtgacgggctgcgacgaggaaagcatagtatgtacagtagtcgccggcggcataatcaagaacggcaagggcgtgaatatcccgaacgtccacctcgatatgccccacctctccgacagggacaagtccgaccttctcttcggtatcgaaaacggcgttgacttcatcgcggcttcgttcatgcgcacgggtgaggacgttatcggaatgcgcaagttcgtcgactacaacggcggtcacgaaatacgcattatatcaaagatagaaaacctcgagggaatcgaaaacttcgacgaaatattaaaatactccgacggaatcatggtcgcgcgcggagacatgggcgttgaagtggacttcgagagactgcccggacttcagaagagatttatcaagaaatgttatcaggcgggcaagatggtcatcacggcgacgcagatgctcgagtccatgatagagaatccgaccccgacgagagccgagatatccgacgtagcgaacgctgtctttgacggaacgagcgcggtcatgctttcgggagaaactgcggcaggcaaatatcctcttcgcgctgtcaaggcaatggcaaggatagcggagcaggcggaaaaggacgcgttcgagggagacgcatacggttcgatgtcgtacgatatagactacactgacgtgacgaacgcgctgtgtgacgcagcctgcacgacagccgccgacctcaaagcaaaggcgataatcacgctgactactacgggcaagagtgcgagaagaatgtcgaaattccgtcctcttcagccgatagtagcggcgacgccggagcacaagactttccaccagctcgcgctttcatggggagtatatccggtgttgtcgctgaagcaggacacgacggagaagcttttccgacacgcggtagactgtgcgaaggcgctggatctcgtctccgagggagatcttgtggtaatctgcgcgggagtacccgtcctcacccccggcaacacgaacatcctcaaggtcgaacacgtggaaaagaggggataaaggggagatgaggcgtcccctttaaagcaattccccccgcggaagaaagagcgcagcaattttctttaccttagacgacgggggtcttctaagagacttcccactgtaagtttcacttaaatcctaagtgagaaggaagaagaaagagcttcgccctt

SEQ ID NO: 2496 - DNA, 20012 bp, Unknown
  16S sequences of unknown bacteria
agcaatcagggaaggatttattcagattaccttacccaccttactttcctttctcgaaacattgtgcataaccgtaaaggacgtcttaaccaagacgtccttttttcatgcgtcaaaaaaaaccagtttggcgtaaaaagttatattacttataactttttgtgctatttttgttaaatcgtgaaaacaaccgatacttgtgtatatgattgacttgaatagcccaaaaatggtattatgttttcggaggagcgcttatgataggaataatcggagcaatggaaatagaaaccgacggccttataagtatcatgaccgattctttcgttaaatcggtcgggtcgtacaatttcgtcaaggggaaaatctgcggtaaggaagcggtggtatgccgctgcggaatcggcaaggttttttcttcaactgcagcggttttaatgattgctctttttgaacccgaaacaataataaacttaggcgtagcaggaggagccaaacctttaaagcaaggcgacatagtggtttccgagcgcaccgttcaacatgattacgacgcaacggctgacgggctggaaaagggaagagttcacggattcgaatcgccttttttcgattgcgaccgcgcagccgtgggacagctttgcgaggttttggagcgattgggttacaaatataaggtggggacgattgcttcgggcgattgctttgtcaacgatcggaataaagcagcggatataagccgggtgttcggagcgattgcttacgacatggaaagcgcggcgataaatcaggtttgcgcctttcaaggaacaggattcgtttccgtgcgtgcgatttccgacaacggcgatgatggagcggtcaaaagtttttacgagtttgtttccgaagcaagcgcaaaggcgatagaggttataaaggaatatattgcaagtttcggttgaataaaggcgtcttaaagcggaaaagtttaaaaataaatatttttattttatacagaaaatactaccgatatcatgttggtagtatttttaaaatcgctgataactttttttctggttttactggtggtaagactgatggggaaacggcaacttggtgaaatgcaacctttcgagctggtaataactcttataattgccgaggtcgcatgtattcccatgaacgacccgtatatacctttttacgcgggactcgtacccatagtgacgcttgcgtttttgcagattctgctttcgactttggcgcgtaaaagcctgagagtaagacgttttttaagcggcagcgccattatcgcgatagataaaaacggtataaactacgaaaatctaaagaaaatgaacataaacataaacgaccttatcgaatcggcaaggtcaggcggatatatggatttcaacgacatagcttatgccatattcgaaaccaacggaaatttatgcgttatcgaaaagcccggtgatccatcagttcttaaaaatcccgtattgccgctgactattatggtggacggagaatgggaagaagataatcttaaaattgcgggaataaccaaaaccgaagtcataaaagtgctgaaaaagaacggtataacgaatatcaaagaggtgctttattttgacgtaagacaaaacggagtcgtctatattgcgcctaagcacggaaaatacatcaacgataaaatgaaagtcgagggggaaaattggtaaaaagcggtttaccttaataaaaatgaaaaaatttatttgtgtaattgttattttagcgataatgttaggggcgggagtcgcggaaatcatcatgaccggcagtctctttaaagatataaacgcacagcttttcgaagtgcgaaataccctgcaggaaaacaaagaagacatttcttcatcggatgtaggagaaatgatgaaaaagattatggataaatggaacaaaagtaaaaattacgctttaatgttttccaaccataccgttatacgcactcttgacgaaaagcttgtttcgttaaacgcttatatcgaatgcggcgaataccccgacgcgcacgcatattgcgaaatctccattgcgctatccgaagaccttatagacgaaacttatccggtccttaccaatttgttttaaactttgacttatgaagcggtaatttatttgcaatttaccgctttttatattacaattatattgccgtggaaaacgatacggctgacggagaagattattgaaatttaccgaactaaaaaaaaacctgatgactgcgccgcctaagtcttgttacatactgaccggcgacgattcgtttgttgtaaaaagcgccgttaatatgttttcggttttttccggtgaattccgcgacctgaattttacatatttcaacaaggatgcttcaatcagcgaagtaatcgccgcattgcttactccgcccatgttttccgaataccgcgtcgtgtgcgtaaacgattatacgggcgaccttaaacaaataaaagaataccttaaaaatccatcgtctacttcggtactgctgtttacgggtgcgcttacgcctaacttcaacggcattatccctttatgcgaaatagtggattgcaacaggttggaaaagtcgtatcttgaaggatgggttgtcagaaaagctgcgtcgcaaaaaatatcggtttcgcaaaaagccgcgtcgcttctggtcgaatactgcaaccgcgacatgaactccgtttataacgagcttgttaagcttatggattacgccgagggcgctatcgatgaaagcgacgttaaggagttggtttcgccgcagatagagtataaggttttcgaactgagcgaagccattgccgaaaaaaatgccgataaagccgtggaacttgtaaacttaatgcttgccgaaaataattcctcggtatcgttgatgggtatgctgttcaatcatttcaggcgcttgctgtttgtgtcgcttaaccctaaatccgacactctgtcgtctgatttgaaagtcaaggaatacgcggtaaaggttgctttaagacaagcggcaaaattttctccgcgaaggctgaaagcagtattcgacagactgaattctttggatgcgggtgtaaaggcaggaaaaatatcggataaaaacgcacttatggagtttgtgtgcgaaaccgttaccgtaggataaacaggaatctgaacatgaattttattaaagagaaaaaaataaacaaatacataatgattgcggcgctgtttctcagcttcggctattcggggtttttttacatgcgcggcgcattggcacttcttaccgcaagcgggacttttgtattcaacgacgtgtgggcgtttctttttgccgccgtcataggaggcggagtttacgaacttgttactatgttccttgcgcgtgggtccgccgcacggctcaacaacaggggtgccgacatgcagtatgccctcaggtttttctatattcccgcaaatcttttgtcgggagtacttaaaactttatatttttattttccgtttttgttttcttacggcgaaatatttttcgatttctttttcgtgcttatattttatattctttatatcgtgttttgctgtaaagcctatttcaaaaaagaagagtatggcagagtcgtaatgtttttgggcagttcgtttctgtgcgtttacggttttatagccgtggtcgcgcttctttcgggggtgctggcatgaaaaaagcgttattgatattttttaccgtaatcattggtttgtgcttttgctcctgttcgggagaagtcgcggttatgaaagtaaggaccgccgagcagtccgctgtttttaacgacgtcgctatggcggaggagctggacgcttttatcggaagcggagaggacgcgcgcaaggaccgcacgtctttcagcgaaggcgaaaagaaagccgccgaatatataaaaaacagacttaccgagtacggttacgttgcggaacttgaccttataactcagtctgtgaaaacggaagtcgtcaagggctacggcggagaaactcagaaactttattcgcagaatattattgcgacttacaacggcggcaaggaaaaaaccgttgtggtgggagcgaattacgataatctttataaaaacatcgaccttgtgggttcgagcggcaacggaagcgaaggaatcatgaacaacgcgacaggcgtggccacgcttttacagcttgcaaaggtatttaaggaaaatgctcctgcgcttgattataccgtcattttcgcgtttttcggggcaagcgaggcgggcgtcgtaggaagcagtcggtttgtttccgattatatcaaggacgcgtcaaacgtgcttcttatggttaatctcgattcgattgcgggcgaaactgtaaacatttattccgacgaggtagacacgcttgagggtaaaatgtttttgcagcagggcgaaaattacgctgccgaatttaaaaagatgtcgcgttttattcccttgatgccgcaggtatatgctgaaaatctgaattacacgcatatcggtcagcttggcgaccacgttgtgtttttcgaaaaagacgtgcccgtggtaaatcttttcgggggagatgctgacggattcaactattactcggataaaatagacaacgcggattcttttaaagccgagaaccccaattacggcaaaacaatggctgataccgcgtcgcttgtttacgattgccttaccgcagaaggcttttcggcagcggctgcaggtttcagaacggaaaagttcgattattcgtttttcatgggcggatatttcgcttatatagttttaatagcaataatcatagtcgcggcgataactctcattttcgtagttaagcatcttgagaaaaaatatccgtataaaccggtaataaagcgattgaaaattgcggttttcggtatggaatacgaacaaaataccgataatgatatttacgtcgacatcaggaaagtcgaaaacaatcctttccccgaaaacaaggacgacatagatccttttgaataaaatttattaattttttgcaaaattccattgtttttattgataaatactttccttgattgtataatattgcataagatggaaaatgggtatagcattttaagcgaatgaaaagagtatcgaagtaacgagggctgataaattgaacaactttctagacaatttaaaagaggctttttcctccccgataaacacggtttacagcgtgcttgacattatagtcacgattatgattgtttacggagtatcgatattcctgaagaaaaacaatgcctcgagacttattaagtatcttgcgattgtcgccgttttgtcggtgtgtttcgtttcggaattcgtctatatgcccgtaacttccaagatattcaaaaacatagttattttattgttcgtcagcgctttggttcttttttccacggaaatcaagcgcggaatgtggaaaatagcaagccctaaaaacgctgaaaattcttatacgacggaatataactgttcggacgaggagttgcatgcggcgattgacgatatagtacgtgccgctcagaatatgtccaaaaaagacgtgggcgcgcttataattattgcccccgataatattccggagcatattctggacagcggaacaagactcgacgccgatttgtcctgccagcttatcgagtgtttgttcaacacaaaagctccgcttcacgacggggcggtgtatatacgcggaaacaagatactcgcggcaggttgctttttgccgcttactcagcaaacggacctcgataaggaactgggtacgcgtcacagggcggcaataggaataaccgagcaatataatcaccttgcgataatagtttccgaagaaacgggtatcatttccgttgcaaggaacggcgagataatgcgttacttcgacactcagatgcttaccgacgtgcttgaacagatttacggacttaaggcggtgggtaaacccggcaaacactccaggaaaaaggcaggttgacatggaagaaaaaattcgtcaggaaaaaaagcagaacggtttcgtcagaatccttaaaatattattcgtaaacaatttcacctataagttgtttgcggtgttgttcggtgttcttttgtggttgctttcggtgggactgggaaacaatggcttgttataaattcggagaaattatattacccgaaaatttttcggtggaaaactggtcggtagttgcgtgcgatcaatacacttcggacaaacaatattgggacaacctttacaaaacgcttaaagaacccacttcgctgaatctgatttttcccgagtgctatttgtcttccgacaattcggcgcgcataagccgcgttatagaaaagcagaaagaatatatttcgggcggtatattccgcaaggtggaaggtaccgttttggttaaaagaaatacgctttacggcaacgagcgttgggggcttatgtgtcttatagatttggacgcatattctttcgatccgtccgataaaaccttgatacgcgccaccgaaggacttgtggcgtcgcgtattccgcccagaatggaaatacgcaaaaattgccttatcgagcttcctcacgtcatgctgcttatcgacgacgaaaatcgtaccgttatcgagccgcttaaaggcaagggtaacgtgctttacgacggcactctcaacagcggcggcggtcatattacgggatataacattaccgatacttcgggcgcaacccgcgcgcttgacaatttgttgcgatcgtcaaaagacaaatacggcagtccacttttgtttctggtgggcgacggcaatcactcgcttgcgacggcaaaggcgtgccgtgacgaaaataatccgctttcccgatacgctcttgtcgaaatagtcaacatctacgacgaaggccttaagttcgagcccatttaccgagtgatttataatgtcgataacgaaaagtttttgaccggattgaaagaaaaaacagcgtctcaaagcggaaaaacttcaatttacatgggcggagaaagcgttgagatttctttcccgactgacgcggtggaaggcgttaaaatcgcccaggactacatcgacgaatatctggctgaatacggcggagaagtcgattacatacacggtcttaaagaacttaaagaaatatgcaggcgcgacaacgctttgggaatagagcttgcgcccatggataaagcttcgtttttcagttacgtcgcaaaaaacggtttgcttccgagaaaaactttttccatgggagaggcggatgaaaaacgtttttataccgaagcaagatacataaagtaaaaataaatttttggagataaataaatgaaagtttgtaaattcggcggtacttcgatggcgaatgcggagtgcattaaaagggtggctgaaatagtttcaagcgacgacgcggtgtcctgcgtagtggtttccgcacccggcaaaagggcaaaaaacgataccaaagttacggatttgctgtatgcgtgcctcgataaagtcaacgacggattaagtcctcaagaggcgtttaaacccattgaagaaaggtttgactccatcttgaggggactgaatttaaattgcgatttcaaaacttactatgacgagataaaaagcgaactcgctaaaggcgcgaccaaggattacattgcaagccgcggcgaatttttaagcgcggtggttttgtccgaatatcttaactggaagtttatagacgccaaggacttcgtgagattcgacgacaaaggtaattttttatccgaggaaacaaacgcttacgcaaaagccgttcttcacggcgtgaaaaaagcgattattcccggcttttacggtgcaacgggcgacggcacgattaagactttctcccgcggcggttcggatatttcgggttcaatagtggcgcgcgcgctttatgcggacatttacgaaaactggacggacgtagacggttttatgaagtgcgacccgcgaatcgtggaaaatcccgaggttatggagcttattacatataaggaactgcgcgagctttcttatatgggtgcaaacgtacttcatcccgattcgattttcccggtaaggaaaaacgatattcccatacacataagaaacacttttaatcctcaggcaaaaggcacgatgattgtttcgtccaaaaagtttttctcgggcgcatacgagagaaaggaaagcactgttacgggcattgccggaaaaaaacatttcattgccatcaacatcgaaaagtccatgatgaacaacgagttgggttttgcgcgtaaagttctggaggtcatcgagaaaaacggactgggaatagaacatatgcccagcggcatcgatactttgtccgttgtgattgacggaagcaatcatgacgaggacgctttggaaagaatagtggagggcatcaaaaaagtatgccagcccgacacgatagacgtagagcgcaatcttgcattgattgccgttgtaggtcacggcatgagcaggaaaaaaggtaccgcgcagaaagtttgcaacagcctatacgaagcggacgtcaacattcgcatgatagaccagggcagcagcgagcttaatattataatcggagtggaaaacaaggattacgaaaaggcaatttccgcgctttataaggaatttttaagctgacggtttatattaattttttataaaacaaatcccggatatataataaagtccgggatttttgttttattgtatgttgattattatttcatgttcatgaggcggaaagtatataatttattggttttgctttttcgctttatattgtttaagcgcttgggcaaattgatcgggacaggatgtacccgccctgcaccggataccttccagcaaacctataatttcgtcaatattgcgtccgacggataatttcgcaataccctgagtgtttccgctgcaaccgtttatgaattttaccgaagtaagtatatcgttatcgtccacaacgaaaacgatttctctgcaacaagtgcctttagtcctgtagctttccattaagtactcctaatcgatcaattcctcgtgtaaataaccgtagatttgcgccgccttgtcttcccacttgttgtataccatttttgcggtgttgcggtttgcgacgttaagcttgatttcaagcaccgtctgaacagggtcgacgattttcatctgaacggtgtaagtgccatcgttgtttttataataatttctgtaatattcctgtttgcgccgcatggacatacggttttctttaacgtactcggttatttccgtgcgcaaagaggagggaatgcgcgtgtaaaacagcgcaaggcattgtctgccgtccgccgtaatgttatagtagctgtttttttccttggaggactgataaataaagcccgattcaagcaattggtttatcgtaatcgtgcagtccatgtagcttaaccaagtgtttcggctggtgcacatttcaattatagtattgcccgtaatcgcaacgtccatcgcttcgaaaacatacagcaaaataagtttatttattgtagattcgtccgcgagttccactttgtacctcctgataagaaattaattatatcacacttttgtctaaaaacaaagaattttaacgtaaaaatgtgcattttaatggtttaatttattattgtaaaccattttattgtttttggttgacaatatctgcgcattttgttattatatgatgcaagagggttattatggcgttaaaagatgaaatattggctatacttgagtcgaaccgaaaccaggccgtttcaggtcaggaactggcggaaaaattgtcggtaacaagggccgccgtatggaaagccgtaaagagtcttaaggacgatggccatattatagaggcggtgacaaaccgcggttaccggttgcagaaaacttcggatgttctgactgatgccgggataaaatcctgccttaaacacgattgccgtgtggaagtatacgataaggtagaatccactaatataaccgcaaaaattgccgcgcttggcggggcgcctgcaaacacgattattgcgtcaaactgtcagacgggcggcaggggacgtcgcggcagagtgttttattcgcccgaaaaaagcggagtttacttcagtgtaattctgcgccctaaagttaccgcgaaagaaagcgtgttgcttaccactgcggcggcggtatcggctgctgaggcgatagaggagcttacgggcaaaaaagcttccgtaaagtggataaacgacgtttatgtggacggaaagaaatgcgtaggaatactgagcgaggcgattttcgactatgaaagcggcgaagtggactgcgttatcgtaggaataggtataaacgtaagtaccgttgactttcctcaggaaataaaggataaagcgggcagtataggcgcggtttccagaaacgctttggttgcgacgacttcggacaaacttattgacatttgtgacaaactgccggataactctcatcttgaaagttatcgtaaaaaatgttttattctcggaagagaaataacggtaatgcctttcggaaacgaagagtacgtagcgacggccctttcggtggacggagaaggacgtctggtagtgcgaaccgcttcaggcgaagaaaagacgttatcgaacgaagaggtaagcgtaaggattaaataagagatatgaccactaaaaggattataagaataagtttttttacactgcttgctattatcggcggatttataaagatacccgtgggtaccgtcgctttcacactgcagaccgtgttcgtagtgcttgcggggtttgtacttggcgcgcgcgacggaatgtttgcgcttttggcgtatatgattatagggctgataggaattcccgtatttactcagggcggcggattcagttatattttcatgccgtcgttcggctatataatcggttttgtgataggcgcgtttacggcggggtttgtgatgtcgcgtttttccaccgtcaacactctcaagatttgggttgccggtattatcgcgctgctacccgtttacattatcggtatggcttatcaggtaatgattcttgttttcgtcaacgggcttaccgtttccgcagctttaataacgttaatcagcatattgatttattgggctattgacatagttatgatttttatcatttccatcgtttatcctcgtcttatgtccatgatgaaaattaccgcaaacaacgttacttcttcccctgacgacgataataatttaatgagcgacaaaataagcggcaaggttgacaacacggacgaaaaatcggaaaataatgagagtaaaaattgaaaaccttatcaaaaattgctgcattatttacgatgtgttttactgaaataataaaaagttgagattttgcttcatattaagcttaaaattgtcctggaaagcattacgtctttataaaaataatctcacggttttagctttatataatttaaggcaggtaaaggtttttacttgcctttttttaatgtttttgatatactccgtttaaggaaaaaacggagtataaagaattatggaagagaaaattaaaattttgttggatactgatgcgggcgacgatatcgacgacgcgcttgcaattgcgctgggcctttcatccgaagaagttgaatttgtgggaataacgaccgtatataaaaatacggcggaccgtgcgcgacttgtcaaaaagcttgtgcttgacggagggaaaaatattcccgtttatgcaggatattgcggcggattcaaatttccgaccgacccatacagcggctttcccaaccagataaaaggcgaagacggtaaataccatatgtgtcagtttaccgaggaccttctttcctccgaatacgatccggtaaatgcggaagagggagttgagggcgctgctgccgtcgatttcataatcgaaagttgttataaatacggaaaagaccttaccgtgcttgcaataggacctttcaccaatatagccaaggtgatagaaaaagacccggaagctcttaaccatgcgaagagagtggtaatcatgggcggagcgttttacaccacgtttcccgaatggaatgtgctttgtgacgtggaggcggcggacttactgttcagcggagcagttaaaaatctcgaatgcgtcggtcttgatgtgacgtggaagactaccttgcgtcccgaagaggcggaaataatgagaaattacaaaggtaaagcttactccgaatacgcttcgaaactggtgaaagtctggatgcagcgcaataacggagcaatgcccacgcttcatgacccgcttgctttcttttactgcatttgtccggacattcttgaaatggaggatatgcaagttaaagtcgcaacgcagggagaggctcgtgccgtaaatcttaacgtcggcaggtggaattcgtttcgcagaaaagaaatgaagtcggcaatagtcaaagtagcaaaaggccttgaccgcgaaagatttctgaaagaatacctgaagcgtgttttcgattacggcaagctctgattgcattaatgtataatcacattataatgattttaatttaatatttttaagacgttttcgttaaccttttttctgacaaaacaaaatcaaatgcaccctgaaagttatccgaccttcagggtgcatatttatatggtccgtgattttttcaaattaaaaaggacgcaaacccaagttgcgtccttttttgcgtatttaatagttaagccttgttgttgcagccaagcacgttaaccaatttgtgtttaacgcactgtttgataagttctcttgcggggccgaggtactgtctggggtcgaagtgtgcgggattttcggcgaagtgctttcttatagctgcagtaaacgcaaggcgcaggtcggagtcgatattgattttgcatacagccatggatgcagcttttctgagcatatcttcgggtacgccttttgcaccgggcattgtgccgccgtactggttgatgatatcaacgtattcggggatgacggaggacgcgccgtgaagcacgatggggaatttgggaagacgcttaccgacttcttcgaggatatcgaatctaagtcttgcttcgcctttgaatttaaacgcaccgtgcgaagtgccgattgcaatggcaagcgaatcgacgccggttttcgtgacgaattcttcaacctgatcgggatcggtgtagcaagcgttctctgcggaaacattgacgtcgtcttcgattcccgcaagacggccgagctctgcttctacgactacgccgtggtcatgcgcgtatttaaccacttcggaggtgattttgatgttttccgcaaaagagtggtgggaagcgtcgatcatgacggaggtaaagccgtcgtcaaccgatgctttgcaaagatcgtagctgtcgccgtggtcgaggtgaagagcaatgggcagcccggagtcttcaacagccgcttcaaccaactttttgaggtacttgggattggcgtatttacgcgcaccgcttgaaacctgcagtatgagaggagcgcgctcttccttagcggcttccacgataccctgtatcatttccatgttatttacgttgaacgcgccgattgcatagccgccttcatacgctttattaaacatgtcttttgttgttactaatggcataacaaaccctccaataaattatttgccgtattattatacaatataagcgtttatttggaaagcgttttttcacgtaatttcataaaatatgttttttaggttaaagtcagaatacgctcgggcggataaaggcggatttatgttgacattttaaggttataataatataatagacggcggaattagattattgacaaaggagattgtaaaatgcttgacaaccgtatcaagattcttgcaaaaaatctggttaactattcggtaaaagccaaaaagggagacaaagttcttatcgaggcttacgatttggattctgcgcttgtgacttgcctcgtcgacgaaatacgttccgtgggcgcgtatgctttcgtggagctgttcgacagcaaagttcagcgcagactgcttctgaatgcggacgaaacttattgtaaattgcttgaaaaatacaaccgcgtccgtatggaggacatggactgctatatcggtataaggggtgcgtacaactcattcgagtccagcgacgttcccggggaaataatggatatgtattcaaggctctacgcgcatcccattcatcacgaattaagggtgtgcaaaacccgttgggtgatactgcgttatcccaacgactccatgagtcagcttgcgggtatgcccaccgagaaattcgaagatttttatttcaacgtttgcaacctcgattattccaaaatggacaaggccatggacgcgcttgtggcgcttatgaacaggacggataaagtgcgtatcgtggcaaaggacacggacttaagcttttccattaagggaattaacgccgtcaagtgcagcggtgcgtgcaatatcccggacggggaagtgtataccgcgcccgtcaaggacagcgtgaacggagtcatttcttacaatgcgccgtctatcgaaaacggtatcaagttcgaaaacgtgcgtcttgaattcaaaaacggaaaaatcgtaaaggcaacttccaatttcactgaggaatgcaataagattttcgataccgacgagggcgcaaggtacgtaggggagttcgctgtgggcgtcaatccttatataattaaacccatgggcgatatacttttcgacgaaaagatttcgggttccattcactttacgcccgggtgctgctacgacgacgcgcccaacggcaataaatcagccgttcactgggatttggtgcttatccagactcccgaatacggcggaggtaaaatttatttcgacgacgttcttatccgtgaagacggccgtttcgtaattgacgagcttaagtgtcttaaccccgaaaaccttgtataaagataaatttttattgatttattgcgttatttcgcttgtcaaaaaattgaaaaacctgtattatatatatggtcggacaagttaaagctttatgtgtgtccgacacgacaaaaaagtaaatactattttggaggatagattattatggtaaaagttggtatcaacggtttcggcagaatcggtcgtcttgtcttcagggcaagcctttccaagaaggacctcgtcgtagtgggcgttaacgatccgttcatcgacgtggcttacgccgcttacatgcttaaatacgacaccattcacggtaaattcgaaggcaccgtcgaagtagaggacaacgcccttgtcgttaacggcaagaaagtggtgttctttgccgagaaagatcccgcaaacatcgattggaagtcctgcggcgccgagtacatcgtggagtccaccggcgtgttctgcaccaccgagaaggcaagcgctcacttcaacggcggcgctaagaaggttgttatttccgctcctgctaaggataaggaaaccccgactttcgtttgcggcgttaaccttgacaaatacaccaaggacatgaaggttgtttccaacgcttcctgcaccaccaactgccttgcgcctttggcaaaggtcatcaacgataacttcggcatcgtggaaggtcttatgaccaccgttcactccacgaccgcaacccagaagaccgtcgacggtccttccgctaaggattggagaggcggcagagctgcagccggcaacatcattccgtcttctacgggtgctgccaaagcttgcgcgcttgttattcccgaagttaagggcaaacttaccggtatggctttccgcgttcccactttggacgtttcggttgtcgaccttaccgttaaacttgcaaagcccgcaacttacgacgagatttgcgaaaagattaaggaagccagcgagaccactatgaagggtatcctcggttacaccgaagacgctgtggtttcttccgacttctattccgacgcgcgtacctctattttcgataagaccgcaggtatcgctcttaacgacaccttcttcaaacttgtcagctggtacgataacgaatggggttacagcaacaaggttctcgaccttatttcccatatggctaaagtcgacgcacagtaatcgcgttgaaacaattcgttaatttaaattgcacagtctctttcgggggactgtgcataatttttattggcgctttagcatgaaaaaacccccagttctactgggggaagataaaaaatagctttagcaaattttataattaaagaagtttaccatatagctaatgcgattttgttcctttatagcacgaggaacctgttttacaggtgtgccgtgcgataggacgctatagtaaaagcgatacccgttaacgggttggctggtagtttacccttctagggtatgtgcaaaccaccagtttaactggtggttttgaattaagcgacaagaaatatttttataaaaggaaaagtaaaaatgaaacaatattgtgaaaaacttttaagcgaaatcaaaaacaaaaaagtcttaatttcctcacaccgcggacaggcggggaccaatattatcgagaatactgttcccgcattcaaaaacgcgcttttgcacggcgccgatattgtggaaatggacgtggcgatgtccacggacgggaagtattacgttttgcacgacggcaacgaaatgcgccttttgcgcacggctaaaaatatccgctccatgacttcggaggaaatcgaaaaccttgattactacaattatgaaggcgtaaaatccggcggtaaagttaaccgtttcgaagacgttttatccgcgcttaaggggaaatgtcttataaacatcgaccgctgctgggaccttaagtttgaaaatttcaattacccgttgggcgcttttgacataatcagaaagcttaacatggaagaccagataatatacaaaaccggcataaacgaatattacctcagcgagatgaaaaagaacaacgtgcgtttaatgtatatgcccatcgtcaacacgccggaagaagtggaaaaagcggaaagttacggtcttaacatagtcgcgcttgaagttatttatcctacagtggacaaccccatggtatcagacgaaaacataaagaaatggaaggataagggctatcttttatggacaaactccataaacgtgtgggacgactttgtgatttcgggcggacatgacgacatgcacgctattaaagagggaacggccgcatgggatttctgcatcaataagggttttgacatcattcagaccgactggcctgcggtacttaaaaactatcttgaggaaaaagtcaggtaacgtcgtttttttcgggttttgttaaacgcgcgcgtttcgtttgatttttttgtaaaattttgttaaaataaaatataaattgtttcggagttttgtacatgaacggatttcttttttcggttgcgtcaacagcaaatatcggcgcaggcgtagcttttacggcaatagccgttattcttacgtttgccgtactttttaccgctgtgtggcttttggcgcgctttatcggcgcggataagagcgaaaatgccgtaaggtacgtcgttgctttagttgcggcaggcgtagttttgcgttttttgacggcattttttattggcggttacaggtttgattttgccgtttacaaccgtatgatagagcattttttgactaacggcgttaccaactactatttcaagctggggcccgaggtttatccgcttacgttttacgtttttgcattgttcggcggattgggcagagtgttcggaatagcggcggattcggcgtatttatcggtaatgattaaaattccgtttattattgccgatgccgttactgcggtaatactttataaaatcggcaaaaagtacattaatccgcaaacgggcgccgttattgcaggagtattcagcatttgtcccgttttctttacggcttccggaatatggggaacttcgcttacgcttttgctgccttttattgcaggaagcttttattgccttattgagaaaaaacactttgcggcgataatgctttacgcgctttccatgcttgttgcgaaagaagcgatttatatttatcccgtctatttcgtttattatctttatattttcatacgcgccttggttgccgcggttaaagcaaaaaaacctttcggcgaaatcgcaaaagacgcaaatctctctttggcgtacaaggttcccgtatattttgtttgcgcgtttttaattaagtacgtcgtgtctttgccgcttatagcagtcgatatgaaaggcaatcctttcacgtttgtgtacgaattgtttttggctccgctttctcagcttgaatacttcagttacaacggtttaagcgtattcaatattttcggttacaacggggaaaccgtaaacgtgactttccccagcgtgatttttgccgtatgttttgctttgcttattacgggtatcgtttgcgcggtttatttttccaagaaaaaccgagccgttttacctcttcttgcggcatacgttttctatacgcttgcaacttattttctcgacagtagcgtgatgagcctgtatcccgtggttttcttattactgcttgcctttgcttatatcaaagacagacgtttattgcaggttttctttgctacttcggttttactgaccgtaaacgcgctttccgccatggttaacggcgggtttatgaacatgctttcggcttcctcgttcgttgcgccttcttatacgggttctcctttgatggacgcaggttttgcactcgggcttaatatcgcgctttcggtgcttgcggtcgcgacgcatatttacctgacgcttgtgacgtttgatatttccatgagcaataaccgcaaacttttaagcggccgcgaagatatcggatatttcgagggaattaaaaagctgtttaagtaggagggggtaagcatgcttgccaaaatcaacggttacggcctgcagggaatagagggctatgccgttcagatggaaatagacatcaataacggattgccgggctttgaaatagtggggcttgcggatacctccgttaaagaatccaaagaacgcgtgcgcagcgcgataaaaaacagcggtttcaagctttcgcctaaaaaaattacggttaatcttgcgcctgcttcaattaaaaaggaaggggctgtttatgacctgggtattgcggcgggcgttctttacgctaccgaacaattagagtgtcccgatattgcagattatattttccttggcgagttgtctcttgacgggaaattaagacacatacgcggtcttatgcccatacttatttccgcgcgcggcaaaggctacaaaaaaattatcgtgccctacgccaacgcaaatgaggcaagttatatcgacggtatagaggtttacgcattcgaaacgcttcgggaagtaataaactttttaaacaaaagcgtcgaatgttctcccgtggaaagccgcaaaataatgcttggaagcgtcggaaaatacaaggaagacctcaaatacgtaaaaggtcagtatgttgccaaacgagctttggaaattgccgcagccgggggacataacgtgcttatgataggtccgccgggcgcaggtaaaaccatgcttgcaaagtgtattccgtcgatacttcccgactttaccgtttccgaatcgcttgaaactactaaaattcacagcgttgcgggagttttaagcgaagaagacgggctggtttttgccaggcctttccgctcgcctcaccatacggtcagccgcgtggcgcttacgggcggcggctcaaacgcaaagccgggagagatgagtcttgcgcataacggtgtgctttttctggacgaattgcccgagtatccgaggtcgtgtctggaaattctccgtcagccgctcgagg

SEQ ID NO: 2497 - DNA, 18329 bp, Unknown
  16S sequences of unknown bacteria
ggagtatggtacgataaaggtatggcggctttgccaaaatactatggaaaagggggtattttatgaagtttgacatcaaccagctcgaatggatttatccgcccaaacagtcctttctttccgcggaaaagatcgtaattaccaccgaccctttgacagactgctggcaaagaacgcattacggatttcaaaaggacaacgcccatgcgctcgtgctgccgctaaaggaagatttttgctttaccttcaaagcctcctttgtctatggtgcacaatacgatcaatgcggtttgatggtgtaccaggatagcgacaattggtttaaggcctccatagaatacatcgacgattccttgcaacagctcggcagcgtggtcacagccaatggctattccgattgggccatgcaggatattgataccagcgtacaagccatctattaccgtctatccagaagcgggacggatttctgcatagaatacagcctggacggcatcgcgttttcacaaatgcgcgtgtttcattttgaaaagggcgccggggttctgcgtaccggtctctatgcctgtagtccttccgatcatcagttcgatgcaacattcagcgaatttacgcttacgaaaaaccaatggtaagcttacaaaaaaagtcaaaaaaggcggcaaaatatgccgccttttttccgttttgaacttgcccacatatgatatactgatgatagaaaccaaatgtactggaggtgttctttatgaagacgatttattgtatcaccggagccaatggccatctcggcaatgtcttggttcaaaagctatgtcttctgggtcatcaagtacgtgcattgatgctgcccggcgatcaaagtcacctggccccttgtccacagctgaccatatatcaaggaaatatttgcgaacaggacaccttgacggccttttttgactgcccgccggatagcgagctggtggtaattcatgcagccggcatcgtaagcattgcttctaaagtacaaagaaatgtatatgacgtcaatgtaaacggaaccaaaaatatcattgcgatgtgcttggcgcatcgggtacgccgtctggttcatgtctcctccgtgcatgccctaaaggaacagcggcaaggctgttggatctatgaacaaacgaagtttgatcccgcgcacgttgtaggggcctatgccaagaccaaggcggaggccactcaggccgtattggatagcgtagagcaagggctggatgccgtcatcgtacacccctccggtattctggggccctttgactatggccacggccatttaacgcaaatggtggaggattatctaaacgggcgtttgaaggcctgcgtacgcggtggatatgattttgtcgatgtgcgggatgtggcggatggcatcattgcagcggcagaaaaaggcaagaaaggcgcctgctatattctatccaatcactatatgccagtagaggatctattgtacctggtgcataaggtcagcggcaagcgcccgatccgtatcgtgctgcccatgtggtttgccaaaggaaccgccggcctatccgaattgtattataagctattgcaccaaaagccactgtataccagctactctctgtataccctgacaagcaatggcctgttttgccatgacaaggcaacagaggagcttggatatcagcctcgccccctcatcgagaccgtagaggataccgcaacttttctctatgccgaagggcgtattcacgataaaaagcaccggcttatgttgaagcagccggcgcatctgcaatccatgttgccgtaaaggaggctgggtcgttgcttttcgctgaacttgcaagctttcaaccttttgatgagcatcaactggcagcagccgatcagattcggtttgcttggcaatcgtttggcgcgcagctgtatacgcgggaaaatccggtctgccattttaccgcttccgcctggatcgtcaatcccgcttgtacgcatgcgctgatggtatatcataacatttatcactcctggagctggacaggcggccataacgacggcaaccccgattttcaatccgtggcccgtcgggaagcggtggaggaaaccgggctctccagcgtttcgcttctttgccctggccctgtgcgatgggatacgctctgcgttccggcccaccgaaaaaacgggcaggctgtagcgccacatctgcacctcaatgccacctatttatattctgccgatgaggatcagcctctaagtgcccgtgaaggggaaaacagcgccgtgcgctggatgcccatagaagctttgcctgcgcattgcagcgaacctcttcttttgcctatctatcagtggctttgtaagcaggccaagctttatacgaaataaacgaacgaaaggaatccgattcaaatgaaacagattgtggcttctatcctggccgatatggtcgaacacgaacaggggcagccaaagcatattcagcattttctaaaggtgcatgcgtttgcgcgctatatcgggcaaaaagaacaattggacgaaaaaacgttgtttacactcgagcttgctgccctggtccatgatatcggcatcaaccccagcctcgctaagtatcatagcagtgccgggcagtatcagcagatagagggtccgccgttggctcgtcgtatgctggcgcgctacgatatcgccaacgacatgatagaacgcgtctgttatctggtagcgcaccaccatacctatacccaaatggaagggctggattaccgtattctggtagaagcggatttccttgtaaatctctatgaagaccaaagcagcgtacacgccatacaaacggcgctgtctcgctattttaccacggagaccgggcgttggttgcttcaaaccatgttcttggcagcgcctttagtgtaagtatgcgccatgtatgttaccgttgtgccctatcaagcttgctggccgctggcttatgaaaaagaggctgccctcttgaaagaggtattatcgggccttttggtttctatccatcacattggaagtacagctgtgcccggcttagctgccaagcccatcatcgatattttgcctgttgtaacggaaattacggccgtagatggcctaagctatgcctttacggcgctcggctatgaatatatgggggagttcggcattcctggacggcgttatttgcgcaaaggcggcgcgcatagaacgcaccaggttcatatatttggcgctgccagccaacacgaaatcgagcgtcatttggctgtgcgtgattacctgcggacgcatccgttgaaggcaggtgcctacgctacgttgaaacgttcgctggccgccgcccatccctatgacatcgaagcctactgcgacgggaaagatttgtttgtaaagcagctggaaaaagaagcgctcgcatggcgccgacgaaccattgcaaacaaaaagagctgatacacagctctttttattctttttccattgtttgcagaggctcatccgtaaaaaacattgtaacggtgcatacggcaatgctccgtccctcgctatctttcatttccacatggcttacgcctgtggatttgccaagatgcacgcatgtgccataggccgtgatcacaccaccatgagcttttcggagaaaatggagatctgcctgcagcgtaacgcacttgctgttgcgctgcacaagcgcgcttccgcccgcaacatccgccagcgtatagtaggcgcccccatgcagaaaccccataaaattttcattatccgggcaaaccgtcagcgttacttcgcttttgcccggttccagctttacgatggaaatatggctcatcctgctatagggatcatgctcgttaagataatcccgcagggcttcgtagtccatactctttcccctttcttttgttcaatgctttgtattttatcccaattcgtcaagaaaatccatgccattgtctttgtaccccttcaaaacccgtggtaaaataagaaaaaacttatcaggaggcagcttttccatgtctaggatcttattgagccccagtcaatatgtacagggcaaaggagaattggcgcgtttggcgcaatatatccttccgctcggccaaaaaccctttgtattgatcagtgcatctggccaaaaacgattcggtgaatccattgagcgcagctttaatggcgccattacctttgaaattttccaaggggaatgctgtcaggctgaaatcgatcgtgtaacggcccagtttacgcaaagtggctgcgacgtattggttggcgtaggcggtggcaaaatttttgataccatcaaatgcgtcagcatacaaacggaggcaccagtggccattgtgcccacagtcgcatccaccgacgcgccttgcagtgccgttgccgtcatttatacgccggacggcgtgcccgaaaaggctgcgcacatgaagcgcaatcccgatgttgtaatcgtagacagtgccgtgattgcaaaagcccccgcccgcctgctcgtagctggtatgggcgatgcgctggccactttctttgaggctcgcgcttgccagcgcagcaatggggataatagcgcccgtgccaaaaccacgctggcggcgacggcgttggcacagctttgctatgaaacgcttctggcagacggccagcgcgccaaaatggccgtggaaaaacaggtttgcaccacggccgtagaaaatatcattgaggccaatacctacttgagcggcattgggtttgaaagcggaggcctggcagcggcgcatccgattcatgacggcctttccgcactgccggaaacgcatgccatgtatcatggcgaaaaggtggcgtttggtaccttggcacagcttgttttggaaaacgcgcccgtagaggaaatcgaggaggtcgtacatttctgccaaagcgtaggccttcccaccacgctgtgtgaattggggctccatcaccccacgcaagaacaaatacaaaaggcatctgatatagccgcctcccagcgctgcatgggcaaccttccctttgaagtaaccgcggagatgatcgcggacgccatttgggccgccgatgccatcggtgcgtattacggagagggcggctgctgttgatccaacgcatattctcagagtttttcttgcaggacaagcagggttggtgtatcctacaaacagaaaatgaccaaaaggaggtttcttctcatgaataaaattcgcattgggatcgccgggtatggcaatctcggcaaaggggtcgagctggctgtagcccataatcaagatatggagctggtcgctgtgtttacacgccgtgatccgtcaacgctggccgtgcaaaacggcgtgcccgtagtatccatcgagcaggcggcagattggcaggataaaatcgatgtgctcatcatttgcggcggatcggctacggatctgcccaagcaaggtcctgcccttagcaaatatttcaacgtgatcgacagctttgatacgcacgccaacatccccgcttattttgccgatatggacgctgcattgaaatcttccggcaaggtaggaattatatccgtaggctgggatcccggcctgttctctctcaaccgtctgtatatgaattgcgtactgccgcagggaaaatcctacactttctggggtaaaggcgttagccaggggcattcagacgccattcgccgcgtgaaaggtgtaaaagacggcaagcagtataccatccctgtggaggccgtcatggatgagatccgccagggttctaccaaggagtataccacccgccaaaaacacctgcgcgaatgcttcgtcgtgttggaagaaggggcggatgcaaagcaggtcgagcatgacatcgtcaccatgccaaactattttgacgaatacgacaccaccgtacatttcatctccgaagaggaactaaaagcgcaccacagcgcgatgcctcatggcgggtttgtcattcacagcggcacaaccggccaagacaacaagcacatcatggagttttccttaaagctggattccaatccagagtttacctccagcgtgctggtctgctatgcacgcgctgcgtaccgcctggcaaagcagggagattgcggctgtaaaacggtctttgacattgcgcccggccttctgagcatccatacgccggaagagctgcgggcccatatgctgtaagacaaagcctatctgggcacagagattttctctgtgtcctttttttattttgaacaggccggtgcgagaatattttcttctccttacacaaaataggttgattttgctcgctctttttttataatgatagcaggactgaccgaccggtcggtcggaaatcgaaaggagcgcatcatgttttcaaaatacagtgtaaaaaagcctttgactgtattggtagccatcattattatcgctattttaggcggcgttagctataccaatatgaccatcgacctgcttcccagcatgaatcttccttatgccgtggtctccactacgtatgtgggcgcctcaccggaggaaatcgaaacaaccatcaccgcccccatcgaacaggcgatggccagcgtaagcaatgtggatgaagtcagctctatttcccaggaaaacagctctatggtggttctaaagttcgtagaagacgccgatatggatgcctgtgtgacagatatgcgcgaaatgctggatctgatagaaagcgcgcttcccgaggaggccggcaatcctacgatcctaaagctgaatcccaatatgatgcccatcatggccgtatccgcttccgtagaggggcaaacgatcagccaatccagtgaatatattgacgataccatccttccagagttgaaaaccacggagggcgttgcgtccgtcagcgcagatgggttggtagaaaaccaaatcaccattaccctcaatcaggataagatcgataaaatcaacagtcagctgcgcggctatgtcaaccgtagaacgcaaagcgctgtcgatgagcaggtaaacgcccagcttgcccagctgccagagggggtggataaagccgctgccgaggcacagattcgcagtcaaatcgaacagaatatgcccaagaccagctctcctaagatcgaaattacaacggagatgttggagggaatcttacaggggcaaaactttagtatgcctgccggcagcgtagacgatgagagcagcgatgttttggtgcgcgttggcgataaggtagccgatgttgatgccgtagggcagcttgttttgatgaatctgcccagcgtaggcgatgtgaccatcgaagacgttgcagatattaccgtatctgataacagcacggatatgtataccaaggtcaacggcgaagacgctgtggtgctgatgctgcaaaaacagcccaactattccaccgccgaggttacgcagaatgtagcggacaaaatggccacgctacaatctgagcatccggaagtgcatcttaccacaatcatggaccagggcgagtatgtcggcattatgatcgataccattgtttccaatctggtcaccggcggtctgctagccattctcattcttctgttcttcctaaaagattggaagcccaccgtcatcgtaggcgccagcatcgtggtcagtgttgtaactgcttttgtgctgatgtatttttccggcgttacgctgaacatcatttcgatgagcggccttgccctgggcgtaggcatgctggtggacaattccattgtcgtcattgaaaatatctatcgcctgcgcagcttgggcgttcctccgcgcaaagctgccattcagggcgccaaacaggtatctggtgctattttctcttctaccttgacaacagtgatcgtctttgtgcccatcgtattcgtacaaggaatgacgcgccaaatctttgcggatatggggctcaccatcgcatattctctgctggccagtctgctcgtggcgctgactttggtgcctgctggcgcttccactgtgctgcgccgccagcccgctaaaaagaataagacgtttgaccggcttaatcatgcctatcagcgttctttgtcctttacactcaaacataagagttgggttatccttgtcgttgtagcgcttcttggcgtcagcctctatggcgcttcccagctgggcacagagctcttccccgccaacgatatggggcagcttaccctatctgttacgctgccggaagatgccacagagcagcaagcgcgggatacactgggccaaatctccgatatactgatgcaaaatgaaaatgtggatacggtgggtgtcttgggttccaccggaagttccagcatgatgagcatggtgggtggcgacgccaccagcatctatgtactcttaaaggacgagcgcagtgcatccaccaccgaggtagcgcagcaggtgcgtgaatctacccaggacatcccagcggaaatcagcatcaattcacaaggggcggatctgtcctctatgacaggcgatgcgattgccattgaaatttatggccaggagctggatgatctgcgtcaaaacgctctatctgtggcagagatgctttctcaggtggagggtgtaaccgaaatagaggatggccttggcaaaaaaacaccagagctgcgcattacagtggataaaacagaggccatcaaaaacggcctgaccaccggccaggtatatgccgccgtgcaagcggaaatcaaacagcccagcgctgcctcttccctaacgcaggacggcaccacgtacgatatctatgtaaatagtggcaagaccgtggataagcaggcgctggaatctctcaaaatcgaaaacagtgaaggaaaatccattgccctgaaagaaatcgcttcctttaccaccgaagaagggttcgacagcatttcccgcaacgggcaagagcgttacgtcaccgtatctgcgcagcttagcgagggctataacatcggtaaagtcagccagacggtacaggctcaactggacgagatggatctgtctggcggctgccgggtacagctggccgggcaaaatgagatgattgaggagaccttttccaacctattccttatgatggggttggcgatcatctttatctacctggtgatggtggcccagttccagtcgctgctcagcccgtttatcatcatgttcaccattccgttggcgttcaccggcggtctgcttgctctgatgatgactggcaatcctatcagcaccgtagcgctcatcggctttatcatcctggcgggcattgtggtaaacaacggcattgtatttgtggattatgtcaatcagctgcgcagtcagggtatggataccaaagaggcgctcttacgggcaggtcaagatcgtctgcgtcccattttgatgacggcgcttaccaccatcatcgccatgtccaccatgtgctttgatcccagcgcaggcgcggccatgatgcgccccatggccatcactaccatcggcgggctgctgtatgctacagtgctgacgctgtatctggtgccggccctgtatatggtaatgcacaaaaagccgcccaagccccgggatccagaggatgagcccgacgatgttttgttcgtcgatattcctgccgaaacgcagacagcgccttccagtgaggaagaaggcgatccatcgtgacagataagcgtaccctcattttgcaaaccacacgtggcctgctcaatgattatgactatacgcaaatcaccatcagccagatcgcaaaggcatgcggcatcggtaagggcacggtatatgaatattttcaaagcaaggaagatttgtttatccaggttatcgtctcctataccgaggaacaaaatcaggttctttgtcaacctttagaggccgtttcccttgcccaggccatttatgatatcgtgctgcggctttacgatatgtttgagcgtaacagcgccatgcccagcttgtttttgggcattcttcagcagcagggcctgcctgctgagatcttgaataaagtatgtcatttgctgacgccgctttgcaattccttcatcagctatatacgcaggctttgccaaaatgccgtggcgcgtggagaattgcgctgcctgccagatgaatttgccttatcttacatcagcctgggccttgcaagctatattgcgatgaaacaccattccgatctcccaaaagaactgctggcagaaaaatgcacgcaaatggtgctgcgccagcttcccttggcaaaggagccttcccatgcgtgaaacaaaaacaaatgtgatgcgtatcctggaaagttggcatatcccctatcaggcccaccaatatgaagccagagggcctgtagacggcgtcaccgttgcagagcatctaggcatctctgtgcagaaggtttacaaaacgttggttacccatgatgaaaaagggcaatgctatgtgttcgtcatcccctgccataaggaactggatctcaaaaaggcggcggcagcggttggtgtaaaatccgtatccatgctggctgtgaaggatttacagcggcttacagggtatatccgtggcggctgttccccaatcggtatgaaaaagaactatcctaccgtgttggatcagagtgccgccggcttgcagacctttctcgtctcggccgggcgaatcgggcgtcaggtagagctttcgccaacagagctggcaacgcgcctgcctgcaagctttgcttctatctgtcacagttaaatcagaaaaaagaaagcacagagcaaactctctgtgcttttctgtctcttatttttcactttttatgatataatttttattcatagagcaccgtatcggcatcttcgtttacagtgtttatcatcgtccttaaaggggggatcaactatgaaaaagcttcgcttggcatcgttttgttttgccgttttctctcttggctctctctgtgcctgtacgccctctgttgttccttctgtgtcgccatcagcttccccttctcctaccgtcgcagaagcgcttccctttggggcagaagatttaaccatccagggcctgagattgggacagtccaccttggagcaggccaaagagcacctgggagaaggatatgatgagtccacctataccctgggggtagaccagagccgctttacctctctgatcagcgacgccattacctacacctttgtagagcaaaacggtgtatttatcctttcgcacatcaatatcaacgatccttcgattccagggccgcgcggcaccaaggtaggcgacaaagaggaggccattttggaaaagtttccgcagagcgagccgcctgttgttgaggaggataccgtagtgctgtaccgggcgaatccagaaacccaaacaggcgtcagcattccgccttgcggcctgaataccggagaccagatcgcatattacgcaccgattcagccctatgcatttgatcccgcagatgagcaggccgctcttcagtttgacctggctacagacacaaactatgccttgttctatgagatctccgaaggcgtcgttaccgctatttatttgcggtatggatcggatcaggatgccgaataaaaaagcagcccgttggctgcttttttatttatgtacgtttgataacaactgtctccatcgactcaatggcttctttgaccaaacggtccatctccaaattcttttcctctgcctctaccgcttctagcgttggctttgtggctgggtgctttggcacaaatacggtacagcaatcctctcccgggcgaatggagatgtcaaaggtcccgatcttgcgcgcttgttcaatgatctcggttttatccatgccgatcaatgggcgaaatacaggcatatccgaaaccgcatccgtagtacagatggcttcaatggtttggctggctacctgccctaggctttccccggtaatcagcgcctgctccccatcccgatgcgccaccgccagtgcaatgcgcatcatgcagcggcgcatgatgacggtcagcagctcatgcctgcatttttcataaatgttttcttgaaactccgtaaaccgtaccagatgcaaccgtaccgggccgcagtaacaggccaggcgtttggccaggtcctctaccttttgctgcgccgcttgccctgtataaggtgggctcataaagtgcatagcggtcaccgtcatcccgcgttttgccatcgcataagccgccaccgggctatcaatgccgccggacagcatcaccatgcctttgccgcttgtgccgatgggcataccgcctacagcctccctggcgctggcatatacatatgcgctgtctctcacctctacctgtaccgtaatttgcggatgatgcacatccaccttgacgttatccatcgcctccaaaatacggccgcccacctcgcgtgcaatgccctggctgtttgggaaaaaggacttgtcctccctgcgggcacgcactttgaatgtgcaggcagtcaggcccctatgcgccatggcgtcttttagctccatgatggcagcttgggccatggcctccaaggtcttgtccacctgggccgcggggctgacccccacgacgccaaaggtgttggcgcattgctctacaacctctgcttccgcctccggcgcaaatccggatacaaaaactctgccctgcatttccctgacttcgcaatgcaggccttccaggttattcgccaaacgctgacgcaaaagccgcttgaaaaacggacgattcaaccctttcagatgaatctctccatatttgaccaataccaatcgctgttccattttatctccttacaaacctcctgatgcgcgccacactttcctcgaccgcatccgctacaatttccgcctgctccaccgtattcatacagcagaaagaaaaccttagcgtgccctgcgccacctgcggcggtacacccatggcgcgcaatacacggctctctccctttttatgcgagctgcacgcgctgcctgtgcccacatagatatacttttcttccagcgcatgcaccaaggtttctcctcttgtgccttcaaacgacatagaaaggatatgcggcgcaccctcttctgccggcgggccgttcaaatgtgcgcccggaatacggactagccgctgataaagcgccatttttaccgccctcatctgttgcacatacgcatccctatgctcgatatactgtctcaatgccgcgcctaggcccgcaatgcccgcaatgttttccgtaccggcacgataaccatgctcctggcctccgccaaccatgacgggctgtatgccgcatccacggcgtacatacaacacacccgttccccttggtgcatggaatttatgcccgctgatagaataggcatccaccaatccgcctggaaatctcagcttgggaaaagcctgtacgccgtcacaatgaacgatacattgtggcgcaatgctcttcgctgtgcgggccagcgcttcaatgtcgttcacagctcccgtttcgttgttgacctgcataatggaaaccagcctcgtattcggccgcatcgccgcccgaagcgcctccgtggttacttcgcctctccggtttgtgggcagcagactaacctgcgcaccgcgctgctgttccaggtagcggaatgtttcatatacgctgctatgctcgctttgatcggtaatcacatgcgcgtgcatcatgcgctgcggcactgcccccatgatggcgtccacattggattctgtgccccccgaggtgaagatgatctcttcctcctttacccgcagctccttggcaaaatcagcccttacctccgacaataaattggaaacttttaccgccggcgcatatagggccgagggattataatatacctccgtcatacacgacaaaaccgcctgttttgcgcactcaaacggctgtgttgtcgcgctgttgtcaaaataaatctccataccgttcctccagttttttattttaccatgcgatagcaattatcggcaacaatcgcccaaaagcttttttttatttgcccgttctgatataatatatgaaaatgtaaagaatagggtgtgatgttatgcgttgtcctagatgcaatgccacggtggacgattccgctttggtatgcccggaatgcgggctgcaattctcggataccgaatctaccatagagacggaagtggaaactgcaagccaggccgcagcgccggcggaggcttcctctgtcatagattctgatacggaagataagacgcacgctccctctgtggagaaggaaagcgctcctgaaaatgcgtcttcggagaacagcgaagagcagacccctgctttgtctcgaagggctagggcagaagccacggaagctgccaaaaaggaaaagcgtacaaaagtaaaaaaagagcgtaaggtggcaagagagcctcgccgtaagaaaaaagaaccgcaaacgctgagccgcattgagcaaaaggaactagatgctcagcgtaaaaaacggaaccgtcgcagggcatggctgatcgtggggatcgtcatcgtcgttcttggcattcttttcgttttcgtcaacaactatgtgcaaagccattatgattcctggtcgcagatgctgcgtttggaatttggcattggcagcctaccgacgccggaaaaggcaacggtggaatccatcaccaatgccgacggtaagcccgcgcgtaaaatcaccgtgcagggcacgagccccgatgtgcttttgattaagtccatggataatcagcgcgtaacctttgtcaacggagaggccaccattacggtgccggattcctactttatccctaaggagatcaccacaacggaaacggatttccccgtcacattggatatggtcattttggataaccgcggcaacgaggtgcaggtgccatgtgatccgtttaccattgagattccccaggcgcaggcttcggagatgaatccgcctaccgatacttacgaaaccagcgatcccaacttgacgctgtccttcaagtgttcgccagacagtaccatctacctcaacggcgaacagcgtaccgaggatatttcaagtggccagttctccgtttccctgcccttgagcatgggggaaaatacctttgatttggaagtgcgcgcgccttacagcgcggcaaataagcatcatttggtcatcaatcgtgtgctgccggccgccggtgtttcctttaacggagccattggcgcacgaaccactgacgctcggccaaagctggatgggaaatttgaagccggcgcaacgctctctcttgtcagcggaaagggaaagctgaatgtcaatacgcagaacaataccttttctattgagtgcgatctctccggctatggcgaccatacctttaccatcaaagcaaccaaggaagggctgcgtgatggcgaactgacctggaccattgagcgcatcccggattccacgagctatgtaaagcaatgtaaggaagcggatgtggctaaggtcgtggataacccgaaagcatttgtggggacgccgctgtgctttagcggtacagtgcaagccgtagaatcacaaaagctaacgctttcctttgttagcggccagaccatgaccttctcctacaaaggcgatacccaatatgcggtaggagataatgtgaaggtctacgggcagcttttgtcagccaacgatgataagacctatgaagcacgtgcttttttcatcgtaaaataaattatatctaaaaagggctggattgtttcatccggtcctttttctatgctttgcagtaattttcctttgttaactccatgtttttctgaaaatatggagtataataaaaggcgtattagaaaggatgatccttaatggaccaaaatacaaaaatcgggctggtattgtccggcggcggcacaaagggagcctatcaagcaggcgtatataaggccatggaggagcttggcctaattcctcatatcaaagccattgccggcacctctattggctcgttcaatgctctgcttttttcctgcggtacggtggatccttttgctttatggaaaaccattacgttttctacgcttttgcagtatgtggatcccaagtcccctctggccaatttgttcaaccaaatgaaaagcaaggtattcaaaacacagacagaggacacgcaggaggaaaacgattcgcgcgcgcttttaacgcagctcaatcaaagcggattgggccgccccatgcttgatctttacaaggcattggtcacggagaataccgatttgagccgactagatactctcggttatccggtatttgcctgtgcctatgatatagaggcgcattgccctgtctactttgatctgaccaagcaatccaaagaccttgttacggagatcgtgttggcttcctgcgctgtgccccatgttttccccgctattcccattcatgggcgcatgtacgcagatggcggcgtcaatgatcccctttatcccgtcgccaacgccgacaactgccccgccattgccctgtcagccaccgagctggatatgctgatcctcatccatttgcatgaaaatgagcccgtagatctggccttttttgacggcaagcctattgtacacctctttccctcccagccgctagaacgcgtatccggaagcggatcgtttgatatgactcagcatacattgctgcgcaggctagcacttgggtacgaagatgggaaaagggtgctttctccgcttgttttgtaaataccattcataaaaaaacactgctaatacgcagtgttttttattatttcactttgccaaacagccgttcatatttctcattctggctaggactgtgggtagcatagccaatcggcagcttatcttggcaagcttggtttaccttttctgcccctgcttccccaaaagcgccgcatagctcgatcaaatccaccttatcttcctcggcccattgcttagccacttggcaggcctgctccaggttatctactgccacgatataggtttcatcttgcccatggcaaaaatatgcattgtggattttcggatcgtagccctcgtgcatttggatgtacccaaaccggaactttttcatcttgctttcaccctttctttttgcagcctttttggtcttttattatatcatacttattctcgctgtaaaaaaaacgagggccgaaatatatccggccccctatcaatagctgccttttcccaaatgggatctgcacggcagaaatgccctgcacaggggagatgcccgttgtgcagaaagcaggtgcggcagcaacacctttttatttatgtacaaactgcagcgcatcttccagcggcacagtatgcctcagcttttgataaatatttctttgcacactctctttgggcgccttttgcgcatccatccatgcctgtattgcctgtaaacagctttccttggcccgcgggccgttttccgtgcaatgatgaaacgagatttgcggcagggtaaaaacgattcgctgctcctggatctcataatacaccgtcagcttctccttgcggtattgcgccaacttccccgcaagatttactgcgcccaccgtttccagctgttccacatgcccacaggaaatgcacagaaaaatcctctcattcatccgattcccctggcttaccgtaccgcattctgggcagcggctaaacaaacccctggcactgacaagcacagcgggcggcataccgcaaagctctgtacggtatcgcagccttcccgccaaacgattgtagcttcttaccgtcatctgcggcgctgtgaacatatccaggctgtcgtttcttgttaccaggtttgccagcacgatacgggctttatgctcttttgccaaggccaatacctgctctgataaccggcgctctctatgctctcccggttcctcttgcaaatagccagtacgcaacacagccccttgttcactgcaaagtgcatagcagatcgtatgctctatgcctctggaaacccccagtgtcgtcctaacggattgtgcctgcctcggcgcaatccacagccttacatgtaagtaatatttgccatcgcgctgcaccaactctgcacttttggcagaagccgttccattttgcagccacagcagatgctgtttttgccaaccgcctatctccagcggatacagctgatagcagtaaggacgcctactctgttttaagattttatcgctggtaaggtagcgcagcttcccttggcgccgcggcggtgtttgcctagcctgctcggcattgaaaagatagagttttgcgtagtatctatcctgtatttcatcgtacagcaatgcataatttcttgtttcgctataccggcaa

SEQ ID NO: 2498 - DNA, 32759 bp, Unknown
  16S sequences of unknown bacteria
cggcaggatcggagtttatcgcgattatgcggtcggagtttttcatgcccgccgcaaactgaacggcgccgctgatgccgacggttattatgagtttgggttttactgttctgcccgaaagtcctatctggcgtttcgggtcaagccagccgagttcgattatcgggcgagttccggctatttcagcgccgagcaggtcggcgaggcggcgaacaagctcaaaatcttcttctttctttattcccctgccggcggcgacgattatttccgcgtcggatatgtccttttctttcgctttttttatgacttcgagaacctcggtcgtcgtttctcttttttcgggcgcgagttccatgcgaaaaacttctccgtgcggttcggtctttgcgggagcggaaaatatcttgtaacgcaccgtgcagagctgcgggcgggtcttggggcaaagtatctttgccattatgttgccgccgaacgcgggacgtatctgaacaaggtctgtgttttcgtacatttcaagcacggtacagtccgccgtcagccccgttctgaaacgcgcggcgatgcggggcgcgagagaacgtccgacattggtcgcgccgacgaggacggacgagggcttgacacgctcgatgaagtcttcaaacgcgtttgagtaaggaagcattacgaaatcggcaaattcgggatagtcgtaaacataaacgcggtcaacgccgtattcaagcagcgttttgacgtttttttcggtgttatgcccgataagcagcgcgtagacctcgtgttttgtcactgccgcgagttcgcgggctttgccgatgagttcgaatgtgacggggtggagagttccttcctcggcttccgcgtaaacgcaaacgccgttccaaagcgatttatcaacaagttcgtcgtgggtctcgacaagcgaaacaacgccctcgggaccttttttgacgcagagtttgcacatgcggcaacccgcgccgatgtcgagagtttcgtcttcgtatgtaatggcggagaaaggacagacttttatcagcgcttccgccgcaagaggcgtgacaagcgccttgtttattttcaaagatatcatttcgccgtcctccttatatgaatttgccttttttgagaagcccgaatattccgtccgagagttcggaagccgaaccgttgaaaatctctttgttttcgttcttttcgggcgggaatatcttatcgacctgcgtgggtgagcccgcaagcccgtaatgcgcggggtcgcggtcttccatatcttcgaaagtcagcacgcttatctgtttttcttcgtctgtctgccatttgcgtttgcaggacggcaggcggggcgagtttatgtccttatcaacgcagataaggcacggcagacgcatacgctgaacctgtgtggaagtttcgagattcatgcggacggttattgttgtgtccgtcactgcaagcacttccgtgacgtttgccgcgtgggcgcagccgagatgttcggctatctccgcgccgacttgggctgtgtcgccgtccgtggtgagtttgccgcagacaataaggtcgcaatcaagtttttttatgccgcctacaagcgtatatgacgttgccagcacgtctgcgcccgcgaactttcggtcgcttatcagaactcccctgtccgcgcccatataaacggtttcgagcaatgcggtctttgcctgcggaggtcccatggtcacggttgagaccgtgccgccgtaacggtctttgagttcaaatgcggtctccaacgcgaacaggtcataagggttcagtttgctctctacgccgtcgcggacgagcgttcccgtttcggggtcaacggcaacgtttgtcgtgcccggaacctgcttgacgcacacaacgatattcattcggacatatctccttttatgttatatctttaatgtgatatgtgttatatcattttctacaagattatagcatacatttccgataaatgcaagattgaaaatgcgtccgatgtgcaatatcgttaaaaatatataaatacagtttatatgttttggttattattgaaaatatggctctcaaaggataaaatcgggagtttagtcagatacgatttgcaaaatcataatttagtcagatacgatttggcaaatcgtacttgactaaatttgcgatgttggaaaatattcggcgcaacagacgaagaagaaacagcaaaacgcaaaaagagagaaccgccgacctctctccaatcggcggttctcgaaggaccggttatacgagtaaatcatctgcttttgacagacaatttatcgtctgtatagaaattttttctgagcaaagttatttgtgtctgttaaaaatgtcccataggcaacggcagaatatacgcgccttgttgcctatgcctgataatatcggagcgacaaccgtttcgaagcccgattatatcagaacgcctttttctttttgaggacgataagtcccgcaaggcagagggaggaaagcgtcgcgactgcgacccaaatgccgaggtttgcggggtcggaagtcgagggcgttttttcttttttgggaatttccgtcccctcgcttctctttgtgccgcagacggaacattcttcatgcttttcgcccgtttcgtcttcggttgcttcgcggtctacgatccattcaaaggtgtgtgcgtcttcatcaagacgaacgccgcaaacgcactcgtgccaatgtttttcggcgtcagcgcgaatgccgttttcatcgggagcatgggcaacggcagcgtcggttatttcgcagcctgcattttggcattcatgccaatgaccgttttcgtcggagagccactctcccgaaaaatcgtgattgagcgctgcttttatctcatagccgcagacggtgcagtttatcgcggtggtgcagtcgccgtcgtccgcgccgacgtgcgtttctttggtgtcaaccgcttcgcagcctgcgttttggcatttatgccaatgcccgttttcgtcggagagccactctcccgaaaaatcgtgattgagcgcggcttttatctcatagccgcagacggtgcagtttatcgcggtggtgcagtcgccgtcgtctgtgccgacgtgcgctcctttggtgtcaatcgcatcgcagcctgcgtttttgcacttatgccaatgaccgttttcatcggagagccggtcgcccgaaaaatcgtgctgttttgcggcggtgacaacttcggagcagtatacgcagtaaacgggaatcgtgcaatcgccgaggttcaaacccggagtatgcccgtcgtaaacggtcacgtcggcggtcgttttgtttcccgcctcgtcgtaaacaacgatgctgtttttaccgaacggaagcgtataaacgccgttttcgggtttgatctcctcgttgtttacgaatacgccgtacaggtattcctcagtgaccgtgaacgtttgcccggagcagtatattctgccgtcctcgatgccgtttataacgggcgcggtcttgtctattattatgcggtcggagcggagataccgaatattcattccgccgtcaactatcatgacgtaaatgatatattcgccgtcctcgtcaagaacaataggctcttcataagaggcgtacaccgcgttttccatgtcggcaacggacatatcctgcgatgaaataatatagcctatcatcatgacggtgccgttatcgtaagccgtaaccgtgacggtctgcgtctcggagcagtaccactcgtaggtaagcggagaggtaaaatcaatccaattatagccgcggagcgttattatgccctcgggcgcaaccgtgtcgtgccaaactgcgacaagttttattcgaagccaaccgtctgtttcaaggtcgccgaatttggtatcggcggtcacaaaagtatctttgaagcgccagcctttgaactcgaagccctctcttgtggggtcgggaacgccttcaagaaccttatccgaatagtaaagcgttttttcgggaatctgcgttccgccttgcgtgtcgaaagagacgtaatactttattgcagaccattttgctttgtaagtcgaaacgcccggacctgtcggcacatacgtccaacccgtaagacggtgtcccggcttataaacgtcggcagacgtcgggaaagggatattctcaccgaaaatgtaacttgtcggcaacgtatacccctctttgacaaagccgccgtcaaggtcgaaaatcagttgaatctccctttttttgtcatcggcgttggcaacaagagccaaaagtccgaacgacagcactacggcaagcagaatacaaaatactcgtttcttcatttcaatcctccgtcatctgttcggcgcaggaaagcgcgttttacaatttaatattgggttatgcaccaattatatcatagtttgtaataaaatgcaataggaaaacggaatatttttgagttgccgtcagaatttacgaaaagcacacaaaagatacgcaaaaaaatcccgcggagtgaaaaaactctgcgggatttgttttctgaatgaatatatctgaatttatgaatatgcctttattcttccgtcaaatcactttgcccaaaagagcgtgacaaaaacggtaacggcggagacaaacgcctgaacaacggcgaaacggtaatcgacctgagtgtttgaccagccgcggtttttgcgcatatggtcgtgaacgggcgttctgatattccagaaaagtttgacgtgcagaaaacgcttcatcgaaacctttacaagaccgagaccgccgtcaacgagcattacaacggacgcgggaatgtaaataaacgggctgcccgttttgagtgcggcaagcgcgatgaccatacccatggcgcgcgaacctgcgtcacccatcataagcgacgaggggttggcattgaaccaaagataggcgaacagcgttgcaacaaacatcagcgttgagaagttgaagccgtcggcgccgttgcggataacatcgacggcaacaagcgtcagcagcgttatcgaagtaagcgttgcggaaagcccgtctacaccgtcggtgcagttggtgacgttgatggacgtccaaacgagaatgaccgtgagtatgccgaacacaacggggtgaatgccgaacgtgaaatcagcgataacgagcgttgcggtgtggtcgttgtaaaacaggaacgtaacggcaacggcaaccgcaagaagcaggtcgagaatgccttttttgtattcgttccacggcacggacgacgcatcgtcgaaaaagcccgtaagcatggtggcgatgacgatgaatatgtaaatgccgtactcgatattgacatcgccgaacagcagcgccgcgaccgcaaacacgagaacaaatattattcccgcgccgcggggtttgcccgccgaaagttttccgtcaacggcgaactctctgccgccgtcacgcggaagtttgtttttgaacagttttgtgaacaaaagcgttgcagcgaacgcaaatatcacgccgatataatatacaagcgagtgattgacgccgtttatcagattgagcatatacagcctccgaaattttcatttacagcatattataccatacatttgcggatatggcaagagtatcgtcaaatttttcggagattcggggattctgattttctgttccgcaagatttcgggatttcattccgcaggattttgagatttcattccgaaagattttttttgcggacggtgcggaaagcacttttgttgagcggggtcagactatgccgtcgattattttttcgaatttgggaacggactgaatctcatgcgtgatgaaattgccgttgtgccaaagcgaaaatgtcgtaaacgggcagggggcgttttgtgcggcttcgcgtgtatcaatatgaacggacgtcagttttacgccgcgtttttcggcggcggcgcagagcagcggaacatactttgcggtaaacggacattgcgaagtgtagaaaagagtaaaaccgtcggacattgtcgcgggagcgttcacgcaaggacggaattgcggaatttctgccgattcgtcaaacggaaaataccaaagttcgaaatacggagctgcagcatcggcaagtttgaagcctttataaagaagatatttcgggtcggacaaaaaaccgtgtttctttttcgaagacagaacgcaaagcccctttttccccttttcgcggctgtcccgaatacattcggcaagcagttcggaggaatatccgtgtcccttgaattgtcccgagacccaaagacagtcaatatacatatacccgtcggctgctatcggagcccacgcgttttcagcggggatatattcgataaaacatttgccgcggacattacctttcagaaaaacaagtccctcgtcaagacgttccgcaagccactcttttttcgacgatacctgaacgtccttgttgttcgaaatcgcacagcagatatgctcggcatcaagattttcatgagtgagacgtataaattccattatcttctccttttataaaacatacgttgcaaattatacggaacattatacaaccaacaaaaggattttcaaggagatgttttttacaaggcttttgcgaaagttaggacgaaaatcagcccgtcaaaaccgtcaagagttcgggttgaatcagcgcatcaaatcaatatatattcggcgaattcatttcgccgaactattgtttcctgtgcaaaccaaacgcttaaaccccatacattaaataaagtgaagcgcgcccctgcaaaagcagagccgcactttcaagagaaagaaactactttcatatatattattaaaatgaaactcgaccccaccgaagcagagccgagtttccaagagaaaaaactctcaaaacgcgccgccgttttgagaacagccatgtgcgtgttgcgcagcaacaatttcgcacggcgtatcggatcgaccggtcttcggagaatttagttcgccgaactattgtttcctgtgcaaaccaaacgcttaaaacccatacatataaataaagtgaagcgcgaccctgcaaaagcagagccgcactttcaagagaaagaaatatgaaaaaaacacgagcaagcaatttaagttttccgaccgcgtgattgcgagcgcggagggaaagggcttatgcgtcagccgttctgcgacgggacgtattcgccgaaggtcagggagacggtcttttgttcgccgttcctgattatggtcacgtcaatggtgtcgcctatcttgtgagcgtcaacaacggagttatagtccgacatggaactgataaccgtgccgtccatgctgacaagcaggtcgccgcttctgaattgagaagttgcgtccgtgactttgtatacatatataccggttctcgaaacacggtaacttatcgcggttgcgcggtcggtgaggtcgatgggttcaaaacccgtcgagatcctgcccgtaacgtagccgtattgaataatatcgtttataacagtttttgcggtgttgacgggaattgcaaaaccgaggttatctatattcgaacctgtcgattttgcgttgactatgccgataaggttgccgtttgcgtcaaatgcgccgccgcctgagttaccggggttgacagccgcatctatctgcaaaagcgtcatggtctgattttcaatggttacctgacggtcaagcgcgctgacaatgcctttggtgacgctgccgccgagcgagccgagcgggttgccgataactatgacgtcctgtccgacaactatctgcgaagagtcgccgaataccgcgggggtaagacccgaagcatttattttgacaactgcgatgtcggtcttttcgtccgtgccgacaaccgtggcgtcataggtcgttttgtttgcgagcgtgacttttatatttgttgcgccgtcaacgacgtgattgttcgtgactatatatccgtccgcgctgacaacaacgccgctgcctgcgccctgggtaacatactgaccgaagaaagtggaggtggttacggtctccgtggttatctcgacaacggagttttcaaccgccgcaacgacttttgcggtgtccgtgctgcccgcgacggaggaggtgtcaactttgggttcggtgctttcgtaaatgacggtgttgccgcccgaagatgtctgcgaaccgcccgctgtgccgtttctgccgaagagcatatacgagccgccgatgccgagtcccgttgaaaggattattgccgcgacaagcagcgcgcaaacggcgccgatgccgaacttctttttctctttcggctttttgggaggtctcggaggctgctgcggagaggaatatgaatatgttccgttcggagcaactctgccgtagccgtattcgccgccgtaattataattggtctgcggctgaccgttgcgatacgagtattcgtagcgcgggggttgtgcggtggtctgtgcgggagcgccgtaaggcgggttcggtctgtgatacggaggctgtcccgcaggagcatggggttcgggtcttgtgccgacctcgtagcgttcgcccgtttgcgggtcgtaagcatatctcggctgcggtctgtcgggcgtttcggcggagggcgttgtctgcgccgcgcccgtctgtgccgtctgcacatcgtcgggtctcttttcgttctccgacggcgtttcatttatattgagttcgtttttttcgaaatcgtccatttcaaaaaaccgtcctttcttgtttttacaagaggattataccccccgaaagtgacggttgtgtgaacgctcggtaaaagtcagcggaaaattagggaaaaatgcggttcacatcggaaacaggcagggactgccgtttatatgaaaaaatgttcggacagagaaaagcgaacccaaaggctattttattctgaaaataacgaccttacctgcatgaacggttatagtcgcttccgtgtcgggaagcgtggaattgcttgcccaaagagggtcgtcggcaaagaactcggtcttttcgacgctgtatttcagtccgcgttcggtgacaagcgcggtttcggtcagcggaaaaacggtgacgttcacgcttttttcttctgcggggagcgtcagagtgccgttttcgagataatctatccgcgcgcggtcggttatgatatacccttttgcgccgcgggagtaaatataccgcaatgttgcgatattggcaaaagtgtggtcttccctcgcgccgccgataccgccgactataactatctcgtccgcgccgcggtcaagtgcgtaacggacggcgtaatgcgtgtccgtgtcgtccttttcaacgggcagaacgaccttttcgccgttgtaaagtctgccgttggggtatgagtcaaagtcccctatcacgacggacgggcgcacgccgaaacgctcggcggtcttcaagccgacatcggcgcatataacaaaatcgtcttctctgatttcaacgggcagagcggcaagttccgcccatacaaatatgaccgctctcatttgttttcccacgctttcagttcgcctatctcgtcgtaaaggcggacaaaggattcgtaacgggtcttcggtactcttcccttttcgacggcgcggcgcagagcgcaatcgggctcggcgatatggcggcaatcggaaaagcggcagccctccgaaagaggctcggcaaattcggggaacaggtcgggcagaaagcttctgtcaaccagcccgaactcacgcggttctatctcggaaaagcccggagtatcgacaacgcgtccgccgcaggtctcgaaaagttccgtgtgacgggtcgtgtttttgccgcgtccgagttttttggatatttcacccgtttcggcgcgggcttcggggcagataaggttcataagcgtcgattttccgacgcctgaaacgcccgaaagcgccacggtgcagccgtttatctcgtttttcagttcttcgaccgtcttttcgttcggaaatgccgccgaaagagaataactctttatcggcagcgacgaatacagagaaacgacgtccgaatgcttgtacagatcggttttgttgaaaacgagaacgggcgttacgccgagaaagcgcgcgatgacggtcattcggtcaagcgtgtaaagattgggtgcggggtcggcaacggcgcagacgatgaaaagtttgtctatgttcgcgacgggcgggcgcggaaaagcgtttctgcgcggcaaaatcgcggtcagagcgtcgttttcaacctcgacctcatcgccgacaagcggcgatattccgttttttctgaaaattcctcgggcgcggacggacagcagttcgccgtccgatgttctgacggtatacagcccgccgacgccctttatcaatgttgctttcacttgtttttgtttaccgttttactgatttccgccgtgctcggggttcgggtcttccgtcggctcgggttcggtcgtggtcggagtttcgggttccgttgtgggctccgttgtcggcggttcggtctgtccctgtccgttggaaacgaatatcgttatggttgtgcccttggcgaccttttcgccgggttcgggagaagtcttggtgacaagtccctcggcaaggttgcttgaaccgtactgaacgacatattttatgccgagcgcgtcaagtatctttttggcggtgtcgagattttcgccgatgatgtttgtgggaatggctacatcttcggaagccgagctgccttttttgttcagataaagaattatcttgccgttgcggtcgaacttctcgcctgcggagggagacgttgcgacaacgtaatcatcttcgatatccgcggattcggacgtatactgtatctcatacgctatgccgagcgcgttcagaatgcttcttgccgtatcgatatggacgtttgtcaagccctcgggcacggtggtataaggcgagttgccgtttgagacgtaaagcactatctccgagcctttggcaacggatttgcctgcgggcgggtcttggtctattatcttgccctcgtcctcatcggagttttgccatataaagcggaacgcgaacttctgcgaatcttccatggtcaggtcgcttgtcagtttgcctttgtattcgggcacgcgttcatagtcgcctttcaagccgttgcctatgccgagcatgaccaaaaccataacaagcagcagcagcgccgcgccgcctatgccgataacggcgaacagccagcggttttgtgtgcgttttctgacgtagcggctctttctcttcggttgcgggtcttccgcaacataattcgggtctgctttgggcggcgttgtttcgagaataacgtcgggattttctctgaatttttctatatcttcaagcatttcgcccgcgttctggtatcttgcctcaacgtttttgcgcatggctttcatcacgatgtgttcaacggcgggcgggatgtcgggaactatctgcgacggcggaacgggcttttgctgaacctgcatgagtgcgacggaaacggcgctgtctgcgtcaaacgggagtttgcccgtcagcatttcataaagaatgacgcccgtcgaatagatgtcgctgcgttcgtcggcgggtctgccctttgcctgttcggggctgatgtaatgaaccgtgcctatcgccttgtcggaaatggttatcgtgctgtaattctgaacgtgcgcgataccgaaatccatgactttgacggtctcattgccgtccaccagaatgatgttctgcggttttatgtcacggtgaacaacgccgcgttcgtgggcgtgtttgagcgcggaaagtatctgttcgacgatatgaagcgcgtcgtaaacgtcaagcgcgccgtgttcgaccatatattctttgagcgtgggaccttcgaggtattccataacgatatactgaacgtcgccctcgaaattgacgtcgagaacgtccacgatattctcgtgcgaaagcattgctatggcgcgggattcgttgagaaaacggcggcgggacttcggctcgcgcacaaattcctctttaagaactttgagcgcaacaagtctgccctcctgcgtatcctcggctttgtaaacgatgctcatgccgcccgtaccgataacttctttgactgcgtaacgaccgtcaaggacggttccgaccaatctgtcttccatatataaatatctccttattcaatctcatcgccgcagacgattaccgcggtcacattgtccgttccgccgtttttgagagcgcgcgacacaagttcgtcgcagaccctctcggcgggaaccgtttcaaaaacactttctatctcggagtcttcgagcatattcgtcagcccgtccgagcaaagaagtataatatccgtcggagaaaattctgttttttcaatatccgcttcgacctcgcttgtgaagccgagaacgcgggttataacgtgacggtaagggtggttctttgcttcctcttccgttatctcgccgtcatcgagcatttgctgaactatcgaatgatcccgtgtcaggcgtgaaagcgaatcaccgtcataaagataagcgcggctgtcgccgacatgggctatgtacgctttgccgtccaaaacataggtcataacaacggtcgtgcccattccgcgaagtcccgcgtctttcaaagagaccgcaaaaaccgtttcgtttgtgtgtttgataactttgcggagcaatgtttcgaccgagcggctgcgcgcaaaatcgtcgtaactcgtcgaaagcgacgcgtcaaacgttctcacggcaagttcggaagcaacgttgccgccgttgtgaccgcccataccgtcgcatacaacggcataaagacagccctcgtcaagttgtctgaaaaccatgttgtcctgattcgattcgcgaacctttccgacatcggtctttccgtaaactttcaagcctttgacacctcctcggtgtttggtttatttgaaaatgtttattttactgattatttattgtttgcttttttcctcggcaaggcggagttgaccgcaagccgcgtttatgccgtcgccgagcgtgcggcggagcgtggcgtttatgccgcgttcaagcagcatatcacaaaattcgttgaccgtctttctgtccgacggaacaagtccgcgttcggaaacataattgacggggataaggttgacgtgggcaagtctgcccttcataagcgacgcaagtctgcgcgcgtgggcgggagtatcgttcacgccctttataagagtatattcataagaaatcctgcgattcgtagccgcaacataggcgtcgcaggctttcatcagggtctcaacattatatgcggagtttatcggcattatctgcgaacgggtctcgtcgtccggcgcgtgcagagagacggaaagcgttatctgcaagcgtttttcggcaagttcgtaaattttgggaacgatgccgcaggtggacacggaaacatggcggtggctgatgttcagaccgcgcgggtcgtgcagattttcaagaaaaacgcagaggttgtcaaaattatccagcggttcgccgacgcccatgacaacgacgttggtcacgcccgcgtctgcgtttgcgaaagagacctgcgcaagcatttcgccagccgtcagatcgcgctctttacccaaaagcgtacttgcgcaaaagcggcagcccatgcggcagcccgcctgcgaagagatgcagacgctgttgccgtgcttgtatttcataacgacggtctcgataagaagcccgtccgaaagcgcgaaaagatactttgcagtgccgtcctcggggtcaacgaggcggcggcgcatttcaagcgtggcgagggtgcagttctcatgcagtttttcgcgcagcgacttcgaaatatccgtcatgccgtcaaacgtcataacgccgcggctcagccacgcatatatctgctttgcgcggaatgcgggttcgccgagggacttgatatacgtttcgaggtcggtaaaagtcaatgatgaaatgtctgtcatatccgtaataaaaaaattcggtaatgtggtatcgttactccgcgccgagcgcatacaccgcgtcggacagagtctgtatatttgccgttaaagcgttcaatccctgttgttgcttctcgctatcaggataagccgcagcagttgtgccaaagacacggcaagcgcggcaacgtaagtcatcgcggcggcggaaagcactttgcgcgtacccgatgtttcgtccgacgaaagtattccgcaggaaacaagggatttcatggcgcgggacgatgcgttgaattcgacggggagcgtgacgagttggaaaagaacaaccgcggcaaacgcgataacgcccgccatgacaagcggtttgaaacttaaaaagataccgagtataataagcggaatcgagagcgaagagccgatattcgcaacgggaagcacggcgtttcttattttgatgggagcatatcccgaataatgctggcagacgtgtccgacctcatgggcggcaatgccgactgcggcgacggacgttgaattgaaaacgtcggcggacagggacaccacgttcgtgcgcgggttataatggtccgtcagttcgcccccgcacacctcaatgcggacatcggttatcccgttttcaagcagaatgcggcgggcggcttccgcgcccgttatgccgctgcggttgcggactgttttgtatttggagtatgttcctttgacgttcgcgctcataatgagtgagaatataatcatcggaacaaccagaataacataccaataatcataaaagaaaagaggcattttaatatctccttattaaacggcagagccgttatcagaaattgatacccgagaaagcgtctttcgcgcgcggctcggacttcccctgccgcctgccgccgttacgaaagcttttctggctttctgccgcagcagaagtcctcggcggacatacgttttttgccttcgagttggatatccgtgaggcgcacaagcccgtcgccgaccctgacgacaaagcgtttgccgtcaacgaccgttcccggctcggcgtcggacgaaccctgttcaaggcgcgcgccgtaaactttgagattttttccgtcaagctcgcagaaagcgcacggtacggggcttaatccgcggacgcggttgacaaaatcgcgagcggacatattcatatcaaggcggcgcgtttcattgtctatcatcggggaatagcaggtctcgccctcctgcggaatgcgcggagcggttccctgctctatcgcgtcaacggttttgacaagaagttccgcgcccaacgcggcgcagcggtcgtgcagagtgccgaaatcgtcgtcttcggttatctccgtttccgctttgaatatcatgtcgcccgtgtcaagtcccgtgtccatatacatcgtggtaacgcccgtcttttcacagccgtccataagaactttgtttatcggggcggcgccgcggtacatcggaagcagcgaaccgtgaacattgatactgccgagtcccggataatcgagaacgtatgcgggaagaatttttccgtaagcgacaacgacgttcagttcggggtctatctccgaaagcaagtccgctatcgcgccgtttttgagcgtggtcggcttataaacgggaatgccgagttcagccgctcttgcgctgacgggcgtcggggtcatcgtataccctctgcctttcggcttatcgggctgtgagataacggcaacgggggttctgcccgcttttacaagcgcgtcaaggcttgcaacggcaaaatccgaagttcccataaaaagtatgcgcatattttcggtttcctttcgtcaatcctcgtcggggtcgagataatgctcaacgtgcgttctgaaaagtatcccgtcgaggtggtcaagttcgtggcagaagcagacggcggttatgccctcgcgggtgtactgtacgtcttcgcccttaacgtttttggcgcggacggtcactctttcggggcggcgcgtaacgccgaacaccccgggaatggaaagacagccctcgtgggcttcctgttcgccgacggcttcaacgatttcgggatttatgagttcgaacatcttgccgttatcgtcaaccacaacgacaacgcggcgcagaatgccgacctgcggagcggcaagtcccaacccctcggcaagttttaacgtgtctttcatgtcgtgaacaagttcttcaagatgtctgtcgaatttttcgacgggacggcagacctttgcaagacgctcgtcgccctcttttactatgtttcgaatagccatatttataacctctgaaaaattatccgaattgttccctcccgttcagcccgcgcaaaatcacggacaggcaaaatcgttgcgtggcaacggacggagaagatattgtattttcatattaactgtgcgaagcgcagacccttttgcgcggggagtgcgccgccgtatcgttcgttttatacgttttatattatgctcgtcgggttcatgtcaagccccacggtgacgtcgcgcatatccttgtccgtcagcataccgagataaacctctcggagcagacggcgggtcggtgcgtcgtcgcggcatttgataagaactctgaccctgtccctgccgccgaccatgggcacggcggtctgtcgggcgcggattatcgtgagcgggagttttgcgaactcttcgcatttcagtttttcctcgatgcgggaagtgaacgcttcggcggcttcaaaggcgcgcgggagcgtatcggcggtgaaaacgcattgacacacgtcgcagaacggcgggtatacaagcagttttcgcagcgaagtttcttcctcaaaaaagccctcgtaatcctgctttattgcgtgttcgagcaccaagtgggtcggggagaaagtctgaataacggctctgccctgtttttcggcgcgtcccgctcttccgacgacctgcgtcagaagcgaaaacgttttttcgtatgcgcggaagtcggacgaatagagcagcgaatcggcggaaagaacgccgacaagcgtgacgttggggaaatccagccctttggttatcatctgcgtgccgagcaatacgtcgtattcgcggcgggcgaacgcggaaaggatctcatcgcggctgttcttgccgcctacggtgtcagcgtccatgcgcagcacacggagttcgggaaacagcgcttttatctcgcgttcggcgcgctgtgtgccgtaacccgaatatttgagcgtttttgagccgcagacgggacaaaccgaggcggcgggtttgctttcgccgcagtaatggcagacaaggcggtcgttcgcggcgtgataagtcatcggaataccgcagcttttgcaggcaaaaacatacttgcatttggggcattgaacaaaggagttataccctctgcggttcataaaaagaatggtttgttcgtgtttttcggcgtttttcgctatttccgaggcaagcacggagccgataatatcgcggttgccctcggtaagttcgcgggacatatcgctgacaagcactttgggaagcggtccgccgttatacctttcgcgcaggacggaaagccctatcctgcccttttgcgccttgtaaaaactttcaaaggacggggtggcggaagcgacgagcaggagcgccttttcttcgtgaacacggtagcccgcaacggcttttgcgtcgtaacggggcgatttttcggatttgtaagtatgctcctgttcctcgtccacgataacaagaccgagatctttgagcggggcgaaaacggcgcttcgggtgccgacgacgaatcgggcatcgccagtgcgtatgcgtttgtactcgtcatagcgttcgccgacggaaagcccgctgtgcagaaccgcaagcaggtcgccgtagcggctgacaaggcggtctattatctgcaaagtaagcgatatttcgggtaataagagcaaaaccgacttgccctgtgaaagcactttgtccgcaagggcggtgaaaacgtgcgttttgccgctgcccgtgacgccgtaaagcagatgtgcgccgccgctgccgagatttgccgaaatttcttcaaacgccttttgctgttcggcgttgagcacgcagggtgcggtgtccgagccgcgtttcttgtttttgagcgggtcgcgcggggtttctttttcaaagacctccgtcacgccgtatttttcaagcgttttaagcaccgaaacggaaacgcctgtcatatagataacgtccttgacgctcgaatccccgttttcgaaaagataatcgagaacggcaagccttttttgaatgttcggtgcttttttggggcgttcgcggcgggcgtaatcggctgcgcggggcagcacgcgcacaaagcgcgaaacgctgtccgagacggtctgtttcttttcgagagtttccgtcagttcgcctttctttatcaggcgcaggacttttgcgtaattttctttgccgaggcgctcggcaaggtttttgcgtgaaacggtattttgatttttctcaaaaaagtcgcgtatttcggggtcggaaacgggcgcgtccatacgcacgaacctgtcaaacccgccgaccgtgccgggagccataacggtctttgcggcttcgaaaaacggacaaaaataccgttctttcataaaagcgcaaagccgaagtcccttttcgtcaaggacgggcgacgcggaaaatacgtcttccacctctttgagtttcacgccctcggaatgtttgcgtatctcggtgacaacggcgcgaacggcgcggctgcctctgccgaacgggcagcgcacgagactgccgacgcagacaacttcttcaagcgccgcgggcagcagatattcgtactgtttgtccgcctgataaggcacatcctcgatataaacgagaacgcttttttccgaggtcataagcggttaccgttcagacttcttcgaagtacgctttgccgtccgcgaaatccttgacggcaagagatacggaacggtcttcaagacgttcgtcagctgcgtccgctctgtcggctatctcacgcgcgtgtttcgcaacggcgataacgagcgaataacggcactgtcttctgttggcaacaccgtgtttgttgattttcaaaagttgattcatgctgggatataacataacaataacacctatcctatatatttcaaaatcagtttttcaagttcgttgacggcttcctcaagtccgtcgtttacaatgcggtggtcgtaatcgccgctcattttcatctcgtaacgcgcgcggtcgagacgtttttctatcgccgcggaagtctcggactgtctgccgcgtatgcgtttttcgagcacttcctcgctcggcggcgcgataaacacggtcacggcctcgggcatacgcttgcggacgttgagcattccctcgcgttcgattttgagtatgaccgctttgccctcgtccacccatttttttatcgggtcgagcggcgtgccgtaaagcacggagcaatattcggtatattcaagcatcttgccctcggctatggcgcggcggaattcatcctcgccgatgaagttataatccacgccgtcgacctcgcctgaacgcggggggcgggtcgtgttggaaacagacatcaccgcacggtcgccgaggcggggcatgagttctttcagcacggtgtccttgcctacgcccgacgggcccgaaacaacaaagacggcgccttttttgtgactattcatcctcttcatcctcttccatatccgtgtcgggttccgctctcgcggcaacggtctcgggctgaacggcgctcagaataacgtgttcgctgtccgttatgataacggcgcgcgtgcgtctgccgtatgtggcgtcgataagggtcgatttttcttttgcgtcctgtattatgcgctttatcggagaagagtcggggctgacaatggcaactatcctgcccgcggcgacaacgtttccgaagccgatattgacaagtttcatatctctttttctccccttttattcaacgttctgtatctgttcgcgtatcttttcgatacacgtttttatctcaataacgcgggcggtgacttcaaggtcgcctatctttgacgatatagtgttcgcctcgcggttcatctcctgtatgaagaagtccatcttcttgccgttcgaaacgccgtccgcaaacatatccgcaagcgttttgcaatggctgttcaggcgcacaagttcttcgtcaatcgctatcctgtccgccattatcgcaacctcggtcaaaagacgctgttcgtcaaccttgacgtcgccgagcagttcctctatccttgcgcggagttttttctcatattcgcctatcaactgcgcggaacggctttcgatgaaatcgacgttggatttaatctcggcgcattttgcctgaatgtctttcgaaagacggccgccctcggcttcgcgctgggcgataaatgcgtcggtcgccgcttcaagcgcgggcagaacggaagcccaaacggcttttacgtcctcgtcctctttctctgcggcaataacgtcgggaaaacggagagcgaccgccgcgcccgcatcgaacgggagcgaatacgtttccgaaacgtctttcagcgccgcgtaatatgcttcgaaaagcggcttgttcactttgacggacgaaacggaagcgccgttgtcggcgatggacacgtttacctcgattttgccgcggacaatgcgcgtctgcaaatacgaacgtatcatgtcctctatctgcatatatgcgcggggaatacgcgcaaacatttcaaaatatcggtggttgacgctttttatctcaacggtaacgtcgcgtccgtcggtcacgagccttgctttgccgtaaccggtcatactttttatcatattttctttcctttcggggacgttttcgggcagagatctctctgcctgtttttgctttgcatacgcccgtgcgcaggcataatattttatattatattatatcatataaagacgcgttgtcaaggagaaagacaaaagatgttataaaaattttccatagtatgcctgaaacgggcttttacgaacaaggcaaccgaaaaacagaaaaaaatcgaggacgctcgcgacgcgtaatttcaaactttttccgaacaatattgaataatcgcctataatatgttaatatattcattgagcgcgtgcgcgcgaaatgttaaactgattcctttctgttatccggtgagatcgttcgcttttgccgtgccttacgcagcacgcgaagcgtcagaagactgtcttccgtccatcggtaatcttttctgtttttgattgagcgcgtgcgcgcgaaacattttggaatcgttaaaaatgccgtgttttccgtttacgacaagacaggaaaacaactgcgtttttatctcccgaaagaggtacaggctccgttcaaaagggcggagaactcttttttcattttgcgaaggttggggcggtcaatcgtatttgttcggatcgaatatattcagactacggtttaatatattcggttccgacaaatcccgccgacgggcagggttcaaaaagtcccctgctcccgccttacggcgcgcgaagcaacgacttttctccggttgaaagacgggttaaatatgaacaaaactcttgacaaagcaagacacacatttttgccgcttttggcggcgcttatatggggaacggcgttcgtcgcgcaggaaacggcggcgaagcacgcgcaggcgttcacgataaacacggtgcgctcgctgctgtcgttcctttttttgcttgccgtgataggcatttacagacttgcgacaaggaaaaaaaggaagaacgaacagccgaagacagccgacgaaaagaagcgggaaagaaaactgctcctgctgggcgggctgctctgcggaacggcgctttttgtggcgcagtcgttccagcagctcggtttttcgcagggcgcggattcgggcaaaggcgcgttcataacggcgctttacatggttcttgtgccgctgttcgggctgtttttcaagcaaaaaatgcccgcaaaagtgtggataagtctcggcattgcaatggcgggtttttatctgctttgcattaaaaaagatttcacgctcgaactctgcgacctgctcatattcataagcgcggtatgctttgcgggacatattctgataatcgaccgcttcacgcacgatgtgaacggcgtcaaactttcgtgtgcgcaatttgcggtctgcacggtgctttccggcgcgaccatgtttatattcgaaaccccgtcgttcgacgaaataacggcggcttggcttccgcttgtatacctcggcgtgttctcgtccggcataggctacacgctccaaatagtttcgcagaaaggcgcgaatcccgcggtcgtttcgctgctgctgagccttgaatcggtgttcggcgtaataacaagcgcaataatactcaaaaaaagcctgactgtgcgggaatatatcggctgtgcgctaatttttgcggcggtggtgctgacgcagctgcccgaatttcggaggagaaaaaagaatggataattcgctcgacaaagagtattacgcaaaatacggcgcgcttgtgtgcggcgttgacgaagtgggcagaggaccgctgtgcggacctgttgtggcggcggcggtgatattgcccgaggactttgtgcccgagggaataaacgactcgaaaaaactttccgaaaagaagcgggaaaaactgtatccagtcattctcgaaaaagcggtcgccgtgggcataggcgaagcgtcccccgcggagatagacgaaataaacatactcaacgcctcgtttctggcgatgcgcagagccatagaaaatctttccgtcaagcccgattttgcgcttatcgacggcaacagggcaagaaacatacccgtgccgtgcgacaccatcgtgggcggcgacgcaaaaagcgcttcgatagcgtccgcttcggtcgtggcaaaggtctaccgtgacagactgatgaaaaaacttgcggaggaatacccgcaatacgcgctcgaaaagaacaagggctacccgacaaaagagcattacgaactgctgaaaaaacacggaatcgcgccgatttacagactgtcgtttttgaaaaatctggacgagaaataaatttgaaatctaaacataacgaaaaaatcaggattgggaatcggtgttccgaccgtaataagaaaagattaaaaaacagtttgctcggcttttcgcttgcgaaaaacgacgcaaactccgcgtagcggaaagaaaaagacgatgtctgtttaggctaatcaaatgtttgcatagcaaacactttacgcactttgctgatataacagaaaaaacaataccaattacttttgaaacgatatatttatgaattcacctttattttccccgcgaaacctcccgagacaatgtcgagggtgagttgagcggcggcgagcaagcggagcgaagacggagcggcgagacgactttgaacaaggtccggacgcagataaaaccttacaccataagggttgaaaaaaagttttcgttttgctttgatatcagataaggtttccgacttaatcaaaaaatttccgtataactataagaaataacttacataactcacacatgccacacaccacaccgacagtaaaagaggagaaaaatcaatgtccgcattctttacaaaatacccatggctttggatagttcttatttcaatggttcccgttgtcgaactgcgcggcgcaattccgacgggctttttcggctacgacctgccgatagttcaggtctgcataatttcggcgattgcaaacctcattcccgttccgataatctacttttttgcgagaaaagtgcttgtctggggcaaggataaaaaagttataggcaaattcttcacattctgccttgaaaagggcgaaaagggcggcaaaaaactttcgggcaagaccggtatcggtctttttatcgggttggctctctttgtcggcattcccctgcccggcacgggcgcgtggacgggcacgctcgttgcgtccctgcttgacatcaaattcaagcgcgcatttcccgcgatatgctgcggcgttatatgtgccgccgttgttgtgggcttcatctgcgcgggcggctcgtcggcgttcagctggctcataccgaacataacaaaggcgtaaccatcgcaaaaaagccgctgcattttttgcgatcagccatgtgcggttcgttcgaatgaacgaactatcgcacggcgtaagggcgaagaaaagtccgttctcataaggtttcacgggctaatctttccctccgcattgcgttcacttcttgcaatacacaaagtattgcttcaaagtgaccgcttcacggagaaaaactttatctccgtgaaactcttcgacctgacagccttgattttgttctgttttgaagtcgaggagtgcgagaatactttcgtattttaagcgacgagacaataaaacagggcaaaagcaacactgtcaggcttgtgaaaacgggcttttcttcgcccaaaatcagaaaaaaaggtttgctcggcttttcgcctgcgaaaaacgacgcaaactccgcgcagcggaaagaaaaaggctatgcacgtttcgggaagtaccctgtgtgcttcagctaacagattctgtactttgcgtatttaacaaagagcttcgtcttttcagcaattcccctgtttgctccgcaaacacttttcgcacttgccgatataaccgaaaaaaaacatcaattacttttggtttgtttttctgaacaatggtatcttttttgttttccgcgaaacctcggacggcgcgaagcgtcgttgcgagagttgagcggcggcgaagccgcggagcggagacgaagcggcgagacgaaatatcgggaacgtaatattattttcgcggataaaataacagagctaaacaatatgaaaaacagcaagattaaaaccctgttgacgctctttctcacctttttcaaggtctgcatcgcaaaaaagccgctgcattttttgcgattagccatgtgcggtttgcgcaaatgcgcgaactatcgcacggcgtattaaaatttctctttgagttataacgagaaaaatcaaagctttcagaacaaagagttttttcacgcattcggaagtcaaaataacagatgtctaacaacatgaaaaacagcaagattaaaaaccttttgacgctctttctcacctttttcaaggtctgcatcgcaaaaaagccgctgcattttttgcgattagccatgtgcggtttgcgcaaatgcgcgaactatcgcacggcgtattaaaatttctctttgagttataacgagaaaaatcaaagctttcagaacaaagagttttttcacgcattcggaagtcaaaataacagatgtctaacaacatgaaaaacagcaagattaaaaaccttttgacgctctttctcacctttttcaaggtcggggcattcactttcggcggcggttacggcatgattgcccttttggaagccgaattggtcggcaagaaaagttggattgacgaggatgaattcctcgatatcgttgctattgccgaatccacacccggtcctatcgccgtcaatgcggcgacttatatcggcagtaaaatcgcagggcttgcgggttcggcggttgcgacgttggcgatatgtatgccgtcgttttttataatctatgtcatttcgctgtttttggacagatttctcgggcttgaatacgtccgctacgcattcgagggcatacgggtcggagtggtctttctgatattctcggcggggctgaaaatgctgaaagaaatgaagaaaaacgcattcaacattgcggtggcggtcacggtcgctgttgctatgattatggtttcgctgttctccgtttcgttctcctcgattttctacattctgatatgcggcgcgctcggagtggcggtctaccttatcggcagatgtcgggaaagaaggggcaaaaaatgatatatcttcaactctttctcaacttcctgatgattggcacggtctctttcgggggcggttacggcatgctttccctgatacgcgagacggtactctcaaacggctggcttgccgaaagtgaatttcttaatatgatagcggtttcggaatcgacgccgggacctcttgcgataaacatggcgacgttcgtcggctcgacgcagggcggctttttcggcgcgcttgcggcgacattcggggtcgtgcttccgtcttttatcatcatttcgctcattgcgcttgcgatgaagcggctgatgaaatacggcggcgtgcaggcgtttctgaacggcattcgtccgtgcataatcgcgatgatacttgcaacggcgcttatcatggcgcttgaaacgcttttcggcttttccgccgtcggctcggactttgcgccgaacatcaagagaattgtgatgtttgcggttatcggcgccgtcgccgcgggatacaaactgctgcgaaagaagcggctttcccccataattctgcttctgttttcggcggcgctgggcgtactgttttacgcgctgtgacgcttgcggcaatacattaaaacaaaatcaaaaagcttcaccccgtactcttgtccgatatgacaaaagcacggggtgaattgcccgtctacgcgatattttctgaaatataaggcataaaatccgaaaaagcaaattgatttgacggggaaaaatcggcgcggaccgaatacggtcgaacgcgtattgccgacacgggcggattgcgcgctttcagcaaagcgttatcagccgagtttttcggaaatgactatatcggtcggagtgccggggacgaaagagccgtcaagggtgctgacaaagggcgtgacggttattttttgtgagaatgccgaagacggcacggacgaaagaacaaacgtggcgaaatatttcgacgcaaagcagatatcggcgggtcggtattcaaaagaggaggcgccgtcggttgcaaacagagaggaatagacggtttttgtttcgacatcgacggtcttgccgccgtattcaagacggatgccgacggaggaatacatatcgccgtcaacggtggttatcaggcgcagagaggttgaagaggaggtcgggactgtgccgacacggagttggcttttgacgaaaaaaactgcggcgggaatgaattttgcataggcgctgccgtcggttttaagatagggttcggtgcagttttcgtcgtcaaaccagcccgcaaaaacgctgccgttaagcgtcgggagagtatcggtcgatttataatcggcaacgggcagcagttttgagacgaacggttcggagacggtcgagggttcgtaataccatatttccgcaatgcccgtatctgtctgcgaaacggtttccctgcgcgcgaaagcaagccccgaaagtgtttgcggcggcgttggaaggctgccgttttcgggcagcggaataagcatttcgccgacattcggaatattttttccgtcggtcgtcttacaggtcaccgtaagcgtttttcgttcaaaatcgccgcttttgtcggtggcaagcacctcgcccgtttccgcgtccgtgacaaagccctcgatgcggtctttccaataaaggggcggcaggtcggcggcggaaatgacaagagacagcgactttcttgcgggcgcatagtcgtaccacgaggaaagcgcggggatttcaaacgtttgtgagcgttcgagttttatctcgttttcctcggatattatgcgaaaagtcagtttcagcgttcggggttcggacgaaaggttttgaacgacggtgcggaattcgaggtcgtgtccctttgcgcggagcaggtttttgcttgttatgcggtatttttcatatgctgagcctatcgcgtccgttgcggaatgttctattgtcacgtcgggcgcggcaacgtatatcttttcgggtttttcggtatacgcggaatcgttcagacggcgaaccagttcggctttgcaaacctcgcagaaccgataatttccgatatcctccataatgcaagagcgggacgggatataggtcgacgaggcgttgccctgcgttatgccgacgccacggaagccgagaaaatcgcgccacggaacgtcgctttgagaggcggtgtttgagatgtttacggagttttccctgaaacttccgtactcgtccgcaagacggcctatcgcgtgacctatctcgtgcgtcatggattctccgttttcaccgtcctccgcaagcgacgaatacgaaaaataaccgcgcggagccgcggagccgaaatattcttcggaattggaaaggatatgaacggagcaggcgctgccgcctttatcgagatatttttcctctatgacgtcgcgcagagcgcggagcttgttcataccgtcttccgaaatatacgtggtctttccgtaatgcgaaacggaaaaatacgtgtttttcaccgttccgaaagaaacgcttactccgctttcctcggacggcggcgcgacggcatagatgttgatttttgtcgcgtaggacgcgaacggctcataagaaagcattccgcgaacgcgacgtgtcacgtccgatatgaatttatctctttccgctgcggtatagccgtcgccgaaaaagagcattacgcggttttcggcgtcgctgccgcatttttgaatgatatgaacgggaaacgggacggcgttttcgttgcccgacgtttcggcggccgccgttttcggcaaaacaaaagcaaaaagcccgatcatcattgaaaacaagataaaaaacgccgacgcgcggcatttgtttcgtaccgtttttttcatattctttctccatattgaatttataattatgcttataagataacaccgaacgcgcggtttgtcaacggtttttgcgtgacagccgcgaagttttgcgtgtttgttcgcggctcgaccgaaaaagaggacgtcgggacggggcaaaaagaaaaaagagacctcgcgatctctttttttcggtattatgcgctcgtatcgggcaaaaatatcccgaaacggggctgttcattcgccgcaagaagtggtttttcggtcgcgttttctctttttcaggagggtcacggcgaatactgtcgcgccgacaagcagggggattcccacaaaaagaacaagcgcggcgacggctgcgattttgccagggaaagaactgaaaaagcccgtttttacatatttcggagattcggaggcggaaagcgaaaattccagctccgtatcgggcagccccggcagggaaagctcataccccgtgtcggtcttgaaaaagccgtcaatgccgcttttcgtgataaaatacggggtttttacaacgattttcaactcgccgaaatccgcccatttttttgcgggcgaaagtaggtatttataactgtaaacgctcggagaataactcgcgtcgatgtccggataaagaggcgcggtcaccgtgttcgtcagggtctgtcccggctcgagagagagttcatactcgtaccaccgcatcagggaaaagtcccatttatcccaaaaaatcacaccttttcccgagccttccgaaagataattcagaaaagcgaccgtggcgttgtatttatcaacatcaaggatctccgcatcggctgaatactgaccgagagcgtaatcggaaaacgccgtgacgtcggaatgtttcagggtcactgttccgtcgataacatcttcgcaggcgccgttttcataaagcgtccatttcagttctttttcgggaaggtccccgaaaaaacgaaccgtgagaatgtcgccgtttttaacccagcaggaaacctgatagccggatttcaaaacattcgcgccgctctgcgattcgcaaagaacgcgcgtttcggacttatctgagccgtacacaaaagccgccgttgcggcgctgtgccgctcgtcaagcccctcgacggaatatacaagagtgcggacgggcagatcggggcggaaaaacgggtcggagacaaagccgtccgaaagtctcggcatatcctcttcaagagaaaaggcggtatacctgtttttgaaagtgtaacgaaccgtcgcctccgcgggtctgccgtcaaccgcgatgccgtatttttccgtattgggaaaagatacggatatcttatcggcggcagagtccgaaaatcctccgtaaaacggcggatttccgaaaggaaagacaagctttgcggtcaccttgtaatcggtcggattgcgaaaaacgtattcggcggaaacctttcccgcgtaagcaagaaagcccttttcgctttcgtaatacgtatccggaaactctccgatatcgaaagtcagcgtttcacgctcgacggtaagagggcagtcgtctgccgcggcgataacgcccgaggtgtccgtcccctgccaaaagcgcggcgcggaatttgcgagcgcggggctgataaaagtcgcggttatgagaataagcgaaaggaaaaacgcaaaaactctgtttttcataaaaactcctttcgttgcggcggacagagccgcccgttctgttttttcacaaagacgaaagttatcccgcccgaaagatcagatgagttcgtaatctatatccgcggggaagtacggcagcgagaagccgagcaggttcgcgccctcgaaaacggcagcgcgcttgaagcggttggacttgaagcggtcgtaaaaacggtcgagagtcgaaactatttcgtcctcgtcaagttcttcaaacacggcaaggcaaagatttttaatatccgaatatgcggcgtggcgtttggcaaagaagaacatcgcaaagtcgatgagttcgtatttgcccacgctcttttcggtctcctgtccctgtacaagttcggggcttatcggggtctcggcgatgtccgtaagcaccttgccgaggtcgccgccgcgggtggcagcgatattctttacaagttcgcggacaagcgttttgggaacggaagcgttcggattgtaatgtgcgaggtcgtcgccgccgaatgtgcaccagccgagtgcggcttccgaaaggtcgcccgtgccgacaacgaatgcgccctccgcgttgccgacgttgaacaggatatccgctctggttcttgcctgtgcgttttcgtaaacaacgttcttgtttgcctcgtcgtgtcccagcgcttcaaacatcgctttggtcggtccgacgatggatatttcgcggcaggtgcagccgagaagtttcatcaggctgtcggcgttcgaatgggttctggacgatgtgccgaagccgggcatggttatggcgataatattttccgtgggcagacccgccatgcggaaagcgttttccgcaacaagcagagcaagcgtggaatcaagcccgccgctgacgccgataacggcttttttcagtcccgaaccgactatgcgctgatagagcgcctgcgtttggagcaggaaaagttcgttcagatagcgggacggctcgtttttgccgtaatacggtatgcgctccgttcccctgttcgggcgggagtagataagccctgtttttttgtcgctgtccgcgcaggcgataacggtctcggggcgttcctgacttttgaaatcaacgataacgccgctgttaaagatgcccgtaaagcccttgtaaacgcggtccgcggaactttcgccgaagccgcagtttgcgacagcgacaacgcaatgacgcttgtttgccgcgtccgcgcagaactcgataatgtcgttctgaatgcacggatagccgtccatcgcggtcgggagaagcagaacgtcggcgttcgtctcggttcccgattcggacaccataacggtcttgccgcctatctttacggtgggtttctgtatcaggtcgccgcccttgacgatgatattatcgtagccgtaaacggcggtgacaaagcatttgcccgttttttcggaatactcgcaaagtttgtcgagagcctcgttggtctcgtccgcaaagcacttataatgcgccagatccgagcagcttgcgccggtcaggcagtatgcgggaaaaaggtaaacatcggcttcgttttcgtccataactttcatcatggcgtccgcgttgcggaacggtctgccgacggaaacgacaaatgtcgcagccaaaattttcatagtattatcctcttgtttcagattgctgttattttacattttattatacaatattcggcggggattgtcaatagcggcgcgcgagctttgcccctattcgctgcccgtgtatacgatgtttccgctgtttatgataccgcaggatgttcgccgattgacaaaaaagacagattatgttatactatttacaggaacggcgtttctttcggttttttttatgaataattacctgatcgaaactccgacgacgttatgaagcgcagttttcataacgcccgaccggcgcaaaacaatgtaccttttttgtcgcatactgtattatataatcgtattaagaatcggagaaacgactgaggcatcgagtacggcaacggataaagaccgattattgccgataacacaaactgcttcaatttttgtacggccggcggcataaaacagacggtttttacaagtttgtgcagttgactgcacaaaaaacaaagatatacaaagcaagagccccgcccgtccgagagagaagtctttcgggcgggcggggttttatgcggattaggaatta

SEQ ID NO: 2499 - DNA, 15697 bp, Unknown
  16S sequences of unknown bacteria
aaaaagtacatctattatagtaataggcggtcgttttttcgggaaaacgactgcctataaatttcaatatgcacttttgagaatttatatataatatttttgaaaaaatttgaaataaactattgctttgtttatagctttatgctataattacaatatataaaaaccgcctattactataatagatgtactttttacccgccgatcttttttctttcggcgggtattttacttctatttcgcctctttaaaataggtattccccaccttattcatcatctctttcttttgttccatcagcgaatgcacgtaccttctcaacgtcaccgcggggtccttatgccccaatagttccgacagcatttttacgtccattccgcattccaatgctcgcgtcgcaaacgtatgacgcaaagcatgaaagcctttatgcggtatatccagcttttttagcagtctttcaaaactcctttgatacgacctcacgggaatcgaactctcgccgttcgatattacatacaccgaacggctcttccgttttaacatacgaagttcgcacaaaatctgtttcggcagaggaatacatctcctcgacgaaaccgttttcggcgattccacgatctgcgcatacctgccgttttcgtcctttccctcgtggcgggatttcgataccgtaagcacccctttttgaaaatcgacgtccttccactccaaagccagcaattccccgatacgcaatcccgtatataaacatacgacgattcccagccacttcgtttttttgcctgcaagcgccgctcgctcgattttcttctgttccgacaacgtaaaacaggtcacttccttctcttttgttttcgggcgtctgattttgtccgccgcgtactcttttatcgtccccagcgcataggcaagcttcaaagaattctgaatcacggtaatgataccgttgaccgagttcgccgccaaacctttccccgttttcatgtttccgctctctattaattccgtaatataccgctgtaaaatgagcggcgtaagttcgttcagttcatactcacccaatttcacctttaatcgcttttctatgatttccgaatacctttcacaagtcttcctcttcgacgacggccgtatgtaattacaaaaccattcgtccagccatatcccgtatttcattcttctctcttgtaatattgtttggatttgttcggtggtttccgacttcaatattattccttggatttatcttaccatacttcgtactttttttcaaaaaataagcaatccaagcgtcctcgtttagcttttacaacaaaaaaaacggcaaccttttcattcggtaagccgcttttctatattatttatttaagctgttttcacctatccattcccttcgattaaagcgagccggcgcttttcaattaaacagcaagctgtaattttatgagcttttgcagtatgcggcaatcttttcgaacagtacgtcgggttcgatcggtttgctgatgtgttcgttcatgcccgccgccaagctcttttcgatatcctcggtaaaagcattggcggacatggcgaagataggcacacgtttagcgtcctcgcgtccaagcccccgaagtcttcgggtggcctccaagccgtccatgatcggcatctgaacgtccatcagaatcaaatcgtagtcccccggccgagaggcgacgtacatctctacggcttcctgtccgttagcggctctgtctatcttggaccccgacataccgatgatctcctgcgcaatttcggcgtttatatcgttatcctcgacaagcagaaaacgcttgtcggaaaagtcgtaatcggtcagttttttcggcttttccaccccgtgagggttgactccccggagatttgaaaaagcgtcgtaaagcgtagaagaaaacaacggtttattgataatccccaccgcccccgctgctttcgccgcttcttcaatttcggtcgaatcgtaagcagtgatcagcacggactcagtactttcgttttccgctgcccttctgatttgccgcgtagtttctatgccgtccatgccgggcattcgcccatcgacgaaacatatatcgtaagcttggccgaggctatgcgcctctttcaccttccgcacggcgtctgcgccattattcacccaatcggatttcacgctcagctcgtcgagcagcagggcaatatgctcgcacgtttccacatcgtcgtccacgatcaaagcctttaaaccttcatacgctatcggttcggtcgcctgagtttcgggcaaaccgaagggcagggaagcggtaaacgtactccccttgtccaattcgctcgttacggtaaggctgccgcccatcagctcggaaaaacgtttggaaatggaaagccccagccccgttccgccatacttgtgactgacgtcggcgttttcctgctcgaacgcttcaaaaatgcggccgagattttcgggcgcgattccgcaccccgtatccgaaacgtcaaagcgcagccatacgattccgttttccgcacgttcttcctcaatccgcacgacaatcctgccgcatttaggcgtaaacttaatcgcattggaaatcagattggataaaatctgattgagccgcaaagaatcccccgccagcttttcccttacgttttttacgagaataacctcaaactctatccccttattttttgcctgcgcgtaatagaccgtggaaagggattcgataaacgccttaaagtcaaacacatctcttttaatttctatcttgccgctttcgatcttcgacatatcgagaacgtcattgatcagcgtcagcaaatgtttggacgacaagctgatctttttgaaacaatcgctgaccctggaagtttcttccacgtgctgcataccgatgatcgtcatgccgataatcccgttcatgggagtgcggatttcatgcgacatacgcgataaaaattcacttttggccagattggcgcgttcggcctggacgagcgccttttccgttttatccttctcctcttccaccaattttgtattccgccgcgtcaccaaaatatacacgacggaaaatatccccgtcatgaccgcgatgacgctcaccaccgtcgcggcgatagaggtcatctgtctgctcatcgcttcgataatcgtgtctaaatttccgtaaggaatcgtggaaagcatcatccattccgttccctgtatgggcgaataatgcagatattcatgaactccgtataaggtaaaggcaacggttccccgctctccgtcgacgattttagagctgaacccctcaaagtcatagcctttatcgaactgcgcgttttcctgtatcgtccttaaaaaattggcgcccatattcgcgcgatactccgatcgaacgataaacgccccctgtcgggagataacgctcgaataagagatggaggattcctgctgaatgaatattttttgtttgagatccgaaacattcatgcccaccagcgccgccacaaacttattttccccgaaagccacctcctcgatgggagtaccgagtaaaagcatatcgtccccggagatcgtttcgtccgaagaaataatccgtccctctctccgcaataaagtcgccagcgaattgatttttcccgccgccggggaactgccgtccttggtatagcacattccgtccccgtccaaaaatgccaaataggaaaacccgtttttatcgctctgcgcttccagaaagcttttcaaagccgcttcgtccttcaaatcctccgcgtccacgctttcggtgatcgtcaccacctgggcgaacagactgtccatactagtggtgaaatgtcccgtcatccggtcggtaatttccgcaagatatatttcgctgatccggttgatcgagttatgagtcctcgcattataggaattcagcatgctcaaaaaagaagcgatgattacggcaaaactcagaagcacggcgcctatgccgatataccttccttttttccttttcggcaattccatgtttacgctcctgtgtctataatccggccttcgatcttcttttcaatcgtttcttcgccgtgattggcaaaataaagtttcagcgcgtcgcggtatgtcgcgtcggtttcctttacgagcgaaagcccctccaaacgcggctgcgtgtcgtcgtatatgttcagcatgaggtagccgtcccctgtgccgcccgtatagcttcgttttcccgccatataatcattgatcgccacccgatattttgccgtcggttctattttcccgccgtcggccaggctaacgcttacaagcctgctcccgaccggctgcgtactgtcaaaaacgtatctcaatccggaaacctgcaaaaatctgccgccgggaatttcggcgccgtccacggttgaaacgccgttttccagcatctcccaaagaagcttgcccgtcatttccacaacgactattttgttatcgtacggacacacgactttaagatcgccgccatagatgtttcccttatacaaggacgccctgattccgccgccgttgaccaccgcaagctgcacgtctgcacattccgccacgctgtccgccactaaattgcccagttcggtttcccgtttgcggacgttataattttgctcaatcatatccgccgtcagatagcccaccactgacatatcgtaatcgacggcggacgaaccgttgagataatactcatcgacggttttcaacgcttcgtcggccgtcatcgttcccgcgagcacggcacagccttgattgccgagatattccacaatacgacccggaaatttgacgttatagacgtaccccttcccgatgacatcctctaaacctcggggaatatattgcgcgacgctttcggtcgttttcaggtaggaaatggaagaatttgtgtcctccataagcgccctttgtccctcggccgtggaaatcagttccatcacccttttgcacgcttcaagctttttttcgccgcccgcctccgtcagctttttgttgattccgatatacgacgacggggcggcgatcgtccaggtgttttcctcgttttcggcgtcgcttaaaaacggcagcattacgtattcaaatttttccgctttcccttccgctacaagcttttgattttcctgcgtcacttcccgaaacagcgcgctatctccgtaaaccattgccaactcgccccttgcaatataggggataaacgaaggagcgttgacgtttttggtaaacaacgcttttttcaaaagaccgttatcgatcagttcctgagataaatcaaaggcgtgctcccattcgctgtcggcaaacgccgcctcgccccgattaaatttatccagccagtctatgcccgcgcctttgcctaaaaagcccggaaccatacaagccactaaaaagttccccaccgaaacgttatccagtccctcgtaattaaacgcatagccttcttccgttatccccaatcccttcgccttcaacccgagaagagaagaaatcagctgttcgttcgtgctcggaagctctatttcctgactttcaaaaagcgttttattgaccacatagccccaatactgtcccggcagcggcagatagtaaaagacgtcgtctatcgacatacttttcatcaacgtgctttcataataggtactgaacgtctgtccgcccaaaggaagcacatattgcacgctttccttatccgcgggctgagaggtaaccacgaggtcgggtcccctacccgcctttaagcggtaatcaatgacgctcgacgccgcattaacctcgcattgaaaatcgatatcctcatatgtgctttcaatcaattcttccagtcccttcaattcgcggccaaacacaatggaaacgaccgttttttcatttgccttttgtcccccggaacaagcggaaaacggtgagaaaaaaatcagacacagagaaagcaggacgatttttacaaattttttcataggttgtttctcctcgcagaatgattgatcggaaaaccgtgagtccctcaacatcggccgtaacgcacccgtcttcgcgcaaacttagtactttaacagtattttatcacttttatcgggaaatagcaattctttcgccctaatttaagtgcttttttgcaaattttattgtataatagaaacagaaggagcgtttatgaagattttttcgagggacgaagtttacgcggcgttaaaaaataaaatcgaatcgggatattatcccgtggggtccaagctcccttccaaaaaaaaattatgcttggaatttggcatttcggatacccctgtccgctatgcgctcgatctcctggaaaaggacgggctgatcgaaaaaacacagggccgcgccccgatcgtcaaaaagctcgcctccgaccgaaaagacgaattgatctcccttcaccgcgaaacagttgtggatattctctcgacccgggaatatttttgcacgccgctcgccgtttacggagcggccttatgccgggaagaggactggcgacggctgacagcgattataggccctatcgcttccgatgaaagcgacctttctatctggaaacgctaccgacatttttggcggtatttcatcaataaaataggcaacgatctgataaacagaaccgtcgatcttctcggcgtgacgcaaatctatcccttgcctcagccggaggcgcataaatcgcttctgaaacgctatcttgaaaattcgctggcacagctgaaagacgggagcttccgccctcatccctcgggggaaagcgaacgcagtcaggcactcctcggcaacattcgatattcggcggcgtcggacgttatttccgcagattggccgaaaggcatcagcgaaaggctctctttggatattcggctttcctccgtttatttggatattctcggtaaaatttccgtcggcgcctatcctaagggcggcaagctcccgagccataaagagctttgccgcatctatggcgtgtcgcataacaccaccatacaggcgatcggttatcttcgcggtctgggcgccgtcacctccgtccgaagcaaagggatttatattaatatcacccctcgggaggccgacgaaatcgttttggcgctcgatcccaaaattacacgcagacattttcgggaatatctgaacaccttggaagcgttggaattgaccgtaaaaagcgtttcccgctacgcggcgaaaaatgtaaccgtttccgaggcggaagaattgcgcctccgcatggaaaaccattggcacagcggagtggattatctgaaaacccccgtttttttgctggattttattatttcccacacctttatcaaaggcctgcgcgaaatttatgaaatttaccgtcttaatttcagctatgcttgtagtattcccggattgatttcccatacaagacaacggcacaacagacaagtatatgagctttccttagaagccgtaaagtcgctatgtaaagacgataaggatttattttcccaacaatgcgaaactatgttttcgtatatccgggagctgatttgttcggaatgtaacgcgctcggttatatggataccttcaaaataaaccgaagataaaaagctgcttacaataaaattttatcccttcaaattagggctatccttttaggaaagaagagtaaatattccccactacaagggagcgcacgactaccgacgggggcgttcttaaactccgctttatcccgtttcgcgagggcaggtatgcgccgagtttctccgcggcggaattttagtccttttctcctttgcctaaaacgctgtatcagccgaactgccggaacagtccgcaaccgagattttcaaattcttctacgtaatcgagattaaaatccctttgccactttgccctttatttttatccgcgccgaaggattttaaggcgcatggtttaaaaaaagaagcatcctttttgtcccgcattttccgccctgcctcgcggacggtatcgaaaatcaatggactgaatggatagaaggatataattctcggccgtattgtgattcttaaaaagcagcgccgtacatatctgtacggcgcattctttctatgttaacgggctctatgctttttaggagatttacgaggacacgaatcgcccgacaaacggaacgagttagggtattccgctcttctttcttccacaagggcggcttccccctgctttaaataagatcgttccactcggcaaacgatatttcaaattgattttgtatattatacgcgccgtcgttcgcaggcgaataataataacaactcatgagtttcttttgctcgttgatcttcatcaaaaagacaatgtcctcccctacgccgttatcgtgcgtcgccgtttgggtatcgatcagaaacgacgccaccgtattgccgtgaacgccttgatccaaacgcaccaacgcgtcgtcagaacagacatgacctccgaatgccatgaaaatgttatcgtactgcttgacgagtccttcgaacacgtcctcgccgcccagcgactcgtcgtccccgtccgtcataaacgagccgtcgttgttcatatagctgtgcgtgttgacgataacgcggcgctgaggatacatttcgcaaagtctgcccgcccagcgcagcacgctcttgcgcggacggtactctaaattgatgaccatatattccacgccgcatacttcgtacagcgaataggtgttcgccatcgaaccttctttgtacgcgccgccaaaattggacatccggctatacttatcatacgggaagtaccgatcaaaatacgtctgctggcggctcggctcccaattgtgatcgtaatcgtgattgccggggacgaagctgtacggcagttttccgtccagtttggagattcccgccgcggcgtcgcgataaaagctctcggtcgatccgacgtcggaaaggtcgcccacctgccaggcaaacgccatctttttcgactgcgcgtgatcggcaagccactgcatcatatcgagatacgtatcatactgataacgcatacaggtctggacgtcgggaatgccgacaagcatataatcgtattcgaaatcctcgctcgccacccccacgtatttatcgaacgtttgcagcgccgcgtgattttcatttgcggtcgtatcgctcaaaaagcgctccgtccattcctccccgaatacccagtttcccataatttggccgttataatcgtcggcgatctgctccgtttgcatatccgagcggatgcgctcctcgtcgatcgccccgttgtataccgtaatttgacggacgtagccttcgaacggcgtcttggaagaagtgaaggtacgatagtccacgccgacgctcatgggcatattggcattcacggcgtcgtcctgttccgatctcacgcgatccttttccgccccgtccacatagagcgtaaacgtatgcgcggcgggatcgcgcacgaccgcgacgtgatgccactgtccgtcgtcaatgtgcgcgttttggaaggtgtagacaaagtttccgtcgtcccagttgagtttgatgcggccgatcgcgtccaccgcccactcgatcgttccctcatattgcagggaatcgtaaaataaattccccatgatggtaccgccgagagatccctcgggcacgtttatccatgcctcgaaagtatcgggcgagcgctcgaatgccttttccatgcgatatttataatgattcatgacagtatacgcgtttttgcgctcgttcacggccgcaacggacgccagattcgaaaagttttcctccgcgcgtaccctcggcgcgatgcccgccgcccccattgccagcgagagcgtcaacgcagaaataagagccctctttattttctttttcatcctacattctcctcaacgtttatttctttgactgtgcaatcgaacgtaacgttcatcgtcgtcgagcgggagccgtaacccgtacccgtaaagcggcttaaaagctcggtatcctcacaggtgtaggcaagactgccgtcaagatatatctcaaaataactgccgtaatcgcgcaccgtgatattgacggtaacctctgcgtccgtttgcgccgcgttcattttatcctgccatccctgcggcagcttggcgagcgcaatatcgccgcagatacgcgcccatgcgccgtcctcgactttacttaccgccaacacgcccgcgccagtcacgccgaccgcgatatagttagtgccggaacccttcgtttcaaaggagttatcggcatataactgcatacggaaggcaagcccgcctgcgccgcctgcgccctttttaaacgtgtagttcatggagtattccgtatgcccgaacgtcgtttccccgatgactacggcgagttttccgctcgcgccgacgctgtacgttccgtctttgttgtcggtaaagttgctgtgcgtgggataccgccaacctgcgtacagcgtcatatcttgggcgatctcgggcgcgtccgcgtccactttgcgcgtgcacgcctcgtcgtagtaccagccgttaaagatcttattcgcaagcttcgtcgccggcgtaggcaactcgatcgcgccgctttcgtaatagacgtcgtccaaggcgttctcgcagttactttcgagagaaatcgtataagccgccgctttccaccccgcgtacagcgtaatgtcctgcgtgggagcgaacagcgtttcgtccaccgcctgcgtgcaggcatcgtcgtaataccagccgaggaagatataactcgccttttcgactttgggcaaagcgacgcttacgccctcgatatagagaaggtcgtcgaccgatcccccgcctttttcgtcaaaggaaacgcggtaggaaggaatttccgccacggaaacggtgaaagaaacgttcttcgtagacgaacgcacgccatatcccctgccctgaaaaccgccgatgtcttcgttcgaggtgaacgaaagtccgccgtccagataaatctcgaaatactcgccgtaatcgcgtaccgaaatagtcaccgcgatctgctcgccgcttgccgcggcattaaacttttgctgccaggcggcgggcagtttttccagagcgactttactgcccttcatctgcgcaaagccgttgtcgatcctgcccacttgtaaaagtcccgcattggggtcgattcctgcggagatatactgacagcccaattcgtgcttttcataggaatcgtctgcataaatcgccatacggaaagcgatgccgcccgccccgcccgagcctttggcaaagacgtaattcatagaaaattgataatattcgaatttggcttcgccgatcaccgccgccgcgctgccgttgccgacgccgtaagtgccgtcgccgttgtcgataaaattcttatgcgtcggataccgccatcccgcgtacagcgtaacgtttcccgcaatttcgggcgcgtccgcgtccactttgcgcgtgcacgcctcgtcgtaataccagcccgtaaagattttattgcgttcgttggaaagatcgggaagcgcaattgctccgctctcataaccgatgcttcgataagtttcgccgtccttagacagcgtgacgcgataacgcgcctccctccaaccggcatacagcgtcgcctcgtccccgtcgatctcgggtctatccaaatcgaccgctttcgtacacgcctgatcgtaataccaaccggtaaacacatactcctctttcgtaggaacgggagcattgagttttcccattgcatagaggactgcgttgcactccgtcccgccgttcgcctcaaaacgcaccgtcttaaacgcgcggtattcaaaatcggaaaatacggcgtccgcagtcgaagaacgcataccgaatcccgttccctcgaaagattggagcagcgcccgatccgaacaggtatacgccagctcgccgtcgatataaaattcaaaacgatcgccgtaatcgtaaacgcgcatattgacggtaattttatcgctggcagaagccgcgttaaatctgtcctgccacgactttggcaaatcttcaagcgccatattcccgcggatggtcgaccatttcccgtcgatgaccttgctgatctgcaaaccgcccgacgaagggatcagtcccagcgcgatatactccgtccccaaatcttcataagcgtaatcggcgccgctgtgaatcatgcggagcgccagattcacgcttcccgacttgcccttgcggaaggtggcgtccatcgtatacgccccttcgttttcgccttcgtcgactaaaattttaatcgattttcccgtcgaagtccagctgccgtccgcattctccgcaacgttttctttgggcggcagcgccgaaaaatcataaaccgccacaaggtatatatgatcctcgcccaaagtaatcgaatcgggaacgtcttgcgcgctttccccgtcataaacccatttgacaaagggacaggaaatcccgtcgatcaccaattcttcgggcggagcgagttcgcctacgtcgatcgcagtccccgcgtcgtagctaaggcgcacgtgttccgtcaatgtgccgtaatacagatacacataagtgacttttttccactttgcccacagcgtaatattttccgtcgcggcatacgtctgcgaaacgggatctcccgtcagcgattcattctcgtaccaacccaaaaattcatagccgtatttctgaggcgtcggaagctccaccccttctccaaaatccttcaaaggggtatgcgtcgtgccgccgtcggtccggaaagaaatttcccgatattgcttttcccacttggcgtaaagaacgacgttcccttgcggcaggtaagaatcgcccaatttttcgccttcgccttgcgcgttatcgtaccaaccgagaaacttataatcggcttttttcggcaaaggcaacgcaatcgcccgtccctgactcacgacgggcaaatactgcgtgccgccgtccgtttcaaaggtaacggtgtactccacggcttcccatttcgcatacagcgtcgcgtcccccgtcggcacatattcccctacgatcgcttcgccctcaaaggtcgaagtttcgtaccatcccttaaacacagagccgtatttttccggcacagagagtacgatcgcctgcccgggagcctgcgtttcgatctttccgtaggaagttccgccgtcggtcacgaaggtaacggtgtagccttctaccgaatcgtcttgacaggaggcgagcaccgccgccgaacaagtcaccgtaagcgcggcaacccccgccgccaatatcttatctaatctcttggacataaattttctccttatcaagcatacagatattcgttcgtgatcgaaagatctgtaaattccacgtcgcttgcgccgctgcgaactccgtaacgagtccctttcaacgcggcgtcgtcacgaaatccgaacatgagttccccgttgacgtaacaacaaattttatttcccctatacacgaccttcaaccgataggtttcagttgctcggaacgtatagttcacgatgtgacataccgtccatttgccgttgtccgtcttgcccaaataggcggtgccatctctgccgaggaaaaagtagtaatagctgattccgtttccttcccaaaaacttgacgcattgctattcaatccgaacacgatgcccgaatcggtgttcgtcttggtcctgaccgaacaggtaatcgtaccataaggaaagggcgcgctctccgtcgtgctcaccgccatggaattagtttccgtcgttacacaattctgtaagccgcccgcaccctcttcccccatcgaaattccgccgctcactttcgcaagcgtaacggtttcccgctgatagacgtattgctgagaatcgtcaaaatcgcccgaaaaatcgtcattgggttcgtcgcgatcgataatgtcgggcagccacgggtctttgtcgtcgtcgggcggctccactgccggaatttcctcgggcgtcaaaaagccgtccggaatttgcgcaggcgactcttcgagcatatcgatgggtttataatcgacgggtttttcgccgcagccggtgaacgatccgcccatgcccagcgccaatatcgcggcggtaagtaccattcctgctttcttatatttcataacatcctccctaacgaaaaattgattcgattgagtacattatatgccattccttcccgcctgtcaatatctatctaaatttttaacagactaaaacaatagattgtttcatataagaatactaataaattagtttacttttgcgccgcgatatgatagaattaaagaaaaggattttatcaaaatgtcaagaataaacacaaaaaaattctataaaaatctcagtctggatctcaatttaacgatcgcgcgggaagaggatcttccgattatagccgaaatatgcgaagtattgggcagcgaaacgcggcttcgtattttgaaatatttacagaggccgccgtatattcattcccttcccacactagtaaaagaactcggcattcccaaaacgacaattttacatcacctgcacaagatggagaacgcgggcgttatcagtctattctataaaccttcggaacacggactcgtgcgctttgtggggcgggatttaaagagcgccaatatcgttatctaccataatgaaaaaagcgccgtgcgctccgttatatcggaatttcaaacactcggcgtcggacagttcagtgatttctcagggaatcggctttcgcttgccacgcggagggaactatttgacaatatcgcggatcggtgttttattccgcagcgtttcgacgcgcagctcgtctatacgccccaagggaccatcagttattttttcaacagagcctccacgcaaaaaaagctcgccgaactgaacctctcgcttgaaatttgttccgaggcgccctattctgacaacaattacaagagcgatattacgttttggatcaacggacacgaaacggcgacctttcagtgcgacggcgactacggcgacaggcgcggcaaactcaatcccgaatggtggccaagcgcaaatacccagtacggaaaattgctcacgctttcggtgcgaatggacggggtgtacctcaacggaaaccgtactctctccaaagtcaaactgagcgatttacatttgaaagaaggcaataaaatttccatcgttctcggcaataaagataccgccgaatatcccaacggattcaatctattcggacgggaattcggtgattatccgcaggatatttgtcttgaactcaaatacgacacagaataatttttactagatacacaaaaagcgcaactcattacgaggtgcgcttttttctgtcagacctattaaaatagaatcctgtttagcttactgcgtataattacgaacatacaaacacatataaatatcgaaaaatcgaggcgacgcgcccttgcttgcgtttttgtatcgatatattttctccaaagtgtgcccctaacttcgatttcctctatcggtttatagctttcttctccgttctcattccgacaaaacaccaaggtttccgcaaatacttcccgaacggcgagttccaaaatgctttccagcctctcacaaagttctgccaatccgttaattcgtccggctcgtaactcatctccgcgtttgtt

SEQ ID NO: 2500 - DNA, 7105 bp, Unknown
  16S sequences of unknown bacteria
ctgttaacaagaacgttttagcgtttatatgttagaaattgctttgcaatttcttttatgctataataatgctcattagaaagaaaaggacgggaaaattatgttatctgccgcaaaaaaagagtttattgaatttatgatgtctgctgatgtcctacgttttggagattttgttaccaaaagtggacgtaatactccttattttgtaaatacgggaaattacaagacagggctgcaaagttctaagcttggtgaattttatgctgcatttatcaaggaaactattggggattgctttgacgccatgtttggtcctgcatataaaggaattccgttggtaacgactacggcaggagcgcttgcacgcaactatcaaattgacaaaccttacttttttaaccgaaaagaagtcaaagaccacggcgaaggcggaaataccgttggttatcatccaaaagacggcgaccgagtaattatcattgaagacgttattactgccggaactgcaattcgtgaaacaatgcccattttaaaaggctgtgccgatgtaaaagtaactgatatgtttatttcagtgaatcgctgcgaagttggcaaaacgcccggaaaaacagctgttatggaagtggcggaagaatttggaattaaagtgcatgcgttaattaccgtaaaggatatttatgaatatttaaaagaacaaggtacttatgacagcgtactaaaagcaatgaaaacttatatggaacaatattgtatctttgaataataaaacagcagccgtgtgaagacagaggctgctgttttatagtttagtatcaatgctggggtagattacatagaatggaacaggcttttccgcgtaaagaaatgtacaggcggtgataaaaacggctcacgtaaatgagaattatgagtttgatataactcagctatctgatgaagtgaaacaacaactggagctgttaaacaaaagtcagtctctgattatgaccattgttgcaggtacgctgatgcgttataaaagtttggacattcaaaaacaacagatattatgtaaggcattatgcccggaagcgtttgagcccgaatgtcagccgaacgttttgcagatacaggctgtttcttctttgattattttatacgcactgtttgagttctatggacaatcgcaggatttattgcagcaagcatgtgaaaacggtacagcaactgcagcacaaaaattagatttgacattaagcgaaattatcatcttggtaggattgattcgatttgttcaattggtgaattccgaagaagaggttcaagcgggagagtcatctatggaaacaatcgaagcattagaattagaagaaccggatacaccgtaaaaaaggctgagaatccatgattctcagcctttttctatctgcgttggttacgcatttttgaattggaagttgagtagggagcaacattgctgtctctaagaatattgaaattatgatttggacgttctccgggaagataaaagtaaacaaattttacagaaaaaatatcacatacgataaagttggttactgcatcatcgtataaaacaacaaaactggtagcaacgttgtataacaaaccttgttttctcataatttgacctgttccaatcagaaactctatgacaacatattcgcctacattctgtgccaaaattctttgcatggaaccaatcatttcgggagaattgaatgactgttggggcggcgcagtaaaatcgtacatttggctggaaccatcttcgttgatttgatattgtgcatttggtgagttggcgcaaaatcttgtattcagttcacgttcacttttgaaagagctcataataacctccacttatgtattactgtatgcttctgttggattataaaaacaatggtctccgatgcgtatgacaaattcgcctacactggacggaaaatttgttctgcaagtagtggaaaatggattaaaaaaccataatgcaaaacctaagttggttaatctatttcctgcaattgcccaattggcaatatcgtattgtgtttgctccggacgcatattatatagattttgcatattgtaggaaccgtttaccgtttccatagcacatacaaattgtctttgctgaaataccacttcgcgaatggtgttgaatctgccgtactcgccgtatgtaatatgaacgcggttcataatgacactggcaacagcttgcattccgttttcaccttcgccgccggcttcacactgaatcagacgtgccaatatttctaaatctgataaggccattgcagcactcctttccttatttttatacctttcaaatatattccttggtcgtatgatacattccaagtttttgcaaaataaaaaagatgccgaatggtagctactcataaaacagtatcaaccgacaaactgaatagggtagttgccatacagggtgcagaaaagggcgagtaggaaacaaagtgtttcttacccgcttttttcatgctctttgttacgcagtaggcggtctgaaaccctttgttcatgcggctttgcaagtgtaaaacaggggcggcaagggttttataccttttcccttaaaaacgcctttctactgcgtaacaaaactgtgataattatctgagggagcatagaccacctatctcggttttcccgatgttggaaaacccgatattggaaaatccgacatcgggtaatccgacgtcggaaaatccaacgcaattaaataaagatatactaactaaagaaaaaccaaatacagatttaatcaaatatctattcccttcctatcctttccctaatccctctcctttggggcaaggtacagcggcagagccgccggaacggaaaagaatggaacagaagcgtcaatgcaaaaaaatattgtttgctatgttacgcagtagaacgccatttttgagggtgggagtataaaatcccttacccctgcccctatcgtcgctataatgcgcttaaatcaagcgagaaacgtaccctatcgcgtaacattccatactgaattgagagcgtaagcattctatccgattgcgctctcttagctgcctaacagcaaagacagggaaagccgtcaaggacgcacaagcgtgcattttatccttgacggcttttctggctttgctacttcctacctgtcaaaacgaaattgcaggacagctttgataagctgtgctttcagacggtcttgaatatcgccgttgatatgtccccgataggtagacaggtacttgatacgcccggcatagtgccgcaataccatgtctatggcttccggctctccggcgacaactttttcaataacctcaaagggtatcagcttcttgtttctcatgttctgatttcaaccattcctttctcaactgcttcaatgccgcgtgcttccagtaattcactgtgcttctgctttttccgtactcgctcccgatttttctttcattataaccgagaaagaaactcattaacaggacagtacgccgttgctctgacaatttcaataatgcgtcggctaacctcttatttgccacaacaatctttttgcccttttacaacaaagacagtcggtttgtcgtattgttcaaagtaactgtctgttgtaaacggctcaaagggtgtttccgacatcagatagtcaagcgatacttcatgcttctgttttcgcccaaaatcgcggtatgcactgattgccgcattacgaagaacgattttacaaaatgcggaaaaggtgtactcaatatgctccttgtattgctctgaataaatcattttttcaccccctttcttcccagtaggggctattacaacaaacgcctacgcagcataaagtggcgtaggcgtttgggtaatatgaattatttaagcaatcaatatgatttatatattcatcttcatagccgcaaaatcccgttgcagaaaacaggatttttttgatgatttgttgtaactaagggtatagaaaaagaacatggcgatacctccttgataccgccatatccttgaaaaagtgcgactttaatacaccctccgaaaatccatttttcaaaaggaaaacggcggctttgattttactgttcaaaaccgccgttcatagctgctgtctgcatatagcctaaaaacagcggctttattgctgtgtattgcgctattttagaacgtttttcctacaaataaagtgcctactttgttgcctcttacgatttcgtacaaggcttccggcgctttcccgtttgtaattacggtgtctattccctgtgcggtcgctaatgcggcggctcgcagttttgttttcataccgcccgttccccgccttgaacctgccccgcctgcaaggacatatattgtttcgtcaatttcctctatccggcttatgaggtttgcgtttggatataatcgggggtctgcgtcatacagaccatttatatctgataagatgactaaccgcttcgcccgacataaaaccgcaacgacagccgaaagcatatcattatccccgaacagcctgtcctctgattctatttccgtataactgacagaatcgttttcgttcactacgggaataatatccatttccaacaaggcatcgaatgtatttatcagattttctttcttttcttcctgttccatatcctctgcgttcaataggatttgagcgattgttttgtcataatcgttaaaaaatttgtcatatagaaacatcatgctgcattgtcccaccgctgccgccgcctgtttcatacgcatactggaaggacgctcttttatattgagtttatttgttccaacggcaatcgcgccagacgataccaaaatcacctcatatcccatattctgaatatcagacagaacacatgcaagacggtcaaaagaacgcaaatcgcttttacccatttcgtttgtgagagtagaagtccctacttttacaacaatccggttttgataaagtcccatatcacacctcaatgatagacaacgtatggttggtatagggcaggaattttttgcaaatatcctctgtctgtactttcatatatcctgttgttgtcccatcgctgcacccataccatttttcggcagtcacttctttgtcaaaaacaatacgcaccttgttttctgtatctaacaggctgctgaaaacagtcgccgcaccgattttcgtacctagtattctctccatttgctctgtgggggcaaaggaaacacgggcaacgcccaacgcattactaaaatctttagaacggaacggcttattacctacggtaataaacaggtaaaaatctgtctgttgcctgttacagagaaataaagtttttaccatgttcatatccagtttttcatcaatggcaacgcaatcctccatagtaatcgcttcgtctgtatcgacacgttgaaaaggaatttgcaatctttctaacgcttcataaactttttgttgaagctgtgtctgaaagcaacatggggcttcggtctgaatttcgcttacataaaacattgtgttcacactcctgcttgacttttttgcctattcagtttaccatgttttttgtaattacaaaagcgaatgtttgtcatagaaaacatgataaattcagataaataaggcaggttgaaaatatggacatgaatatccaaaagtatatggcgtttgtcaagacggtcgaatatggcagcttcacgaaagccgcagaaatattgaattattctcaatctggcattagccgtatgataaacgacttggaaaaggaatggaaagttgtcttgctggagaggggaaaatccggcgttaagctgacaagcgacggaatgaagctgctcccttatgcaaagaacgtctgcatggaatatgagaagctgcaaatggaagtggatgagctgaatgggttacaatcggggcttatccgtgtcggcacattttccagtgtggcaacgcactggctcccgaatattatcaaagaatttcaaaaggcatatccgggtattgattatgaattactgcttggcgattatacagagattgaagcatggatttcagaggggcgcgtagactgcggctttctgcgattaccaacggattctgactttgaaactatttttttagagcaggacaggctgcttgctattctgccggaaaatcatgctctaacacaacttgaaaaagtccctgtagcagctctctgtgaagaaccgtttatgctcctggagaaaggtgcaaaaacagaagtatctgaaatatttgaacgctgtaacctaacgcccaacgtacattttacaacgtgggacgattatgcgattatgtcaatggtggaaagcggtcttggtatcagtattttaccggaattgattttgaagcgtgttccataccggattgctgcaaaagaattagatgtgcccgcataccggaaaatcgtgattgctctgcggagtaaaaagacggcttcacttgcagtcaagcggttcttggaatatctgcaatatcgttaaaatcttatatcgaaaaagtatataagcaacgcatttatattcagccagattttcagttgaatatagatgcgttgttttatgaaatgaaaaatatttttcttaaagtttggcatttccggcgtgtcctccgtagtagggaacagggaaagttttttcttaaatttttctgaaatcttcggcaaaattgccttgttcggtgttgtaggtagtgaaaggaatttcagagggtttgggagactttccaacaagcacttttcaaccgatatgccgcagggcaagagggcgaaaatacggaaaagggtacccttttcctatgcttgctacgaaacttattacattacaaatcaaggaaaggacgggaacggaatggaacggaaacgaaaaatcaaagatgggcatatcgtagtgggaaatccgctgtttcaagaattgccgaagcatgaagtaacactaaaatccggcagaacgctctatcgttttacagggagctatgacggggaaaggagcctgccccataaggttttacgtcttatggaacaggaaaagggcaaaaaagatgttgattaaaaatacaggagccgatacaatagag

SEQ ID NO: 2501 - DNA, 25875 bp, Unknown
  16S sequences of unknown bacteria
cggaacacggccttgacggcttccatcagctgaaccttggggtcctgcgggaagtccacgcccatagcttccttgtagatcgccttgaagcgctccacaacggccatcaggtcttcggcggtcaggtcgcggtcgaacttgacgcccttcttctccttgaactcgtccagaacatcttcgaacttgctcttcgggatctccatgaccacgtcggagaacatggcgataaagcggcggtatgcgtcatacgcgaagtgggggttgttggtcttcttggccaggcccttgacggacacgtcggtcaggcccaggttcaggatggtatccatcatgccgggcatggaagcgcgagcgccggaacgaacggaaaccaggaaggggttctcttcgtcgccgaatttcttgccggcgattttttcggtctcagccagagcggcatagatctgctcaacgatttcatcgtcgatcttcttgccgtcggtgtagtaacgggtgcaggcctcggtggtcacggtgaagccctgaggcaccggcagacccagattggtcatttcggccaggttcgcgcccttgccgcccagaagctcgcgcatgtttgcgttgccttctttgaacaggtacacatactttgtcattgtgtcagctttcctccttatatagatcgcggacgaatcaccggcggaaccattccccaatgctcatcctttcaccaaccaatttagtatacccgttttattgagaaatttcaacatttttttgtattcttgacaccccaatttgccaaagctataatgaataaaactttgggaaggggcgaagcgcttggcgattccctataaccgcaaccttttgcccggggtcagctggtacagtgcgctgatcgtcatgggcattctctgcgccattttgctggcggaaaaagaagaacgtcgccggaagctgcccaaggacacgatcatcgatctggccctgtgggcgatccccgccgggatcgtgggcgcgcggctctactacgtgctcatgagtctcgaccagttccggacgaatcccatttccgttctgtatatctgggagggcggcattgccatctacggcgggattctcggcgggatgctggccgtgtttctttatgcccggcggaaaaagctgaactttctgacgctgacggatgtgctggcccccggcgtgctgctggcgcaggccatcggacggtggggcaactatttcaatatggaatgctacggcccggagattttgtccccggcgcttcagtttttccccgtgggcgtgctgatccccgatggtaccggcggctacgtgtggcatatggccacgtttttctacgaatctctctggaatctgtgcggcttctgcgccctgtgggcgatgcgcaagcggcagacgcgtccgggaaatctgtttgcgtggtatctgctgatctacggcagcgggcggttcatcatcgagcagctgcggcaggacagcctgtacgtgggttccctgcgggcttctcaatggctgagtctggtcttctgcgtcatcgccgccggttggctgctgtggggctgctatggcaaaaagcggcggaagctctggctttccctgctgtctgcccttttgctgaccgcccgctggttcctgctgaatgcgcctctctggtatggtctcgtgcttctgctggggcttgctgccggttttgcgtcccttgctccgctgaaagggcgcggccgtttcttctggcttctgccccttattcttgatctgacagggctggcgttctgcgtcttttcttccacttcgtttttcctgcacctgcacactgcgctgtgtagcgtgaccctccccctgtatctgggctggctttccggcccgtccttctcttcctcatcaatccacgcaaaggagacggagccatgcccgccggaaacctgaaaaatacgctctatcaactggccctgccctttttgggtcttcgttcccccatttcctccgtgcagggcggtacagaaaaagaaaacgcccggctctgccgactgctgaaagcgcagcacgccgtaggcgcgtgcatccagcggttcgaaaaaggtcggccgacggaatgcttcgttgcggggaacgcccgcatggagccagacacccagcctgtcacagccgagaccgtcttccgtaccgcttccatcgccaagatggtcacggcgctgctggtttttcgcctgcaaacgctgggcaaactgaacgtctgcgaagagctttctgactttctgggcgtacccgtccagaatccccattatccgcaggctcccattacgctgggcatgctgctgaaccacacctccagcatcgtggacagcccggcctatttcgcgtcctttcaacagcccgtccctctgacggagctgcttcaaaaccctgcgtcctattccggttctctgcccggactccaattccgatacagcaattttgccgccgggtcgatcggctgtctgctggaaaaacgctttcaccagagcttcgagcagctggcgcaggaaaacctgttccagccgctgggcgtacaggccactttcgacctgagcacactgaaaggaaagcccgtggcggacagctggcgcgtcctgccccgggagcgctgcttcgacgcggaaaaacgtatctccgccgccgctcccctgaccgaagccgacccggagcgccactacctgctggcctcgggcagtctcttcctgacggcggaagcgctggctaagctggcgttggtcgcgtggaacggccatgacggctttctttccccggaatgtctgtctctgatgcagcaccccaccgtgccgtggccccggcaggaggtctgtctccgccacggtatggggctgctcaagctggacgaccccaccatcgtaaaaaggcccctttgggggcatcagggctttgcctacggcgcggtgaacggcgtgtttttcgatgaggagggcagcggcttcgcctgtctgaacagcggcgtcagtgagcagcggcagggccatctggccgtggtcaaccgggatctgatctgttttttctttggggagggttccggccatggctgacgatctgatcaccgccgtggagcgctccaaaaaaggagcggtcgttaccctgaacggggaggaaaaaatcttcgtcagccgcgctttgctgttcgaacgggagttcacggagggccagtcccttcggcgggacgagctggcccggtggcttttgccacggcagtaccccgaagcgctgaatctggcggtgagtctgctggcccagcgggcccgcagctccggggaaatcgaacagaagctgcgggacaggttctatctgcccgaaaccgtcgaaatggtgctttacaagctggaaaaagagcattttctcaacgacgaagcctttgccacggaatatgccgcgtctttgagtcgccgccagatgggacggacgcgcatcacgcaggagcttcgccgcaaggggatcgcccccgccctgatccagcaggctctggaatcgctggacgcagaagaagcggacgacgcggcgctggtgctggcccggaagcttctgcgtcgctatgagcgggaacccgatccccgcaaggccatgcagaagctgctgatggccatggcacgccggggctacggcttcgaggaagctcgtgccgccgcacagcgggcgattcaggaaccggaggattgattttccctcatcgggccggttttcccggaaaaaagcagtctcccaaaaaccgccccaaggttgacaaccttttgtcaactctctataatagatacgattggaaacccccgtctgtttgttcatgagcaaaccggacagacggctttcaaaattcacaagcacaacacaggagggaacactaatggcaaccaaaatgaccgttgacggcaataccgccgttggccacgttgcgtatgcgttcagcgacgtggcagccatttaccccatcaccccttcctctcccatggcggaggtcgtggatgagtggtcggccaagggcacgaagaatcttttcggccagaccgtccatgtaagcgaaatgcagtccgaagcgggcgcggcgggcgccgtgcacggcagccttgttgccggtgcgctgaccaccaccttcaccgccagtcagggtctgcttttgatgatccccaacatgtacaaaatctccggtgagctgctgccctgcgttttccatgtcagcgcccgtgctctggccgctcatgccctgagcattttcggtgatcacagcgacgtgatggcctgccgtcagaccggtttcgccatgctggcctccaacagcgttcaggaagccatggatctggctctggtcgcccatctggccacgctggaaagcagcgtgcccttcctgcatttcttcgacggtttccgtaccagccacgaagtgcagaagatcgacgccatcgactacaaggacatcgagcccatggttccctgggacaaggtgaaggccttccgcgagcgcgccctgaatcctgagcacccgcatcagaagggcaccgcccagaaccccgacatctacttccagaaccgtgaagccgccaacaagtactacaacgccgtgcccgagatcgtggaagagatcatgaagaaggtctccaagctggtgggccgcgagtacaagctgttccagtatgtgggcgctcccgatgccgagcgggtcatcatcgccatgggctccggctgcgagaccatcgaagagaccatcaactacctcaacaagaagggtgaaaagctgggcctgatcaaggttcacctctaccgtcccttcagcgtgaagcacctgatggccgctatccccgcctcctgcaagaccatcgccgttctggaccgcaccaaggagcccggctctctgggcgagcctctgtacgccgatgtgtgcgctgcgctggtcgagaccggccgcacggacatcaaggtcgtgggcggccgttacggcctgggctccaaggagttcaaccccaccatggtcaaggctgtttatgacaacctgtccggcgaaatgaagaaccacttcaccgtgggcatcaacgacgacgtgaccggcaccagcctgaagctgggcgagcagatcatcgcggctcccgaaggcaccgtgtgctgcaagttctacggcctgggctccgacggcaccgtcggcgccaacaagaactccatcaagatcatcggcgaccacaccgatatgtacgctcagggctatttcagctatgactccaagaagtccggcggcatcaccgtgagccacctgcgcttcggcaagacccccatccagtccacctacctgatcgacgccgctgacttcgtggcctgccacaaccccagctacgtcaccaagtacgacatggtttcctctctgaaggatggcggcgtgttcctgctgaacagcccctggaccgctgaggaaatggacgagaagctgcccgccaagatgaagcagctgctggccaagaagcatgcccgtttctacaacatcgacgccatcgatctggccctgaaggtcggcatgggcaaccgcatcaacaccatcatgcaggctgctttcttcaagctggctgaggtgatcccctacgatcaggccgatgaatacatgaaggcgtatgccaagaagacctacggcaagaagggcgacgccatcgtcaagaagaactgggacgccatcgacatcgccatctccggtctggtgaagatcgacgtgcccgagagctgggcgaacgccaccaccggcgccgagcctgtgaaggtgaagtccaccgaatacttccagagcttcgtggagcccatcctggcgcaggaaggcgacactctgcccgtcagcgcgttcgatcctaccggcgctgtgcccaccggcaccaccaagtacgagaagcgcggcatcgcggtcatggttcccgaatggctgaaggacaactgcatccagtgcggcaactgctctctggtttgcccccacgcctgcatccgtcccatctatgcctctgaggaagtcatgaagaacgctcccgaaggctacgacaccaagcccgccaccggcaaggaattcaccggcatggcgtaccgtatgcaggtcagcccgctggactgcaccggctgcggcaactgcgtgcaggtctgccccgccaaggaaaaggccctggtcatgaagcctctggacactcaggccaaggaagaaaagaactgggagttcgccatgaccgtgcccgaagtcaagggcatcgagaatgtggccaccgtcaagaacagccaggctctgaagcccctcttcgagttctccggcgcttgcgcgggctgcggcgagaccccctatgtcaagctggttacccagctgttcggtgatcgcatgatgatcgccaacgccacgggctgctcctccatctacggcggttccgcccccacctgcccctacaccaccaacgaagacggccatggtcccgcttgggccaacagcctgttcgaagacaacgccgagttcggcttcggtatgcagctggccatcacccagcgccgcgccaagctggctgacaacgtccgcgcgctgatcgccgttgactggtgccagcccgccatcaaggaagccggtcaggaatggctggacaacatggatgacggcaagaagtccaaggaagccggccagaagctgctggcggcctgcaaggacggcatcgacctcaccggcaccgaatacgaagccaagtggatcgagaacggcaaggtctgcgactgcgaagcctgcaccctggcccgcaaggtcattgaggacgccgatctgctgaccaagaagtccttctggatcttcggcggcgacggctgggcttacgatatcggttacggcggcgtggatcacgtgctggcgcagaatcaggatgtcaacattctggtgctcgacaccgaagtgtactccaacaccggcggacagtcctccaagtccactcctaccggctccatcgcgaagttcgccgctgccggcaagcggaccaagaagaaggatctgggcatgatggccatgagctatggctatgtgtacgtggcttgcgtggccatgagcgccaaccccgctcagctgctgaaggccatgaccgaagccgaagcctatcacggcccgtctctgatcatcgcttacgcgccctgcatcaaccacggcatcaacatgggtctggctcaggccgagatcaagaaggctgtggactgcggctactggacgctgtaccgcttcaatcccgatctggctgagcagggcaagaacccgctcactctggactccaaggagcccaagatcgagggctatcaggacttcctgaagggcgaagtgcgttacgcttctctggccaagatgttccccgatgtggcggaaggtctgttcgagaagaacgaagccgacgctctggccaagtacgccaagtacaagagccttgccgaataaagcaggggcagtgcccctgcaccccagctccgcgccctttgggcgcggggcctttttattcttccgcttggccgcggagttaccgccgctcggaggctgagcctctttcggactgcgcgctatgcgcgcagggcgctagcgtgactgcaagttggctgcgaagttaccgccgctcggcgacaggcctcgcgcaaggggtagtaccccttgaccccggactgcgcgcctttggcgcgcagggctgctggagggaaagcgacttaaccgtaaagttaccgccattcggcgacgggcctcatggctagcaaccaagctcagtgtggattcaaccccacactgggctttttcatacaaaaaggccgacattttttcttccatgtcagcctttttcattataaaaaaacaagttacgtcaaagcatcccaagctacaaggtatggccagacctcttgtcaactgattgttcatcagggctgcaaaaatatccaagccacactgaaacatctcaaccagcaagggttaagtatgccctacgccgaccacgggggcgatggcggcgataggcagtggagggaaaaaggcccgcccattttgacggcagaaaaaggcgagttcggagcgcgccggatcgcaggtgaaatctggccaatcatgctgcgcgcgacataacgagccccgccgccaaaatgggcaatagaagcctttttcccggagtcgccgtgccgctggctttcttttgcacacttttctttcgccatcgaaagaaaagtgtgaacgccccatgggacggcaagtcccaattcgcgccgtagtcggcgcgtcattcccctcctggggcaaggagtatgcgcctgcgggcgcaccaaagggctttcctcggggcaaacaatcggcacggcctgcactgccgcgcttcgctgatggtttgcctgaactccttcggcccatcaaaaaggatgaatgccgcttcataagaacagcgctgcacccctgccagcgctcccctcactccttcacctgctccacctgataccccatcgcctccagttccctcaatacactctcctccggcagtaccagatgcagcagccccaccgtcgcaaaaatcttttccccttcgtcctgctctagaagcactcgcaagccctccgccatgcggcgattccgcagggtgatcagcccctgatgatattcctccgtcagcgccggttcggcaaaatcgttctccgcctcgtaggcctgaatgaacggttccgtctccccttccgcccaccagtccggccattgggccagcgtgctgcccgtctcctccggattcaaaatctgctggcagacgcttttcaccatcgcatcctgcagggccgggctgaagccgtccagcacctccagctgttcccgagccgtttccaaataatggacgggcttttctcccacatattttcgcacccgttcctctacgccctgctgcagggctgaacgggcgctgcgggttcccagctccgccgcagccgcctgcgacgaaagggcgctggtcaccgcccagggacgaaacgcattcagcctgtccatgtaaatgccgcacttctgcgccgtctgctccaataatgcataggtttccgccgtcagcagctcgccaagaggctgctctgccgccatcatttccgcaatgacggcctgtgcttcctgactggccgtgtcgcactcaaagacgaagcagtccgctttcttgagtgcctgctgaagtgtcccgtcaaaatgggccatgcgctcgtttcccacatgaatggaacccaagatcatcatttcgtttttcccgcctgtgacccgatagaggatccccctgcagggctccccgctgtccccgcaggccgcagcgcccagcagaagacccgtgacctccgccagaagcagcgcccacttccattttcctttcatgacggttccccccataacgcttccgccgcctgtggcacgtcctcgccgaagggtctccattcctccggcagaagggcggcgtaggcgctttcgtaataccggctgtccagcaatagcaaaattccccggtcattttcggaacggatgacccgtcctcccgcctgcagcaccttctgcatagcgggaatgcggcaggcatagccgaacccgtccccgaaatgctgctgatagcagcgctgcaccgcccgcagtcgggcgctgggcgtaggcagccccactcctacaacgatcacgccgatgagctgttcccccggcaggtcaatgccctcggaaaacagtccgcccaacacacagagacccaatcgtgggccgtcttcttccgtaaacgccgcgaaaaagccgtctttctgttcctccgtcatgtcccgcttctgcacccacagcggcggcaaattttccggctgcaaatgccccagcaccagttccagataggcatagctgggaaaaaacgcaatatactttcccgcctttgcgcacgccgcctgagtaattgcctgcgccacctgcgcggcgctttgttcccggtcggcatagcgggtagaaattctccggcgaacgacctgcaggtgttcccggggaaaaggagacggcagcgtaaaacaggcgtcctcgtcttcgccgcccaacagctgcttcatagcccccagcggggacagcgtggccgaaaagaaaaccgtcccccgcatgggtttggtcgccttggcgagggtttctcccggcaaaaggcaatagagggtcagtgtccgctcccgcccgtgcttttccagaagaacggcgtattcctcgttctggtgctctgcggcgtacaggaagggcagcagcatccgcagcagtgaaaacagcagactcagcggtacgccgtgaggctcggcgatcaacgcggaaatctgttcctgtacctccgccgccatagagacgatttcgaccggcagttcgtccaacgtttctgtttcaccagcgtccagctcccgcagacggcgaagtaaacgtcccagcacctcgtaacagggatgtttcctccccagtagttttcccagctcggtgcgggcctcccgcagcgccggtccgtccagtgtcccggaaagagactcccgcacccgttccagtgcgtgatgggcttcgtcgatcagcgccgtcatggcccgccgccggacgaacagccgcttgacctgcgcaaaggggtcgaacagatagttcatgtccatcagcaccacgtcggccagctcgctcaaatacagcgccagttcaaaggggcagatttcgtgctgggccgccgcagcctgaatgacctcgtccgtccacacgtcggtgcccgccagcagctcgcgcaccgcgtcctcctgccggagaaaatgccccttggcccgcgagcaaaagtccgggtggcagcgcagctcctccgggcagagcttttcccgggccgtcagcacgctgacccgggcggaaagcccctgcgccttcatccgctccaaggcctgcaggggactctgccgggcggtattccgggccgtcagatacagcagcttgtccgttttcccctcccccatggccttgagagcagggaacagcaccgccgcgctcttgcctgtgccggtgggcagacaggcgaacagccgcttcttccggctgatggccgtatagacctgcgcggccagctcccgctgcccggcccggtaggccggaaagggaaagtccagcgtccgaatggaagcgtcccgttgtcggcggtgttcccgctctcgtagggcgaagtccagccagcgatccagccagctttcggcctgtgcggccagttcttcccgggaaagagtctcggagaagcgccgcagcactgctccctccaagttcaggtacgtcacgcaaaattccacgctggggcattcttcttccagcgccgccatggccgcgtacaatagcgcctgcgcccggtgctccggcagcggcgcgtcgccggtatggcggctcagcttcatttcttccaccagcggcaccgggccgtcggtaaacgcatccatgcgcccatataattctacgctctctccacgcaaagaaaagctgtgccgaatggcccgctccacttcccccgtctgctgttcctgacgggaacggtgcgcgcggcctccggccagcatgtcctccacgccccctccgggcaggatatcctccggcgggaagcagaatgcgaccacctcccgcaccgatacccgaagttcggggcttgatccacttttcttctttggcgcagccaaggctcaatcccgattccgggaacgagagatcaggatcagccgcagcagctgcagggcgctggaaatgaccgacgccagataggtcagcgcagcggcgctcaatacggctttcgccccctgaagctcctccgcatccagcacaccttccagcatcccaagggcccgcttgctggcgttgatctccaccggcagcgtcaccagcgaaaacagcagcgtcaggccgaagcacagaatgcccaccatctgcagcggttcccagctgaacagaaggcccgccataaaaatgggcaggtagagactgctgccgatattgaccaccggcaccagcgcggtacgcagcttcagcaggccatatccgtcgtgctcctgcagagcgtggccgcattcgtgagccgcaacgcccaccgccgccacactgtcggagccgtacaccgagtcgctcaagcgcagtgtcttgctgctggggtcgtaatggtcggtcagggagccgttcactcgactgatggtcacgttggtgctgccgccccggctgagcagcatccgcgctgccgcttctgccgtcaggccgcttttcgtgcggatccggctgtagcggtcgaaggtgcttttcaccttgaactgcgcgtacaggcccagcagcaggcccggaatgaccaaaatcatcgtccagtcataataaaagtaaggcatatttttcctccttatcggaacatttccgcattttaccgcacgatttcaacgcccagcaggccgcacaggatcaacgcctgttccgcactgatccgaagcccctgcaggtcggacggcgtcattcggatgccgtccagctgacaggtgctcacgtccgctcctttcaagggcgtatggctccattgagagcgggaaaggtcgttttcttccagacgaatgcggcccagtctgcactccgtccagctgctttcccgcagagggctgcgaagaaattccacccgttccagcttgcactgagccagcgaagcataatccatcatgcagtccgcaaaggtcacgtcgttcatcgccccctctgcgaatgccacgcctgtcatgcggcagtgttcaaaccgtacccggcgcatggcgaaagccgggaaaaacaggtttcccatttcacagtgagaaaacacgcagtccacaagatcaaggcggcgcattttccagtcggaaaacaagcacttttcgaacacacagccggtgaactgcagcacgccgaaatccacgtcctccaagggctgccgctcaaatcgccgaccctccacatcgtcctttgtgcggatcgcctgacggacgatctcctccaactccccgtcttcccgcagtttggccgggatcgcgggcgcttccggcttccagtttggctgatgattcatacattctcctgtatacgccgtttcttcccggggcattctagggccggggagggatcaaattgcgtcaacttcgttgggtcttgtcgggcttccttttgctgtccgttctgctttccgcgtccgcatgggcggatgaatatacttcggaggaacagcggctgctggaagcctaccattcgggcgaactgctgcggctgcacattctggcggacaacgacgcgccggaggcccagcagctcaagctggccgtccgtgacgcgatcctgacccgttttgccgccgagctgaacgaagcctccactgcggacgaagcctttgcccggctgtgttccctgcttccgcatatggaagcgctagccgccgataccgtccaaagggcgggctttgacctgccggtctccgccgaagcgggcgttctgtccctgcccgaaaagcactatggacagatcattctgccggcgggcaattaccgcggccttcggatcaccctcggcagcggcgaaggccgcaactggtggtgcatcctgtttccgcagctctgtctggctttggcggatgaggaaccatgggtctcccctgccgccgaaccttctgaattgccgtctcacgcatcgtccgagcttcagtgggacagcctgcgcgtcctgcgcaactggctgctcctgccatcagcgccgtgtgctgcggacgtagttcacccggaaaacgatcagggggactaacaccgccgcgcccagcactgccgcgccgcgcagcccgttcatcaaaagcgccgccacgcccaatgcaatgctgaacacgccgctgaccatggagatcacgccgtagcggcgggcgaatttttcatccagcttgccggatttctgatcggcccaaaagttgttgatcaaatcatactggccccggaagcggatcattgcgcccatccacaggtacaaaatgccggtcagccatacgaggatacaccagaaaagcacaggttttccccctttttccatgtttgtcgttccttgccgggtttcattatagcaaatccggggcaataagaaaagccccgcctgtgcggggctttcgtttattcttcttccgtaaaattttctttcgcttccggcatttcctgacagacgtacagaagcgcatcctcgccgttgtcctcgtagtagcgcttgcgcacgcccagctggataaaatgcagcttgcggtacagagcctgagcaatcagattggtcttgcgtacctccagcgtcatgtactgcacgcccagattggcggcgtactgcatcagggcccgcatcagcgcctcgccaatgccctcgccccggcggcttttcgtcaccgccacgttggtgatgtgcccctcgtccaaaatgagccactccccggcatagcccagcaccgcgccgtcttcctccgccacgatgtaccgggcgcaggcgttgcgggtcatttcttcctgaaagctctgcaggctccacggctcggggaaggtttccacctcgatggcgtgcaccgcctccgcatcggccaaggtcatgcggcgataggtcacactcatgcttttccctccgccgccagtctggcggcccgggcccgttccgcttggggtgcccgcagataatgaggctgaagggtcaggtagtccacggcgttctcccgattctgccacgccagcaccgctacggcggcgggcctcaggtagctcatctgcgcaggggcaaacaccgcccgctgtcccaaacgcgcttcgatcgccgtgcggtagcgctccacaccgtcgcccagaaagcagagcttctgctccggcttggccgctgcaagcgcctgatccagataatcctccagcttggcggcggtatcctccatcacccgctggggaacccttcccggctgaaacgccgcgccgtatacctgtcccgcacgcgcgtcctgaatggggcaaatcaggtcgggcatcaggctcacgccccacgccagcgcttccagcgcgtccaccgccacgcagggcttgcccgcgccgtgggccatacccttcactgcgctgacaccgatgcgcacgcccgtgaaggaaccaggccccacgaccgccgcgtacagctcgatctccgaaatatcggtggagcacttgttcagcgcttcttccaccatgggcatcagactgacggagtgggtcagcttgttcaccgccgcgccctcgtacaggatccgcccgtcctccagcaccgccacgccgcataccggcccggaggtgtcgatcgccaacagcttcatctttccttcgtctccttcagcttttccccgtcgatggtatggaagccgcctacgggccgcagggtgatctcccggtcgttgtcccccgtgggggtcagggcgatctccagataggtctccgggatcacttcttccgcctgactgggccactctaccacgctgacaccctcgccgtagaggtattcgtccatagacagctcgtaaagctcctcggcgctttccagccggtaccagtcgaagtgatacagcggcagacggccggtttcgtacatctgcatgataggaaaggtggggctcggcagatagccttcgatccccagtccccgggcgatgccccgggtcagctcgctcttgcccgcgcccatgtcgcccaacagcaatatcacgtcgccgggctgcagctgctccgccagctgggctcccaacgcccgcgtttcttcgggagaatgcgtctgatacgtcacggtcaaagctcctttccaaaaggggagacggcggggccctgcccgcgccccggcaggagacagtacctcctgcacttccgcataattttctataaaacgattgaacagcgagacgctgccaccagcgtaggaagaaacgattttggcgctggcacagtcaaatcaatacagaccttgaagcaccacgccgccaagcaagccgtgaaagctatcgtgccgcggcggccttccccgcctaccccaaacaggcaaccaccccgcccgcatagcggacggaagcgggttcaggcctctagcccagccaaaccaactcggccttggatgcccctccgccaagcgggccacggcacctatcgtgccgcggcggccttccccgcctaccccaaacaggcaaccaccccgcccacatagcggacggaagcgggttcaggcctctagcccagccaaaccaactcggccttggatgccccctccgccaagcgagccacggcacctgtcgtgccgcggcggccttccccgcctaccccaaacaggcaaccaccccgcccgcatagcggacggaagcgggtccagggctttagccctggtggtggagaaggggagaaaggggcttgtagaccagcagcgtaacaacgctgatcagaatccacttgaccaagttgaacgggccggtgatcagcagcacaaaaccccattcgtcctgaatggcaggaatcagggcctgccccatggaaacgatctgctccaccggcatcccatataccgccccgtaaaacgggatcatcagccagagattgctcaggacgcccgcgatagtggcagccatcgtgcccccaaccagaccgatcagcgctcccttgcgggttttgtggcgctggtagatcaacccggcgggcaggatcatggcaaaacccatgagaaagtccgccaactcgcccacgccctgagaggacgtgtgcaaaagccccagcaggctcttgatgagcagaatcagcgtggcgggtcccggccccatggcaaaggctcccagcagcaccggcagattgctgaaatccagcttgtagaacagcaccacggggatctccaccatgaacagcaccgccgaaatggcggccagaatggcgatggtagtcagttgacgggtcgtgagacgtttggatttggattgcatacgaaaaacctcctgagcgtaaaaattccctgatggctcttcatcagggacaacacgcttgcaggcggctgttcttctatcatccggacttggcgcgctgcgccttaccgtcggcttcggaatttcaccgaatcggggagaacggaacggcgttccttctccttcgcgggctgtaccgccggtggggaatttcaccccgccccgaagaagccatcatatggtttccgtcaggaatcgtaacacgccgaacagggaaagtcaatatttccgcgaaattctcttaaagagccgtttttttttgcaaccttttgccattgtcatacatctgtatgggtgaaaagtgcttttcatccattccatccgggaggtacgatatgacacaagcggaatttgtccggcgcgttgtggccatggaggatacgctctatcgcgtgtccaccaccatccttccacaactttgcgaccggcaggacgccgttcagagcgccattgaaaaagccctgcggaaacaggaaaagctgcgcgatcccgcagcgctggaggcatggctgacgcggatcctcatcaacgagtgctacctgatcctgcgcagccgcaaacgggaaacgcccatgaacgatctgcccgagcgggaaacggcccccgacgctctgcccgatctgtatgaactgttcacgtcccttgaggagaaatatcgtctgccgatggttttgtattacgtggagggctattccgtagcggaggcggcgcgcattctgcgccttcctcaaggcacgctgaaatcccggcttcaccggggacggcaggcccttcgcagcagccttgcgttaaaggaggtagacggatgaacgctgaaaacctgaaaaaactgtacggctccacgccggagagcttccggcagagcgtggaacaagccctgaatcagtcttcccatcccgtttctttcccccgccgcgcgccggtgcggctggcgctggtatgcgcgctgatattggtgctgctgaccgccgcagcctacgcggtgttttcgccccgggtggccgaggtgttcggcgcggcctatggccctgcggcgcaggaaaaactgcaggcaggcaagagcgcccagccggaaagcagcattgatctggatggtgtgcgctatacattgcacgaagtcacctacatcgacagcggcctgtatgccgtggcgaccatccgcccggtggacggcgccaaaattgtgctgttgccccaggaagaggacgatcccgacacgcccgtgggcaccgaccgctacaacgccattcaccccggtccggacgcgcccacctacggcgaaaaagccgctgagaccggcgcaaagctgatctatgccgaaatcgccgtggatcagatcgccgtggatggcggcccggcgcttccccccgcctgctatggcatgtccagctacccgcaggaggacggcagcgttctttacacgctggagatcgacgcgggcacggctgttaccgccggggaaagctacacgctgcacctgtgggtctcccactgggaatacgaccggcgggatgaaacctatgagggcgaagaatggctcgttacggtcacgcccaaagccgccgaagagaaaggagaataaaccgtgaagaaattcctttgcctgctggccgcgctgctgcttctctgccccgccgggctggcggaaaattcgaaagaatgcgaaattctccttccggacggctacacgggcaccttgccggtgtaccgggccacgctgcgggacgaaagcgccgtccccctgttcgatgaactggacgtgtctctgttcaatcagagcggcgaaccggaatttgcgcctgttctttttcgcaaaaagccgctgcgttccggctcttacacctaccctgacggcgccgtgctgaccacctccccggaaacgctccgttataaggagtacgacggcacttatgtgagccttctccactctgcggaagacggttctgaaattcgggaggagcttccccgttcttccctgaaaagcgccatcgccgatctggctgccggggcccgtcaatgctggccggatctggacgagcagccccgtctgaccacggacgcattgcccggaatcacgctggacgaagccaaggcccggatggaagccctgttggaaaagctggggatgaaggacaactatcacttcgtctacgggctggacatgacgctggagcgcattcagtcacttgggcggaactacaacgaggttttgtccttccgaaccgccgaatgggattttgcccttgccacggaggaagatcagggcttctatgtttattacgagtttcagctgaacggtctggacatccattccatggacattgcgcctttttcggcctcggcctactttacccgggagggaatgcactcgttcctgctgacgaatcccgccatgattggagaaatttacgatacgcccgacgcgctggtttcccccgaaacgattcttacccggtttgaaaaggacaaccctgaccggagccggtatggtttcaacgatcccacgccggttcaaatgaagctggtctacaccttgcagcgcgccccgcagaagaaagacggcatggtgctggccccggcatggtacgtccgctatacttttgtggacggcgttccgaaagaaggttgggtctggtattccgcgctggacggcgtgaagctgatggactgctatcaatggtagtggatttggcgttgaaggtctgcctgtggtaaaataaacgatattccattttgtcagggggcaaagccatgaaactttacgaagtttcgcagcgggaaccgcagctgatctatcagcttacggccatttgggaagattccgtgcgggcgacccatctgtttctgtcggaggcggagattcagaaaatcaaagcctatgttccgcacgcattgaccggcgtttctcacctgctggtggccgaaagagcgcagggacagcccgttgcctttatggggattgaaggccctcgtctggaaatgctgtttctttccccggcagagcggggcgcgggactgggaaggcagcttctggaatacggcattcgccattaccacctgcaggaattgacggtcaacgagcagaacccgcaggccgtcggcttctaccagcatatgggcttcgagacttaccggcgaaccgactgcgacgagcagggcggcccctatccccttctgtacatgaaacgggtctgatttttccatagaaaacccggcgtgacaaatgcgtcacgccggtttcgtttgctgtttttttgtaattacttaatgagcgtaaaatggctgaacagcgtcgcaaaggtattggcgacggtggacatggtcttgatgaagatgtccagcgccacgccgaccacgtctttgcgggtatcgcccaccgtgtcgcccaccacggcggccttgtgggcgggagaacccttgccatggccttccagtgcgccggattcgatatacttcttggcgttgtcgaacgcgccgccggagttgcccatgaacagcgcccggggaatggccacgatggtcgcgcccaccagcaggccgcccacgaattccacgccgaacaggaagccgcccacaatggggatcagcagcgccatcacggagggcaacagcatggtcttcaacgcctgactggccgccatgcggatcagcttattgtagtcgggctttacctttccttccagcacgccgggcacggacagctgccggtcgccctcgtccgccattttccgggcggattcaatggtgttgtccgtcagcaaagcggagaaatactcgatcagcgcgccgccgatgatgccgcccgccacgaccacataggaggcgatattcaggatgggttccgccgcggcggaagtgtagttgcccacataagccacgatcagggacacggtagcaaaggcggcggagccgatagcgaagcccttgccgatggcggcggtggtgttgcccacagcgtccagtttgtcagtaatcacgcgcacattttcaggcaggtgacaggactccgccagaccacccgcgttgtcggcgatggggccgaacgcgtcgatggagaccgttgcgcctacgaaggccagcattcccagcgaggacagcgcaatgccataagttccgcagattttgcccgagaggaacagcgccacgccgatgaccagaatgggcagcaggcaggagcgggaaccgatggcgtcgcccttggtgaccacgaaggcctcgccctcggtggcgatctgggccagtttcttggtgggattatagtcggtagaggtatagtattccgtgatggagccgatagcaatgccgctcagaatgcccagcacggaagaaagccacgggctcagccagcccaaacggaagtcggcgtacagctccaccttgccgaacacgagcagcgcggagaaaaagcccaccacaatggtgatgccggcggagatccacgtcgccagattcagttccttggagggattatcgcccatcttgcggaaggccgcataaccaaggcccagtacgcagcccagcagaccgccgcccgccaacacaatgggatagatacaagtcgcgtcaaaggtggcctggctcacagcgccctgcgcgccgttaaacagggtgacggcgatcatgatggccgcagccatggtggccacgaagctttccagcaggtcggagcagttgcccgcgatgtcgttcacgttgtcgccgatgaagtccgccaccacgttgggcacacggctgtcgtcctcgggcatatcgtggcgcagcttggccagaatatcggaggaaatatccgcggccttggtgtagttgccgcccgccacgcggttgaacatggccaccagcgagcagcctagcgaatacgtcgtgacccgcatgatggaggggttgcagggcaggttggccagcagaccccggcccgtggcggcagggtcgatgcccttccagatgaccagcaccagcaccagacccagcattccgaaggcctgcacactcaggccggaaatgctgccgccgcacagcgccaccttcacggtctcgccgatggacagagtctcccgggcgcggttggcggtgcgcacgttggcataggtagcgctgcgcattcccagcacgcacacagcggaggacatacaggcgccgatcaggaaggtaataccgctggttttttcaatgaacaggctgaacaccagcgccaccagcagaaccacgatggagatcgtgcggtattcggtttttagaaaggtcgcagcgccgctgcggataatttccgccatttccatcatttcggcggttccttcgcccatccgacgaatccgaaaataattgtagaacacgtaggcaatcgcaagcacgatcacgcccagaacgatcaaccaagcagccatgagagcatcctcaactttccttttataaaatagaatcagggatgaataccatgcgttcgcatcgcgttcactcgaaaaaagctgaggatctttcaaaggcatcgcatacgccccctcgggcgcgtgtctccgcggctgccgctcctttcctgcgcaattttgcccacaaaaaacaccgtcaccaatcgtcggatgaacgatgctgggcggtggaaataatgttcggtttgcgggacaatgtctcacagttcgatatgaaccgaggtttttcgcctcggtgacagactccaccactcatatcaacatagacattatatctccaatgagataacccgtcaatacagaatttcaaaacttttcctcaattatattgtactccgaaaaccggcggtgtgcaaggtgtaaatccttgcgttttcgcccccgctccgcttgaaaccgccggtcggatatgctatccttcctgtcagaaaaggagggacggcatgaaagcaacgctgcttcgcagagccgccgcatgggtcgcggcgctcgtttttctgctcccctgcgttcccgcgctcgctggtcacgacgtggtgatcccctttcctgaggaactgaccatccgcatggagaccgagttctggacggctgcggacggacggcaggccgaggccgacctgcccgtcacctgtcaggagagcgttaatcaggcgctccgagccgccctggaggaaatctggcaggagcttcaggcccattcctccccggatgaagtgctggagctttcctccaccttccgcatcagcggagaaagctgggcgggcttccttctgaagggccgcgccattcgcacgggtcgcagccgaaacgataccttcgacactgaagagaccgtctatcttaccagccgggttttcagctatgatctgctggacggcgcgccgctaagcctgcgggacgtttttcccgaggggagcatggtctggcagatgatcagccgggcaatcgaggaacgctttgccctctactatcctgatacatctcatgatggtgcggcgatccgccagctggccaacacggcttcgctggccgatctgccttttcttccctgcgccgggcgttttctgctgacctttcccctggagggcgcggtggacggcaaatggcagctggtgcaggttccgctgctgtaccgggactaccgggaatttatgatcgccgaagccgaacggcagaccgacaacagcgcccgccccatcatcgccctgacctatgacgacggccccgtgctgaacgttacccggacgcttctgcgcaatctggatcgttacggtgcttccgccaccttcttctgcgtaggtacacaggtggaaaagtggcctgacatggcccgacgggaattggactacgggcacaccgtcggctctcacaccatggatcacacctatgcggaagatgttcacgctgcttcacagcttctgcaggatcgggaacaggtgctggcgctccatgcggcccagatagggccggagccggtgctgttccgggctcccggcggcaactatgccaaataccaaaagcacgaggtcggctggccgctgatccagtggtcgtcctctgccggggacaccggcaagaacaccgagcgtcagctggcacgtcacctgacggccaacgcagaggacggcagtatcctgcttctgcacgatatttatatgaagaccgccgtttcggcagaagaatatctggcggaattttatcagcggggcttcctgaccgccacggtggaagaactgctttctctggccgggctggagccggaacccaacgaggtctacgtcagcgttcctaccgccttcactaccggcggcatcccggacggcgctttgtgatttttcccaaacaaatcatgaatggagttctgcatttttataatgaaaccttttgacaaatagttgacaacacaaaaattgtgtgtaaactaaacatggaattgctgcaagattccaaaaccttttaggaggaacgtaccatgatccgctacacaaaggaacaaaaggaggctgcgctgagctaggcgcaggagatcggtatcatcaagacccacaacgagaccggcatttccattcagacgctgtacaagtggcgtgccgaagccgaaggcaagacaggacccaaggctggccgcaaaaaaggagtctgcaacgaatatcaggctctcttggatgacgacgtgatcgccaacaaaatcaaccgtctggaagaagaaaacgccgccctgatttccgacaaccttcaactgaaaaaagcgttgatgtctctcttggaaaaataagaatctcacaaggattcttacttaacataaacgcccgtgcagccaaaaactgcacgggcgtttgctatttttcagcggcaaagcaggggtgtaaccgtgcttttttctttctccagcctgcaggtttttccactttttgctggtttctatgcagcctatgcatacaggtgcagtgacaagcaggtgagaatttctgcgcaggttctaggccgatgcgctgcagcagacggagttcacggcgggaagggccgcaccgattttgtcacaagcaaagccctcggccgtaggaaaatcccgccggggggattgacgcgccgactccggcgggggttgaggattgtcgttccagagggcgacccgaagaggatagaggcgagtggaaagcctctgcaagcagcggtgtaagccgaccgtgctgtaaaaaatcccatctgggggatcgacgcgccgactccggcgcgaacggtggggctgccgccccgaggggggtagtactttctttcgaagcgaaagaaagtaccaaagaaagccagcggcacggcgactccgtgaaaaagccttttattgcccatttttgaaagagggagttcgcaatgtcgcgcgcaaactagttagatagctatcccatactgtcgtgcgcgctcgtgctcactcttttcctctttcaaaaagggcaatgctttttccctccgctgcctatcgccgctctgctcccccgcagttggcactaggcagactcaaccaatgcgagttgggatgttacggcgcaggttggatggcttcgctgtatccataaacagacctgtttcccaactcacagttggcggtggacttacttaaccggcgctgcttgggatacttcgatgcggttgggatggtttcgcagcgcaaaaaataggcttgattttttttcttctgccgttggcactatccatgctcaaccagcgtcgcttggggtaatctagtgcggcttggatggttttgcaacacaaaaggccagcgggatttcaagtccacgctgacctttgttgcaagccatgaggcctgtcgccgaatggcggcctttcctaattcaactatcaggaatccacaccagaccggcgagccgtggcacctgtcgtgccacggcggtaaaaccccggccaac

SEQ ID NO: 2502 - DNA, 5330 bp, Unknown
  16S sequences of unknown bacteria
agtgtccattacaggatactcagatcctataaggacactctgcatggtcggagtgacagggttcgaacctgcggcatcgacgtcccaaacgtcgcgcgctaccaactgcgccacaccccgatatgctattaaattgtggtcgtgtaagtggtcaaatatgtggtcaggcacaaatttgacggcttttttgatttttacaaactgcccgaaatccgcaccgttaaagggttttcggcggtttttcttttcagggactgaatgggaaatctatgctcccaaaccacgcgcgctaccaactgcgctacatcccggtgacatttattatatatcaaaaagggcgaaaagtcaatatctatgccgattttttaccgaggtgaattccgcgcgcgcttttatccgcaaaagatattgcttttttgtgaacacagtggtataatataatcgaaataatcgaaaaaaacgataataaaggtgatattatggcacaaaaaaacaggatcacgtttactgtacgcattgacgaggagctgttcaaaaagatgctcgcaaccgcggagagcgaaggcagggatatcaacaaccacatcctgcaccttatcagaaccaatgtggcttatgaagagcgcatccacggaaagatagacacgtcaaagataaaacttcccgacgacgcacagcaggaaacaaaagccgaaaattaattttacataaggagaaaatcatggcagacgaaaagaaaaagagcacgttctggagcgaattcaaaacatttatagcacgcggaaacgttatggatatggctgtcggcgtagtagtcggctcggcgttcaccgctatagtcaattctctcgtgcagggaataatcaacccgcttatcggtaagctcatgggcggacttgacctctcggaatacaaaatcgtcctcaccgaagcgacagaagagacggcggaatgcgccattatgtacggctctctcatccagtcgattatcaacttcctcatcatcgccatctgcgtgttctgcgtgataagaacgatgaacaaggcaaaggacgcatttgagaagaagaaggaagccgaagaagaagaaaccgctgagaaagaacagaagccggaagaactctcagaagaaatccttctcctccgcgaaatcagagactcactcaagaaataagtctattttaataataaataggaggtcattatgaaaaatgtattcgatatcacaaagttcggcgcggtgtcagacggtgttaccgattgcactgtggctatccaaaaggctcttgacgccgccggagaagtgcagggatgcgtgacagtaccgcccggaacatatctcacaggcgagcttcacatgagagcgcacacaaggcttgaaggatattccgcatggagcttccgtgacgacggcatatcggtgctgaagctgtgcgacgaaaacgcagagtgtctgcttgacataaccggcgcattcggatgctctgttaccggaatttccatgaacggtgcgagactcggcaaaaatatccacggcatactccttcgctgggacaaagcaaacggcggcgggcaagaggacactccgaccattgacgactgccgcattggttcattcagcggagacggcgtaaggcttgagcatatatggtgcttctccgtgcgtcactccatgcttcacagaaacggcggggcagggctgtatatcgaaggctgggacggatttatcatcgacaactggttcacggctaacgcaaagggtggaatgcttgccgattctgtagcagcttccctgaccgtaacaggcaacagagtcgagtggaacagcactgcgggctttaagcttgtgaacggatgtgcggtgaacatcacgggaaactactttgacagaacgttcggacctgcgctgtggttcggcgataagaacggtgcaagattcagcgacgtcacggtgtcgagcaacttcttctaccgcggcggatgtccagaccataacgacttcaccgacgaatacgaaggctcgcatatccttttcgacggcgcggctaacgtaacgctgacgggaaattccttcaaaatcggcgaaaacgacggcggcggcggttcaaaatctcccgaatacggaattgtggttcgcaactcggacgtaattgcggcgacttcaaatgtatttaagaacggctatctccgcgagaaaatcgtctgggataacgtcggcgactgcgtattcgaaaacaacctcggataataaaacaaaaggtatcacatgactgcctaactaattggggcaaggtcaaacggtaccttttttctatattatttttcagaacaggaagaggaacgttgcggcgaaggacaggataagaccgatgagcgagattttgtcaggcttttcgtggaagaataccaatcccgcaacagcggtaagcacaaccgagccgccagtcatcatggggtacatgacagaagcgggaaccttgcctgcgctgagaagctggagtgtgtacgatatgccgttgcagagtgcgtatgccgcgaggactacaacaacgggaagaatcttgacctttttcgcgggtgtctgtgattcggtttcagtctccgcgccttttttcttctctttgatgagtgtaattatcagaagaatgccggagagcgttccgtttgccgcgtttgagaggaatgagaacgacgctgtgccgctctttgcataagtctcggacacctgatggagctttgacacgattccgatgccgccgtttaagaggaataccgataggcagaggatgaggaacaacgctcccgatttgcctgattccttacgcgccataacagggaatacaagtgaggcagcaagcaggataacgccaattattctcgcagctgagacaggctctttcagccagattacgccaaagaggtacgggagcagcattccgccaagcatgaggaacatcgtaaagacggagagactgccaagccccattacctttagcccgatactcatgtacgtacagcagaacacgccgatgaggaacgccatgaacagtgagtacggagttgcggtgattttttcgtgtgaaatcgcggcgtagacgagggggatgataccggacgcaaaacccgtgcaggtcgagaatatcattgaggattttgttgagttgccgcagagaatgccgtattctttgttagccgtgagttgcagcgacagaagaacaagggcaatcaaaataaaaatatagtattgcatgatgagcctcgcagaatacaaaattttcaagaacgataaaataataacaaatccgacacataaagtcaataggatatgatgaaaaagcaaaaaaataatcgagccgcagctcaccattggtgaaaactgtgactcgattaaaattatgttaacttagtgccattcagcggagaagcctgcgtcgaagtttcttccaccccaagcgtccttgatagtaactacaaagtagttttcgccttccttgagaacgtcggagatctgagccttgtcaaggttgaacagaccgtcctgccagtcgggagttacgcattcgccgtcgtcagtgtaaacttctgtaccgttgaggtatacgtggatagcgttgtcatatgcgctgtcccatacaaagtcgtcgcactgcttagctgtagcgagatcgtcaactgtgaatgtcttgtagaggataagaccgtggttagagcctgtccagccgatgtcttccatgatgttgccgaaaggaccgttagctgtgggccatgtggaaagtgtagctgtgtctgtcatgaagttcgggttttccttgatgaacttagccatatcgtctgtagcttcatcgaagtaaccgccggaaacaccaccgtctactgtgccttcaccgtcagtgtaggggcaagcaaatacggtgtagtgccagtcggagccgcgctggaagaagctcatagttttctttgtagcgttcttttcgtaggaaatgtacatatcgaattcacgtccgccccagcagttcttgatggaaacagcaacgtagttttcgccttcgtggaggaagtccttgagggtcttgccttcagcagtgttgcacttgatttcgtcgtaaccgccgttccagtcgcctgaaccgcagttagcgtcggcaatgtagtaagcttcgccgtttacatagatataaactgtgttgtcgtagaagcagttcattgtatagtacatatcgtcgccgaggtcgtcaattgtgaatgtcttgtaggtcataagaccgtttgtgtttgtcgggtcaagtacaaagtctgtctgagctgcgagcatggagttgatgcagtcgccgaaaggagcttcaacaacgtcccacttttccatgagagcggtgtccttgtaccattcggggttttccttgatgaatgcagccatttcgtcgtctgcttcttcaaagtgaccgttagcagcgcctccgcctacaacaccttcgccgtctgtgtacgggcaaacgaatgttgtgtaatgccattcggacatctggtcgaagattgtgccttcgttggattcagccggagcgggagcttctgtctcagcctcagtctcgggagctgctgtttcagcttctgtttcgggagctgtagtctcagcctctgtttcgggtgttgtttcggcctctgtgtcagctgttgtttcgcctgtggtttctcctgttgtctcaggtgttgtttcatcgccgtttccgcctgaacaagcagtgagagcaaatgaagcggacagcataagagcagcaagaatgatgcttaaagcttttttcattttttcttctccttataaaaatgatgatatatcatactttccgtgagtatatcacgagcaactgtactatacaccttttttaaaccaatgtcaagattaattcaatattaaacggacattaataattaaaaaggggataaattacgtttacagcgattccgcacggaaatattatgaacattttgtcaaataatgtcaacctatgatgactgaatcaagctcgggaaggtagcgtacacttgcgccttggttgtaatcgcttccttcgataagtgcgtcaagtgttatgtcgccgttctgtttgcgcaggtagcggtatatttcagcgcatgattggttctgtgaaattatctccataagcttggatttgcttacatatctaacgccgtccttttcgtagaacgccttgtcaaggtcatacgctcttccacagacaaggagatacggcttgaacgcatccgaaccgtatgtgctcttgtcctctgccataaagttagcttcaccgggtgtggctttctcacgcgacaattct

SEQ ID NO: 2503 - DNA, 2657 bp, Unknown
  16S sequences of unknown bacteria
cttggaaggctgttgtactagccgttatactacacccgcatcgagttgtatcatcagcctgataatattaccagatgggaagcggaatgtcaagaaatttttctcgctgccctgcgggttttctcctgcacccctgcggcggcgtcagtatgccagtgcggcgcgctgtcggaatttgtaggacaactggggagaaggacgaaaatgccggatttgaagtagaagttttgcgcgaatcagcacaatcaaagccggtgatttgtaaaaaagaccgttaagaaatagttaaaatttgggcaaaagtattgatggtgaccggacagcttactataatgacactggcgagtagtcagcgcaaaaatataattcaggaggtttttctatgacgtggactgctataattctatgtatcgtcgtgctcgccctggtgtacatcttctttaactatttcaagatcaagaggatgagcgagggcacgcccgacatggtggagatggctggcatcatccgatccggcgccaatacgttcatgaagacggaatttcggacgattttcctggttgttgtgatcgttgcggtgatcttttccctgtttgtggagcgcagcagcggtatctccttcctcatcggcgcctgcatgagcagcgctggctgcgtgatcggcatgaagagcgcgacatacgccaatgttcgaacgaccaataaagcacgcgaaagcctgagcatcggcgagacagtcaaggtcgctctgtgcggcggcagcatctccgggctgggtgtgcaggccttcggtatgcttggctttatcggcgtgctgcttatttggaacggaatatccccggatgccacaggccatggccttctggccaatttggaatgcaacccctccattatgcgcattacgacctactcgctgggctgctccattgttgcgatgtttaaccgcgttgccggcggcaactatacgaaggctgcggatatctctgcagatattctggcgaagatccgccacgatatgccggaggacgacagccgtgtccccaatgtcattgcggacttcattggcgacaatgtcaatgacattgccggtaactgcagcgacctgctggagagctttgtcgcgaccatggccgcttccgttatgattgctgtgacgatctacaacggcgcacccagcatcggagaagggacgctgaacgcaacggtcattttcccggtgattctggctggcgtcggcctgttgggctgcctgctgggcctgggctatgcctccatccgaaaaatgagcgataatccctcgaaggagctgaatcttgccacctggatctccgctggctgcaccattgttctgggatttgtcgcggcgaaggtcgtattcggcggcactgcgctgtacgatgatttccgtttcggctatctctctccgtggatctccagcgtgctgggcatcgtcagcggcgttgccatcggcatcatcacagagtactataccagcaccgattataaaccgacccgccgcctggcggaaattgctccggagggctctgcgttcttgattacgaaaggcgacgccgtcggctcccgctcctccttgctgccggtgctcgtcatcggcgtggcgctgtacctgtcgggcaacgcctgcggtacatacggcattgcgctgtctgctctgggtatgctggcctttgttggcgcgacggtctccatcgacgccttcggccccatcgccgataatgctggcggcattgccgaatccacccacctcccggcggacgtccgcgtcatcaccgataagctcgacgctgtcggcaacacgacggctgccatcggcaagggctttgccattggctcggctgcctttgcgacggtctccctaatcgttgcctatgttggctcttatgcatccaacggccaggagccggtcctgaacatcgcctccttcgtcgtcgtggccggtggtatcatcggcggcgcgctgatcgaatacttctccgctgttctgacggataacaccatcgaatcggcaaagaaaatggccgatatcggcgacgaacagctgagtatccccggcgtgctggaaggcacggtcaagcccgactacaatatgatgatccatctggcagccaagaatgcgctgcataagatgctgctgccgtcgctgctggcgctggcaatcccgatcgttggtggcttcctgttcggcgtacagttcgtcggcggcctgctcatcggcgcgacgattgtcgccatcccccgggctatctttatgggcaactccggcggcgcgtttgacaacgccaagaagtatattgaaggcggcttcctcaagggccacggcaagggcaccgaggcgcacaaatgcgccgtcgtcggcgataccgtgggcgacacccggaaggacgttgtcggcgtcgcgctggatatcttcatcaagatgatgtccaccgtggccaatacgctggccgttgtcttctcccacttctccctgctgggctgatctcatccactcgccctgcgctttgctctccgggtaaagcgcacggaagtaaagcataataaccaaaaccgccatggcgttctgcgcgccatggcggtttttcgtgggttgcattgctggcattttaccgcgcagagcgcatttgcttcctgacggc

SEQ ID NO: 2504 - DNA, 32759 bp, Unknown
  16S sequences of unknown bacteria
cgctcaggtctcatcctttttttcttcactgtccaatatgtattgtagcgctacaattttctttccataaatcgggttctgcctcttgcattttttctgttgtcctgttaaaatatttaattggcacatccttgcgctgcacagacgttgcagcgccatatgtccaagaggaggtgaatggaatgaataggtacgaactgacctacatcatcgacactgcgctggaggagaacgcccgcaaggagctgatcgaaaagttctccgcgctgatcgcccagaatggcggcgaagtcgaaaaggtggatgagacctggggcaagcgtcgtctggcttacgccatcaacgacaagcccgagggctactatgtgctggtaaccttcaagggcccctctgagctgccccgcgagatcgagcgcaacatgggcatcagcgaggacgtcctgcgctgcctcatcatcaagctcgaagagaagaagcacagcgtcaagccgcgtcccgtgcgccccgcggcgcctgtggccgcgcctgccgaagctgccgtggaagccgctcccgctgccgcgcagcctgccgaaacccccgctgctgaataaggatggtgtgagcaatgaacaaattgaccatcatcggcaacctcacgcgcgatcctgaactgcgcaccacctccacgggtgtgaacgtgtgttccttcaccgtggcggtgaaccgccgccagcgttcccagggcgcggagggccagcccgaggcggatttcttccgtgtgagcgcctggcgccagctgggcgagatctgccagaagtacctggccaagggccgtaaagtcgcagtggtcggtcccgtaacggtgagaagctataccgccaacgacggttccacccgcttctcgctggaggttacggcggacgacgttgaattcctgtcctcccgttccgaggatgccgcgggctatgcgcccgccgctcccgctcagcccgcagccgctcccgcggccgacaagggatttgaggaagtggacgacgaggaccttcccttctgattatggcggcgcgagcgcgccgcttccctgatgatgactccaaaggaggtttagcccatgtctgaggatcgtggtgaaagaaggccgcgtccccgtggacgcaagccgcgccgcaaggtgtgcagcttctgcgtggacaagatcgaatacatcgactacaaagatgtgaaccgtcttcgccgcttcgtaaacgagcgcggcaagatcatgccccgccgcatgagcggcaactgcgccaaacatcagcgccagctgtccgaggccatcaagcgcgcccgtgccatcgccttgatgccctattcggtggagtaatttgctgtcaagcacgcgtccggaccggacgcgtgcttttttggcagtccgctgcccatcatttttcttttgcaattaaaaaccccgtcaagcgcatgcttcacggggttttttctggtgacccatcggaggctcgaactccggacaccttgattaaaagtcaagtgctctgccaactgagctaatgggtcacgcccttttggggctcaaacgtgcaaggtgtatgctatcacaattcccacgaagtgtcaagcccttttctggactcgcaggcctcttttgaatccgaaatgggcagatgcgcccctttcccccacgcgccgccccaaagggcgtgcgccgcgggcctgagcggcctgtttcgcaggctcaggcgccccttgccgcccttttcatgcaccgctccaccaccgcgtgatacgcaagccccgcaaggacgctcccaaggctccacagcagccacgaaaccggcccctgcgccagcccgaagcgcttgcccagcacctccacccaggcgttgaacaggaaaatttcaaacgaggcccggcccagcgcgcgaagcggcgcaaacgccgccaagccccgccccgccctggaaaacagccaacccagccccaagcacagcgcgggcgcgatcagcacgaaggggtgccagtacatgccgtaaaaatcgagggtttcgggaaagcgcgcaaagcagccgtagagcgccgccagcccgcaggccccgcccgccagcgccagcgcatacgcgccgcccgtgcgcgcgcagtgcccgcccgcgccttcctcccgcgccggaacagccgccgccatgcccagcacaaagaccggcaggcgggaaaccgccatgtacgcctccgtgccgatgaagcacagcccgcccgcaaagcacgccgccgccaccagcaccgcgcaccgccggggatgggatgcgcgcaccatcagcccgtacaccagcggggccagcatcagcgtcagcgccagcgcactcacgtaccagttgatcatcgcgggggtacccgcaaagaagcccagcatcagcaggttgcccgccgccacgcgcacgctttgcaccatgcccagatcatagaggggcagcatcatgcacagccataccagacagaagggcaggtaggcgggcagcagccttcgcgcccggcgcagcaggtatcgccccgcgtccgcgtcccggctcagcgagtggtgaaggccgaatccggacaggaacagaaacatgtccaccccgccgtagccgatcttctgcacatcgtacaaaagcccgccaaggcccagctgcgcgtgaaaaaacaccacccacaggatggccgcgcccttgatctcgtcccggcaggcgccgattgcttcctgcatgcgccgcaaagcacaccgctcccctccgcattatctgtgcctattaaaccatatacggatggaaaaagcaaacaccgcgccggttgccatgcggcgccgcgtgctgccgtcatggccgatgcatcccggcatcaccggcatattgcctttataatgccggttcctccgaccgtttcatcaccttttcaaagcggaaataggtatccgtgccagctacgggttcacccagctggttttccgggcgcgacatatcgggatcaatatgatgctcattaaaaaattcaacgatatgaaagccgcatttgttgacataaaagtggatgttgcgttcctcaaaatatggcgttatggtttcccagacagctgtatccggatacttcgcttctatggccttccaggcggcaaaccccagaccgcggctgtggtgctcaggcgagatgaaaaacaggtccagtgaattgcgctgcgttttttcatgaatctgcagcactgcaccgcctgcatgctttccattcaaaacaatatgataggccgccgccccctcgctgtaaaaggaagaccgcacctcttcttcggacggaatcgggtccgactcgccgaatttttcttgcactgcaatggcaaatgctttctgtagctcttttgtgaactgcggtaactccgccgcctcaacccgctccagtttgatatcgaaggtttccgtcatcgtcagcttccctttcttcaattccgttttataagcttgtcaaattcgcttttgatctctcgtgccaaatcttcggtctgttctacaagcatcgttttgagaaacggccctatcgccttttcttccgcttcaaaaaccggcgtgagaatttcctgcgcataagcctttccatcgtcggtcagtatgatttgtttttctttgtgccccgtgcccaccagtcggatatatcctttcccgacatattcctgaacgatcgtgttcagcgtcgttctgggcacagaccattcttcgcagatccttttttgcgaataggctctcccgtctgcaatcgcataaaacaaaacaaacgcattctcctttatccccagggttcgcaatgctttgtaatatgcttcatcaatttggtcaatcgctatcataagccgcctgattttttctctgtttgcctgcatggtgccgccccccatttcaatcctaattcggatttacatcattataatccgaatcaggattgatgtcaagcgtgccgccggccctgtcaaaccgtaaaaacgcctgctgacaaagaaaaagaaatccgctataatgctcctaacagccttgtccattccagcaggccggcgcagcctgcatccccttttgaagcatgcgcaggccagcgcctttcccagccctttttttcaccatagcgtgcgggatggctttcggcaacccagactgcaacgggatggcggggtatgcaaaatcaacgcagcccaacggaggttttctgatgtacattgccgatctgcatattcattccaagtattcccgcgccaccagccgcgacggtgacgcgccgcatctggacctgtgggcccggcgcaagggcatcgggctgctgggcacgggtgattttacacacccggcgtggcgggccgagctgaccgaaatgctggtagaggcggaggaagggctctaccgcctcagggacgaataccgcctgccctgcgaaaccgccggcgatacgccacgcttcgtcgtatcgggcgagatcagcaccatctacaaacgcggcggaaaaacgcgcaaggtgcatcatgtcatcctcctgccggggctggaagccgccgaagccctctcccaccggctggaggccatcggcaatctccattccgacgggcggcccattctggggctggatagccgcgacctgctggaaatcacgctggactgctgcccgcaggccattttcattcccgcccatatctggacgccgcacttttcgctcttcggggcgttttcggatttttccacgctggaagaatgctatggcgacctgtccggccatatccacgcgctggaaaccggcctttcctccgacccgcccatgaaccgccgcctttccatgctggaccgctgccttctggtctccaactccgacgcgcattcccccgccaagctgggccgcgaggccaacgtgctggaaggcccgctttcctaccccgcgctgcggcgcgcgctggaaaccggcgagggcctgcacggcacggtcgaattttacccagaggagggcaagtaccatctggacgggcaccggcgctgccagtgctgtctggagcccgccgaaacggcggcgctgggcgggcgctgccccgtctgcggacgggcgctcaccgtcggcgtgctcagccgcgtggagcagctggccgaccgcgccgcgcccgctcccctgcccaggccctttgaaagcctcattcccctgcccgaggtgctggcggattgtctgggcgtgggccccgcgtccaagcgggtgcaggaaacgtatatctcgctcatcaggctccttggcccggaaatgcgcatcctgcgcgagctggaccccgccgacatcgagcgggaggcgggattcgccgtggccgagggcgtgcgccgcatgcgcgccgggcaggtgatccgcaaggcgggctatgacggcgaatacggcgtgatctccctctttgcgccgggcgagctcgaaatgctctccgggcagacctcgctgctgggaccggccgcgcctgctgcccgcgccaaaccccgcgcacgggccgccgcgcccacccccgcgcctttgcccgaagccggtccggcccccgcccccgcgcccaaccccgagcaggacgccgccatccgcacgcaggccgcctgcacggcggtcatcgccgggccgggcacaggcaaaacccgcacgctcgtttcccgcatcgcgtggctgatcgagcacgagggcgtctccccctcccggatcactgccgtcaccttcacccgtcaggccgccgccgaaatgctggaacgcctgacggaccgcctcggcaaaaaggccgtgcgcgggctcacggtgggcacgttccacgccatctgcctcggcctcgttccgccgcggcccttcatcagccgcgcgcaggcgctggaaaccgtcaaaaccctgcttgacgaacacggcgagcgcctctcccccgccgaggcgcttcggctgctgtcgctgtacaaaaacgggctgcgtaagcgcacgcccgccgtttccgcgctgcccgcgtggcttcccgacgcctatgacagccgccttggcgagctgggccttcgggatctggacggcctgatgctggaggcgctggaggtggacgtctccggcaggcgcggctttacctgcctgctggtggatgagtttcaggacatcagccccgtgcagcacgcgctcatcgcccattggagccaggcgggacaaagcctgtttgtcatcggcgaccccgatcaggccatctacggcttccgcggcgcggacgcggactgctttgcgcgcctgctcagccagaagcccgacgcgcaggttatgcgccttacgcggaactaccgctccacgccgcaggtgctggcattggccgcgcgcgtgatttccaaaaatcccggcggggagcgcgcgctgattcccacccgcaccgatggcgcgaaggtgcgcgcggttcaggcccccgacccgctgtcggagggcatctggatcgccagggaaattgcgcgcatggccggcggcgtggacatgctggacgcgcagcacatggcccgcgaagccgcccggccgttttccgatatcgcggtgctctgccgcacccgccgccagctggagcagatcgaaacctgcctcgcgcacgacagcatcccctgcgtcatctatggccgcgacgcctttctggaggacgcggccgtgcagggcgcgctgggcttttttgcctcgctgacggacccgcaggacgcgccctcgctcaccgcctgcctcaccgcgctgtggcgcgtccccgctcccctgtgccaacgggcggcggcggccctttcgcaaagcgccggggaggcggaccgcccggccttcctccggcgggagctgtcggatttctcgccccttgcgccctggctggacgcggcgaaggcgcttttcccccgcatggcgcgcgaaaagccccgcaggctgctggacgcgctgtgcgcccttgcggggctgaaaggccgggccgtggagcatttgctcagcacggcggtgtttttctccaccatgggcgggctgctggatacgctgcgttcgggcgaggaggcggatatccgccgcgcgtcgggcgcggggtatcagtccggcgcggtgcggctgatgacgctgcacggcgccaaggggctggaatttcccgtggtgtttctcgccgggatcacgaaaggagccctgcctctggagcacgaaacgctccccgccgacgcggcggaggaacgcaggctctatttcgtcggcatcacccgcgcgcgggaggagctgatcgtctcctgcgggggcgagccctccgccttctttgcggaaattcccggcgagcgggaggccgtccgctcccgcccccgcccggtgcgcatggagcagctcagcctgttttgatgtttcccggcggccctacagccgccatacagccggcatgccgtgcgcgcctgccacaatccactccccctcgcccagcacgcttttgagggcctgccgctcggcggcggccttccgggggtcggtgtccacggaggtcatcaggtagggcgcgaggcggttgaaggccgcctgctccgcggtaaagcccttgaggttcacaaacacgtcgcccgtcagcgcgatgcgctcccgccgctccacccagatggtttcgcccgccacatgtccgccgaagccctcccacatttcaaaggacaggccgtgaaaatcaaacgtgccgatgcgctccagcgggctctggcagggcgcaagcgacccgcccgccacatgcaggcgcgccgccatgggcggccggtagcccgacagcagcttgctgatgcgcacatagggcgcgtgcacggggttgcgctcgcgcagatttggctcccctgcccgctcccattcaaagttttgcaggcatttgcggctcatgtacacatcgtcgtacaggtccagaaggccgcagtggtccacgtccgcgtgggtgatgatggccgtgcgctggcggctgccgaagtgccgggccagcgtggaaagcgccgccacggtctcctgccgcatgcaggcaaagcccgcgtccacaaacagcacctcgccgtccttctcgatcacggtcacgttgcagcccgcgggcggctcggcgacgcgcatgcgcgcgccgcagcggccctgccactccgtcaggcgcacttcgtaggcgtcgccgcggcaggcgtccagctgcgccgcaaatttcccgatgtattcaaatgtcttgtaaggggcctcgtcgcagccgtccagcatctgcatcacctgattggcgttgaccatcagctcccggcggtcctgctggtcaagccccgccctgcgccccacttcaccggcaaagttcaggtaaaatgccgtgttgtccaggtttttttccgcatggtcatagtggatcacccgcacggggcacagcgtggaagcctcgcgcataaagcggctcacggccgcttcatcctccaccagcaggcccattctgaaatgctggcacgccccgccgttttcctgcgaactgatgtaggaaatattgaaatgaaagcggtcgatcagctccagcacgggcagcacctcgccgggccggtcctcaagctcaaattccagaaggatcaccgtggccgggcgctgcccgtcgggcaggtagcccatggccccaagctcccgctccacgcgggaaagctggtccggcgtgccctccacctcgatgaagagaatgtgcatatccacggccttgttgtagctcacgcgcgtaatgttcgcgcccgcgcccgcaatgctgcggcttgctttcaaaaaagcgcccacgcggtcgggcatggtggtggtgaaggtttgcctcatggtcagccgtcccttccttgcaaagaattggatatgcagcgttcacgcagccaagcataccacaagccgccgccgcttacaagcgggcgcggcccgacgttttttatacgaatcaaaaatttatgcttcaactccgaaaaaacgtggtacaatagattcagcacaatatgtggtgctcatttgccagcttttgaaaggatggtataccatggcttgttctgttaccgtgaccaatggcacgcttgagcaaaaggaaatcgacgcctacatcgcccgcgccaccaaaaaatacggtgtggagccgcgtcatatcgacatcaacgtctgcggcgacgaagtggaactgaattacgacctgggcgagcgccccttccaccgcatccgccgcatcacgggctatctggtgggcacgctggaccgcttcaacaacgccaagcgcgccgaagagcatgaccgtgtaaagcacagcctttcctgacggtattttgggggcttgtcaaagcgtgtaaatgcgcgtataatacacgccatggcagggaccatgatcatggccgccgcgccgcctcaagagagcagccgttcggtgcaaggctgcggcggcagccgcctgttccgtcatgcgagccatgtggcgaggagccgcgcgggcgcgcccgatatagcgcatcaaagtgaaggcgaaagccttaagccgggtggcaccgcggagaaacgcatcccctccgtccctgcggctgcattgcgcagccgtcaggggcgtttttcttaccggaaggaattcatacaaggaggcaacccatccatgctggacatcaaacggattcggcaaaatccccaggagctgcgcgacgcgctcaaggcgcgcaacaaggatatttccatcgacgagtttctcgcccaggacgagaagcgccgcaccctgatggcgcaggtggaggaaaagaaggccctgcgcaatgccgagagcaaaaagatcggcgagatcaaaaagaggggcggttccgcggaggaagtggccggcatcatggaggaaatgcgcaaggtaggcgacgagatcgccgccttcgacgcggacatcgccgagctggaagccgcgatggacgctttcctgatgaccctgcccaacttcccccacgagagcgtgccgctgggcaaggacgatcacgacaacgtcgaaaagcgccgctggggcacgccgcgtgagttcggctggacgccgaaggcgcattgggacatcggcaccgatcttggcattctggattttgacaccgccgccaaggtgtccggcgcgcgctttaccttctaccgtgggctgggctcgcggctggagcgctccatcatcaacttttacctcaacacccacgtggaaaacggctatgacgaggtctatcccccctacatggtgacccgcgccaccatgaccggcaccggccagctgcccaagtttgaggacgacgcctacaaggtggacaaggacaccttcctcattcccacggcagaggtacccgtgaccaacatgtaccgcgagatgattctcgacggcgcgcagctgcccatccgtcactgcgcgtactcgacgtgcttccgtgccgaggcgggcagcgccgggcgcgacacccgcggcctgatccgccagcaccagttcaacaaggtggaaatggtcaagatcaccaagcccgagcagagctacgacgaattggaaagcatgactgccgaggccgaaaaggtgctccagatgctgggcctgccctaccgggtggtgacgctgtgcaccggcgacatgggcttcagcgccgccaagacctatgacatcgaggtatggatgcccagctacggccgctatgtggagatctccagctgctccaactgcgaggacttccaggcccgccgtgccggcatccgctaccgcgaaaaccccaaggcaaagccccagttcgcccacacgctcaacggcagcggcgtggccgtaggccgcaccgtggccgccattctggaaaactaccagaacgaggacggcaccgttaccgtacccgaggtgctccgtccctacatgggcaccgatatcatcaagtaatctgtctgacgatatcaaaaaccgccgcggcagggaggcttccccctgtcgcggcggtttgctattcttcgtcttttgctcccgctccgggaatcagaaacgagggcaggcttcgctcacagccgatcttttcgtaaaagccctccgcgccgggcttggccccgaagtaccgcggcgtgggcgcgtgagcgcgggccaggtccatcagcgcccggcccacgccctgccgccggcaggcgggaagcaccagcagctccgtgatggtgccaaaatagcagccgtcggtgaggatgcgcaggcagcccgcaaggcgcccgccgtcccaggccgtgatgttgatggttctggccagagcggcgcgcgttttctccgcgtcgtattctcccggccagacctgctgaaccagcgccagaaaggtccccgcatccagcgtccggtcgtcatagcggtattccaattttccgccccctccatcgtgcccgccctgcgctcagcgcggcatctttttatttggtcagtcccagcgcccgcagccgcttgcggatgccgccggtgctgcggcggtggctttgtgccatgtcatccaccgaagctccgcgcgaaaactcgccgcgcagggtctcctcctcctcatcggtccagagtcggccggggccgtcgtccatctcctgtaccagcgcctcgttgggttccatgccgtcgcggatgaccttgagaaacacccgtccgtatttctgctgcttggcctgtcctacacccgacacgtccagaaacgtatccagcgtagtcgggcgctttttcaccatgtcgatgagcgatgcgtccgaaaacacggtataggcgggcgcatgcgtgcgggcggccagcagcgtgcgcagggttttcaggctgtccagcagagcccgctcccaggcgctcagcgacgcctccggtccgcgtggagcggctttgcgcattctgcgttcctcgcgggcgatggcgcgcgcctgcgcaggcctgggctgccgcgcgctgcccgtatccacctcaaagggctcgccctgacacacggagcagttgttgcaggtttcctgcgcgtccgtttccccaaaatacgagaggatgaaatggcgcaggcacctccggctggtggcatagaaggtcatctgccgaagcctttccaggtcccggcgggtcagctcctcgcgctgggcgggggtcagatcgggattttcgtcgccatgctcgatcatccagcggccggtgatcacatcctgcccgctgtagagcagcaggcactcggccggcccgccgtcacgccccgcgcggcccgcctcctgatagtagctctccagatcgcggggcatgttgtagtgcaccacaaagcgcacgttggacttgtcgatgcccatgccgaaggcgttggtggccaccatgatgcgcgcccggtcgtactggaaatcgtcctgattggcatgccgctccgagtcggaaaggcccgcgtggtagcgcgtggcgctgtagccgttgagcgtgagcttgcccgtgacctcctccacggtgcggcgcgtgttgcagtacacgatgccgcactcccccggcatggtgtcgagaaaggagcagagcatggtgaatttgttggtgggcttgatgctggtaaaatgcaggttgggccggttgtagccggtgctgacgcagaggggctcctccagatccagcatcttgatgatgtcgtcgcgcacgcgccgggtcgcggtcgccgtgaaggcccctaccgcgggccgctgcggcagcctgtgcacaaattcggcgatgcgcaggtagctggggcggaaatcctgtccccattgggacacgcagtgcgcctcgtccacggccagcagcgggatgcgcgcctgcttggcgaaagccacgaactgcggcatatccagccgctcaggagccacgtagatgatgcggtacgccccggccgccgcgcggcggatggcctcggcctgctggccgggggtcaggctgctgttgatatacgccgccgccacgccggacgccttgagggccatgacctggtccttcatgagcgagatcagcggcgaaatcaccagcgtaacgccttccagcatcagcgcaggcagctgatagcatacggattttcccgcgcccgtgggcatcacgcccagcacgtcgtgcccgccgagcagctcgtccaccagccgctcctggccctcgcgaaagtcctcgtggccgaacacctgcttgagcacttccagcttgtccaacggcgccgtcaccctttgtttcaaaaatttggccggtgctgggaagaactcccgcccccggcccgttgtatgatcacaggcattgtaacacaattcaccgaaaaggggaaggtttctcatgcgaatgaagcgtcttgcggccatcctgctggcggcgctctgcgccctcatgcctctcggcgcccttgcgggcgtgtacatcaacaaccccgaccccgccgaccggctccacctgcgctcctacgccagcacgcaggctccaagcctcggaaaatactacaacggcgcgcccatcaccgtcctggaggacaacgggaagggctgggtgcgcgtgcgggtcggcctcgcgcccgcctcgctcgtcggttggatgcaaaagacctatctgctaagcaccgacggagccgcgcccgccagtgccatgccccagtaccgaaacgccggacccatcaccatctttcagcagccgtcgaatttttcggtcagcgagagcgtcgaatccaatcaggtcttttccctcatgggcttttcggacagctggtggcatctgctggtcacgctggacagcggcacgtattcgtgcttcgtgcgcgcgggtgcagcgggcctctatctggtggatggggacagcgtgccccagctggcccacatttccaatcccgacgaaaacgaccgcctgaacctgcgcgcctcccccagcaagagcgccaaaagcctaggcaagtactacaacggggccgtggcctcggtcctgggtttttcggaggacggcgagtgggtgcgggtggatgtgtacggccgtcagggctacatgcagcgccgctatctcacgctggagggcgacggacccaacagcacccggatcgggataccccagattcaggtgaccgtagagagcaccatgttttacgacgtgcccgacaccaagaccgaggcacgcatcatggtcgtccggggcgaaacggtggaggtcgtgggcgtgattgacgatacgtggctgcacgtgcgctatgggaacctgtatggctatatgccgcgcaggggcacgaattttacggagtaagtgagacggcgcatacgaacatccgccgggcgggagatgcctcccgtccggcggatgttttttcaatatgctgcgtccggcctcaggtcccgctcacggacagttcgcccacgtccacgctggggcagccgatgccgcccatggggaaggtgaggtcgctggccaactcgcgcacggcgcttagcagctcatagaagttgcccgccacggtgatctgctccaccggcttttcgcgccgaccctcgcggaaggcatagcccttggccaggagcgaaaaatcgccgctgatgggattggcccccgcatgcaggccgctgacctcggtgatcacgatgccttcgccgattccgcggagcatgtcatccagcgtgcgcttgcccggctttagatagaaattggtgggcgtcacgtgcacggaggaagcgtatcccaccttgcgggcgttgccggtggtggtcacgccgtccttgcgcgcggttttcaggttgtgcaggaaggtgcggaacacgccgtcctccaccaccgtgtgcgtggcggagggcacgccctcgtcgtcaaagggccggctgcccatgccgccttccatcaggggatcgtccaccagcgtcacgcacggcgcggcgatgcgctcccccacgcgccccttgagcagcgacatgcccttttgcgccgtctccgccgaaaagatggagctgaacacgcccagcaggtcgcacatggcctcggagaagaacaccacccggtacttgcccgacggcacgggcgcggcgttgagtccgtccagcgtgcggcgggctacctcgccgcccaccttccgcgcgtccagcccgtcaaagctgcgcgcggccacgccgtagccgccggaggatacgaagtcgccgtccctggcggtggcctggccgtagagggcgcatacgtcctcggtgtagctgcggtccatgccgtgggagttgacgatgcgcaccgtatagctgccggtgttgatgacgttgtgcgccgtcttgtcgatgcgcgggtcgctctccttgaccagcctttccatggccagcacacggtcgatcttctcctgcggcgtcacctgcgcaagcgcggggtttcgcaggtccatgtccggcacgggcccgccgccgtcgtagagcggcgcttcgtcctcgtcctcgcacagctcggcgctttccagtacgcccctgaccagctggcccacggcctcctcgtcaaacgcctcggtgctggcgtagcccatgcggcccctgtacaggccccggaagcccagcccgcgcgtcaggttgctctcgtattccaccacctcgccctcggtggtcatggccctgaagctgtcgcgcgaggacacatacgcctcgcacgcctcgatgccggcggccctggccgcctccatcagctgcttgacaaaatcctgcattccgcttcgcccccttacgcgcgcccgcccaccgtgatggacgatacgcgaatcatcggctggcccacgttggtgggcacgctgccgctgaggctgccgcacatgccctgcgccatgcgcatatcgcgccccacgcggtcaatcttcatcagaatctccgcacccttgccaatcaggctcgcgccgcgcacgggcgtggtgatcttgccatccttcaccagatagccctcctgcacggcgaagttgaattcgcccgtggcgggatcgacggacccgccgcccatcctggcggcgtacagcccgtcgcccatggaggagatgatctccttttcatcgtcgctcccggcggcaatgtaggtgttgcgcatgcgcgaggtgggcgcgtaggcgtagctctcgcgccgggcgctgccggtgggcggcatgcccatgcgcctgccgttcaggcggtcgatcatgtagtttttgagcacgccgttttcaatcagcaccagctttgtggtgggcgtgccctcgtcatccacgttttcgctaccccattcgtttggcagcgtgccgtcgtccacggcggtcacgcagggcgaagcgatctgctcgcccagctttccgcaaaatacgctcgtgccaaaggccacgctggtcgcctccagcccgtggccgcacgcctcgtggaaaatcacgccgccaaacccgttgccgatggccaccggcatcaccccggacggacacaccggcgcatgcagcatctcgatcgcggtccgggccgcctcgcgccccacccgcgccgggtccacccggctttcaaacaattcaaagcccatcagcgcgccgggaccctcgaagcccgactggttttccgtgccattgcccgccaccgcctggcatccaaggcgcgtgtacacgcgccggtcggtcacgaagcggccctcgctgttggcgatgagcacgtcctgctcgctgtcgcggtaggtgcacaccacctgcacgatttcctcgccggcctcgcgcgcggcggcgttggcggcgcgcaggatgtccgccttgcggcgcgtgtcggtgcgggagggcagcagcttcacggcatgcgcgtcccccacgggcgaaagggtcagctccgcgcaggcggcaagctcccgcccccgctccctcacggcgctggccgcctgccgggcgcaggcgatcagcccctcccggctggtgtcgttggtataggcgtagatggcgttaaagcccacatacacgcgcacgcccgcgccgtggatgcgtccggaattgaccgtttccagccggttgagctgcaaaacgagcgacgtatcccgccggtcctccataaacagctcggcaaaatcgccgccggttgccagcgcggcgtccagcacatcgcgcacaagggatggttccagcatgttctaacctcctgtgatcagcccagaatggcggcaaagtccgcatgcgcaaggtccggcgcatggaacgtggccgcgggattctccgccgccgaacccacgcccaacgcgcgcatgccgccgcccacagccgcctcgatgcccgcgtcggcgtcctccaccaccaggcagtttttgggctccagccccaaaagccgcgccgccagcacaaacacctccggatcgggcttgctgtgggtgatggcgttgccatccgcaacggcgtcaaaagcgttttccagcccgatctggcgaaggatgatgggcgtgtttttgctggaggagccgatggccaccttcacgccccgctccttgagatagctcagcgtatccagcgcgccgggcagaatgtccgcacgggtcaggcttccaatcagctccacataatatgcattcttgcgcgcggccatggcctgcttttcatcgtcggtatagggcctttgggcgcgctcaaggatgatttccaggctttccatgcggctgacgccgcgcaggcgctcgttgatggtgcggtcaaagtagatgccctcttcatcggccatgcgcttccaggccagatagtggcagttgtcggtcgatacaatcacgccgtccagatcaaaaatcacgccgataattcggtcgctcatacgcacacgttcctttcctaaacattggcatggggagattatagcacgaaccgccgcccgcttacaatgccaaaacgtttccgtctgcggctttgagcgtgcagaatgtatgattgaagcgccatcccgtccaaaaagccggctattatgctatgatacatatgccaaaaccggcaggaaggaaaggagtttttcaaacaccatgaaagcaaaatggaaaaagaccggcggcatcgtgcttgcagcggtggtggtgctgggcgcgctggcggccaccagcttctaccgcgtgggccagggcgaggaggcgctcgtgctcaccttcggccgcgtgaccgataccaagggtcccggcctgtactggaagattccgctcatccagagcgtgatttccgaaagcgtaaccaccatccacaccaaggaatatggtttccgcaccacgcgcacgggatcggcgggcacggcggccacctatgccgatgagcaggacgaaagcgtgatgctcaccaacgacaacagcatcgtgtccatcgaagccatctaccagtacaccattcgtgatgtaaagcagtattattttgacgtggacgacccggagggcactttgcagctggcctttgaggccatcatccggcgcaacatccagaaccgtccgctggatgatgccctgctgaataaggaagaaatcgagcggcaggtgctgccggatttccaggccctgatcgacacctacgaaatgggcgtcaaaatcaacgacgtgcgcattcagaacatcaccgtgcccgcggctgtatccgccgcctacgaggatgtgaacaacgccaaaaacgaaaagaccaagcgcttggacgaggccgaaaagtacgccaacgaggtactgcccacggcgcgctccacagcctaccagaccctgcaggaggccgaggcctacaaggccgaaaccatcgccgcggctgagagcgaagcggcggtgttccaggccgtgtacgaaaagtacaaggccgcgccgcagatcacccgcacgcgccttctgatcgaaaccatggagcgcgttttgcaaaacaccggccgcgtgatcgtggccgagccggacagcggcgttttgaaaattctcgaccttgaccagaccacaggcagcgcggccggagccaccgccgcgccggaagggagcgtgtgagcatgaacggacaggcttatgactttgacaaggccgcacgccagcgcaagctgcgctccgacatgacccgctgggcggtcatcggggggatcgtgctggcggtgctgatcgtgtttagccagtgcttctttgtggtgggcgaggccgagcaggcgtttgtgagccgcttcggcgtcatcaagcgcgtcatcctcaacggcgacaacaccttccatcaggattacgcggacgtgttggccggcgaaatcaccatgagcgacgatgtcaggctcctcaccggcagcggccttcacttcaaggtgccgtttctggacacggtgcagaagtatccttcgcgcctctacacctacgtcagcgacagcgaggtggtcaacaccgccgaaaagaagcagtattatgtgaaaacctacgcccagtggagcatcgccgaccccgcgctgttcagcctgaagctgggcagcatgaccagcgccgaaaaccagctggataacctgattcacccggtcatcgtgcaggccatcaaccgtctgacgggcgacgacttcgtcagcaacaaggacgccctcaacgccgcgctggctcagggcctgaaaaccatcaacgaggacatggctccccgcggcatcgaggtcaaggacatccaggtgcaccgcaccattctgcccacggccaacattgaaagcacctacgcccgcatgcaggccgaccgcgccaaggtggcccagcagctgcgcagcgaggggcaggaggaatacctcaaggccgtggccacaaccgatctggaagcccgcagaatcgaggccgacgccgtgagcgaggccggcctcatccgcggtgagggcgacgcagccgcgctggaaatctacgcctccgcctacagcgtggacgaggagttctatgcctactggcgttcgctccaggcgctggaaagcgcgctggatgaaaacagcgtgctggtgttggaccgaaaccatcccctctggaaggatctgctggattacgccaccggttacggcgcacagtgacgccctgccccatgaaagagcggcccttcgcatacgcggagggtcgttttatgtaaaaaaccttcctctgccattgcatttcacacaggtccgtgatacaatgtgatggtcaaagatggtcaatattctttgacgaaaggaggatttttatgcgattaagcgatgcaatagagcaatttatcaaaaccatgctcacgcaggaagcgcccgaagtagaactcaagcgaaacgagcttgctgaatattttaattgtgcgccctcgcagatcaactatgtgctcgccacccgcttcacgcccgaccacggctacatcatcgaaagccggcggggcggcggcggatacatccgcatcttccgcatggcgcaggataccagcgagcatctgctgtacctgcttcatcagcgggtgggtgattccatcgacgcgctggcggcttcgcacctggtgcagcagctgcaggagcgcgaggtggtcaccaagggcgaggcggccatgatgaacgcggcgctttcgccccaggcgttgagccttccgctctcggcggaaatgaaggacgcgcttcgcgcccggattctgaaaaacatgttactggaggttgcccgaaagggcaaggatcaatagcccaaaggagggacattcatgctttgtgaggaatgcggcaagaatcaggcgacggtagccatcaccgtttccgccggcggcgaggtcaccacgcggcggctttgccccgaatgcatgaaaaaaatgcaattcagccttgtaagcggcgatattcagggctttttgagctccgtgctctccgtgctcggcagcggccagaaggtggaggagcacaccgccgtatgctccggctgcgggctgagttacgccgaatttgagcgcacgggccgactgggctgcgcccagtgttaccgggacttttccgatcagttgaagccccttttgcagcggattcatggccgtgcgcagcatgccggacgcaggcccgccgctttcaggccttcgccggaagacgaacgcgcggcacgggtcagcgagcttcgccagaaaatggatgaggctgtggcaagtgaaaactttgaggacgcggcaaaataccgtgacgagctgcgaaagctcgccgaagaaagcggggcggcgcaaccatgagcgattcggcagtcaatgtggtcgtttccagccgggtgaggcttgcccgaaactattttgatcttccctttctcaactggaaccggccggaaaatgcccggctgtgcattgagcgggcgcaggccgctctctgcgtcggggaagaaaactatgacctgtacctcatgcgcgatctgcccgatgtcgagcggctcaagctggttgaaaagcacctgatcagccgcgaccttgtggagcgggccgaaaccggcgccgcgctgatccggcaggaccgccgcgtgagcgtcatgatcaacgaggaggatcacctgcgcattcaggccattggatcgggcctggatctggaaaccgcggcgaacgtggctttcggcgtggaaggacgtctggaggcggtatgcaccttcagcttcgatccccagctggggtatcttacctcctgccccaccaacaccggcacgggcatgcgtgcctccgtcatgctgcatctgcccatgctgacccgctataagcagatgggcaatgtcaatcagagcgtagcaaagctgggcctgaccacccgcggcatctatggcgaggggagcgaggcgctgggcgacctgtatcaggtaagcaatcaggtcacgctgggccgcacggaggatgaaatcatcgaggccgtcaccgccgtgggccgccagcttatcgacatggagctgtccttgcgggcgcggtgcctcaaggaccagcccatggacctcagggacgcgcttttgcgcagctacggccttttgcgctatgccctgcgcatggatgaaaaggaattcatgctccactggagccatctgcgtctgggcgcggccatgggacttttgcccgtgagcctcgctgcggcggatgatctgctcactgtggcgcaggacgcgcatgcccggcgctacgctcaggagaccgcgcccggcgaagaagcggacgccgcgcgctgcgatattatccgcaaaacccttgaaaccaacgtttaggaggttctgatatggcaattttcggacgctttacccagcgggctcagcgtgccgtggcggccgcccagcaggcggcggtgctgctgcaccagccctatgtggggacggagcatattcttttgggcctgctgaaggagcccggtcccgtggtagccgatgtgctgcccgcggatgtcaactatgatacggttcttgagcgcgtgcgcgcacttttgggcgagggcaatgttcagtccggcggcatgctggagctgaccccgcgcagcaaaaaaattctggaaagcagcattctggaaagccgcaagctgcaccacagctttgtgggcacggagcatttctggctggctttgctcaaggagggcgaaggcgtggccgtgagcctgctgcgcagcatgggcgtggatacgcaggcgatgcagcagaagattctggaggcgctggtcaaatcccagcccgacggcggcgaggacgtttccgcgcccgacggcgaggaaggaaaggccgaaggcagcgtgctggaaaaatacagccgcgacctgaccaaggctgcgcaggacggcgagctggacccggtgattggccgcagcacggaaattgaacgcatcatgcagatcatgagccgccgcaccaaaaacaaccccgtgctcatcggtgagccgggcgtgggcaaaagcgccgtggtggagggcctggcccagatgatcgtggccggcaaggttcccgaaacccttaccggcaagcgcattctttcgctggacctgggcagcatgatcgccggaagcaagtaccggggcgagtttgaggagcggctcaaggataccatcaaggatgtgaagaaacaggggaacgtgattctctttatcgacgagttccacacgctggtgggcgccggcaaggccgaaggcagcatggacgccgccaacatcctcaagcccgctctcgcccgcggcgagctgcagtgcatcggcgcgaccaccttggacgaataccgcaagaacattgaaaaggacgccgcgctggagcgccgcttccagcctgtcaaggtaggcgagcccacgcccgaagaggcgctggccattctcaagggcctgcgcgaccgctacgaggcgcatcacaaggtaaaaatcaccgacgaggcgcttcaggccgccgtcagcctgtccgaccgctatatcagcgaccgtttcctgcccgacaaggccatcgacctgatggacgaggccgcctcgcgcgtgcggctgcacagcttcaccgccccgcccgacgtcaaagagcaggaggaccgcctcaaggccctgcaaaatgaaaagaaggaagccatcgctcatcaggactttgaaaaggccgccagcctgcgggacgaggagcgaaagctgcgtcaggacatcgcccagaagcgagcggcctgggaggagcgcaaaaacaacagccacgacgtggtcaccgaggaggatatcgcccagattgtggccagctggacgggtgtgccggtcaagaagatgacggaggacgaaagccagcgcctgctccatatggaggagctgttgcacaagcgcgtcgtgggccaggatgaggccatcagcgcagtcagccgggcccttcgccgtgcccgcgcgggcctgcaggaccccaagcggcccattggctcgttcatcttccttggtcctaccggcgtgggcaagaccgagctgtgccgtgcccttggcgaagtgatgttcgacgatgaaaacgccctgatccgcatcgacatgagcgaatacatggagaagcacagcgtcagccgcctcgtgggcagccctccgggctacgtgggctacgaggagggcggccagctcacccagaaggtgcgcaacaagccctacagcgtggtgctctttgacgaggtggagaaagcgcacccggatgtattcaacatccttctgcaaatccttgacgacggccgcctcaccgacagcaacggacgcgtggtcaacttcaaaaacaccatcatcgtcatgacctccaacgccggtgccagcaccatcacctccaagcgctcgctgggctttggcggcagcgtggaaaccacccgtgactacgaggccatgaaagagcgcgtgatggctgaggtgaaggataccttccgtccggaatttatcaaccgcatcgacgacctgatcgtgttccacgcgctggagccggacgacatccgccgcatcgcgggcctcatgctgggcagcgtatccaagaggcttgcccagcgcggcatgaagctcagctacggagacgacgtaatcgccctgctggcggaggagggctatgaccccaactatggcgcccgcccgctgcgccgcaccattcagagaagcgtggaagatgcgctgagcgaggaaatcattgccggtaaaattgccctgggcgaccaggtgcagctgtacgtggatgataacaagcacatcgccttccgaaagctcctgcctcaaacgcctgctcagcctgcgcctacgctggaagcgtaagccgtgttcggtggggaacgcgccccgtttggagcgcgttcccctttttttccgccccggtttgaaaaaatcctttgcgttggttcttgcttatttacccgttcatgctatataatagattgaaaaaacctattgcctaaagggggcagtgtgcaattccaacatcatatcataaggaaatcatcccgcctggcggctgcggcttcccggagattctcacccgcgtggcgaggggcctttttctgcgcccaacggcctgcgcccgagggtacacaagcgaaggtaacaaaagagcacatagagaaatgtaaggaggagtacccattatgagcaagaaatacatgcgggatatggtgccactggtggtgatatgcctcgtctcggcgctgcttcttgccagcttcaatctgctgaccaaggaccccatccagcaaaacagccagcgtgccgcggaagaaacccgcacccgcatgcttcccattgcctccagctttgagcccatggaggttaccgaaggcagcaacatggacagtgtataccagggcctggatgcctccggcgaacctgtgggatatgtcattcaaaccaccgtgaacggctacggcggcgaagtcgtggtcacgctgggcatggatatggacggcgtgatcaccggcgttgacgtgggcggcgagaacttcagcgaaacgccgggtctgggcgctttggccaaggagcccgaatttacccagcagtacatcggcaagaaggtgcccctcaccctggtcaaggggaacgaacccaagggtgaaaacaccatcgacgccatttccggcgcgacccgtacttcctccgctgtcaacggcggtatcaacctggcgggcaagtatatctccgacctcagcggcggcggatcgcccaataccgccagcgcgcagggcttcggcggccccgtggccgtcacccttgagctggacgccagcggtgccatctcctccatcaccattggcgacgattatttcaacgaaaccgaaggctacggcaagaaagcccttgaggacagcttctcgtctcagttcatcggtatgaagcccccgctggcgctttctgacatcgacgccatctccggcgcgaccgtcacctccaccgccgtggtcaacgccatcaacaccgtctacgctcagctgaccggcgaggcctccactgctgctcccgccgaggaggaagcgcccgtcgcccagctctatgaggacggcacctggcgcgcggccttcaagggcttcggcggccccgtgatggtggctctgaccctggacgacaacctgaccatccagagcatccagatcggcgacgatcagtttgccgagaccgagggctatggcgcgcaggcgctggagcccgcgttccaggagcagttcgtcggcaagaccctgccgcttaaggacggcgatgtggacggcatcagcggcgcgaccatgaccaccaccgccgtgctggacggcatcgacgcgatctatcaggccgcgaccgacgatacccccgacgagccgcagcccctgcccacgcctgccgccgagtccgaaacgcagacggacgacgccgcgacggtgtccacctccgtggctgccaccaccgatggcaacggctcctggacggccagtgcgcagggctttgccggccccgtggccgtgacgttgactctggatgacagcctgaccatccagagcatcgaaatcggcgacgaccagtttgccgaaaccgacggtctgggcgccaaagccaaggatgccgagtttaccgatcagttcgtgggcaaaaccctgccgctcaaggatggcgatatcgacgccatcagcggtgcgaccattaccaccaatgcggtgctggacgctgtgaacgccatttatgaggctgccggcaacggcgcggcggaagccaccgatgcccctgccgcgtctgatgctcccgaggccacggaggcccctgtcgccgccatcggcgaagtggctcatgagggcgccgtgtggaccaccgccgcgcagggcttcgccggccccgtggccgtgcaggtcacgctcgacggcctcaccatcaagtccatcaagattggcgacagccagtttgccgaaaccgacggtttgggcgccaaggccctggaccccgagttccagctgcagtttgtggataaaacgctgcccctggccgacggcgatgtagaagctatttccggcgccaccatcaccaccaatgcggtccttgaagccctgaacgccatctacgaggctgcggacaccggcgctcccgaagctacggaagcgtccgccgccgcggacgtgccggaagccacggaagcgcccgagacgaccgaagcgcctgaagctaccgaagcgcccgccgctaccgatgcccccgtggccgagggcgaagtggtcaacgagggcaccgtgtggtccgcctccgcgcagggctttgccggccccgtagccgtgcaggtcacgctcgatggcctcaccatcaagtccatcaaaatcggcaacgaccagttcgccgagaccgacggcctgggtgccaaggcgttggaccccatgttccagctccagtttgtggataagaccctgccgctcgccgacggcgatgtagaagccatttccggcgccaccatcaccaccaatgcggtccttgaggccctgaatgccatctacgaggccgccagcgctgaaaccggcgtgatcggcggcgcggatggccccacggccatctatgtgacggagccggaggcgacggacgagtccgaggacggcatcgaagtgaccaatgaaggcaccgtgtggcttacctccgcgcagggctttgccggccccgtggccgtgcaggtcacgctcgacggcctcaccatcaagtccatcaaaatcggtgacgaccagttcgccgagaccgacggcctgggtgccaaggcgctggaccccatgttccagctccagtttgtggataagaccctgccgctcgccgacggcgatgtagaagccatttccggcgccaccatcaccaccaatgcggtccttgaggccctgaacgccatctacgaggccgccaagtaagccgcgttccccgttttccctacaagggcagaccttcctacaggggtctgcccttttaagacccggaggtgacccgaatgaaacgcattctggcctgcatgctcattgccgttctgctgctgaccgcgtcctgcgccgccagcggcgccgaaacctatcagaagtaccgttacaccttcttcggctgcttcgatacggtgatcatcttcaccgcctatgcccgcgatcaggcagaatttgaaacctacgccaagctggtggaaagcgaaatgatgcgctaccaccgcatctttgacaagtacaacgcctacgagggggtcaacaacctctatgccgtcaatcagggagcggctgaagcgcccgtgcccgcggagccggagctgatggacctgcttctcagcgtgcgtcagtggcggcaggcctacggcggcgtgctcaaccccgccatgggagcggtgctggatttgtggcatgacgcgcgtgaggacggaaccgttctccccgatgaagccgccttgcaggaggccgcgcagcacatggattacgatcaggtcattctggacgaggaagcgggcacggtctattttgaggaccccgccctgtcgctggacgtgggggcggtggccaagggctacgctgcgcagctgaccagcgacaccctcagggaaaacgggctggattcgtttttgctcaatgcgggcggcaacgtggtctgcgggggcaagccgctggacggacgcgatttctgggtggtgggcgtagaggacctggatggcgtcagcacccgtgaaacgctgggcgcaacagacctgtctgtggttaccagcggcgactaccagcgctactacaccgtggacggcgtgcgctaccaccacctgatcgaccctgaaaccctctatcctgccgcgcacatgcacgcggtgaccattctgcaccccgattccgccctgggcgatttcctctccaccaccgcgtttttgctgccctatgaggaaagccgcgcgctgatcgagtccatccccggcgcggaagccatgtggaccttgatggacggcaccgaggaaatgaccgacggcttccgcgacctgattgaactggccgccagccgctgatcgtctttgcccattgtacccggataggagctgtttccatgaaccttgaccagctcatcggccgcctgcggaccgaccgcgcctttatggactgcgtgaccgagtggcgcaccctgcccgccacggagggccgctatgagcccctgccggacgatatggacccgcgcctttgcgatgtgcttcgtgcgcgcggcatccaccggctgtactgccaccaggcggagtgcttccgcctggcgcaggaggggcgcgactttgtggtggtcacccccaccgccagcggaaagaccctgtgctacaacctgcccgtggtatccgccatcctgaaaaacaacgacgcgcgcgccctgtacctctttcccaccaaggcgctctcggccgatcaggtcagcggcctctacgacatgatcgaggccctgggggtggacatcaaaacctatacctatgacggcgatacccaggccgccgcgcgcaaggccatccgggaggcgggccacatcgtggtcaccaacccggacatgctgcacgccaacattctcccccaccatacccgatgggtcaagctgtttgaaaatctcgaatacatcgtcatcgacgagctgcacacctaccgcggcgtgttcggaagccatctggccaacgtgctccgccgcctgatgcgcctgtgcgcgttttacggtagccacccgcgcttcatcctgtgcagcgccaccatcgccaaccccgtggagctggcctcccagctgaccgggcgggaaatcgccgccgtcaccgaaaacggctcgcccatgggcgagcggcatttcgtgttttacaacccgcccgtggtcaaccgccagctgggcatccgccgcggcgtggtcaacgaggtccggcgcatcgccgaagggcttttgcgaaatgatattcccaccatcgtgttttgcaaaagccggattcaggtggaggtcatcacccggcacctcaaggaatgcgcccgtaccgcctacggcttttccggccgcgtgcgcggctaccgcggcggctatctgccctccgagcgtcgcgaaatcgagcacggcctgcgagcgggcgaggtggatatggtcgtgtccaccaatgcgctggagctgggcatcgacatcggctccctcacggcgtgcgtgctgtgcggctatcccggcaccatcgccagcacctggcagcaggcgggccgcgccggacggcgcaaggacacggcgctgaccattctggtggcctcctccgctccgctggaccagtatgtgatccagaaccccgactatttcttccgcgcctcgccggagcatgcgctggtgcagcccaataacctctacattgtgctttcccacatcaaatgcgccgcttacgaactgccctttgaggagggcgagcgtttcggcggcctgcccgacacggcgcagtacctcgaatacctgacggaaaacaacattctgcgccatgtggatggcaagtattactggatggaggaggagctgccctccggcgaaatcagcctgcgcagcgcgcgcacggaaaacttcgtcatcatcgacatcaccaaccccgcccatcaccgcgtggtgggcgagatggaccgcttcaccgtgcccatgctgttgcatgaaaacgccatctacatgcacgacgcgcgcatgtttcaggtggaaaagctggaccttgccgcctgcaaggcctacatccgcgccgtggacgtggattactacaccgatgcggatctcaacgtaagcctgcacattctggacgatctggagcacaggcctctgccctgcggaggagacgtggcccttggcgaattacgggtgagcacaatcgtcaagatgttcaagaaattcaagctggacacccacgaaagcgtgggctttggcgaggtgcgcctgccccagaccgacctgcacaccgtcggcgtgtggtggactttgcccgacagcctcatcctgcgctatggcaacgacgcgctgcagggcgcgctggtgggcgtggcaaatctgctctccatcgtcgcgccgctgtacctgatgtgcgccccgcgcgatatcaacgtggtgtatcaggtcaaggcccccatcaccgacaagcccaccctgttcctctacgacacctatcccggcggcgtgggactgagcgaaaaggcctatcacatgcaggagctgcttttggagcacgcgctggacattgcccggagctgcgggtgcgaatccggctgccccagctgcgttgggcccgtttcccaggtgggcgagcacggcaaggcggacgccattgccattctaaaggagctgcttgcctgatggcggatcttctgagcaaactgcgcatgctggacgcagctcccaggcgccctgcccccgccgcgcgcggggcacaggaaggctgctaccgctcgcaggcaacgtttccgctgcccatcttcaccgaccttcgccacctgaccccggccgtgatggaaagcgccttcggctttgcctttccgtcggatcttcgcccggaggatatcctctttctggacaccgaaaccacggggctggccggaggagcgggcacggttgcgtttctggtgggcatggggtattttacgggcagggatttcgcagtggagcaggtgctcatgcgcgattacgggcaggagagcgagcttttgcgcacggtctcggcggtggcagggcgcttttccgtgctgtgtacgttcaacgggcgcacctttgacgcgccgctgctcgcctcgcgctttgtgatgaaccgccttccctcacgtctgccctccgtgcatgccgatgtgctctaccccgcgcgcaggctgtggaagcttcgcttgaagcgctgcaatctggccaacctggaggagcagcttctgcatgtaaagcgcgaggacgatctgcccggcgccgaggtgccgcaaacctatttccgttacctgcgcgacggcgacttcgcgcccatcgagcgcatccttgcgcataaccggcaggacatcgtaagcctggcgcagctcctgtgcttcttgtgcgggcaggtggactgccccgaaacggtggaaagcggccaggacctgctctctctggcccgctcgctggaaaagcggggcgatacggccaaagcggtcaaatgctaccgcctgtgcgcccgcggcgacacgcgcgccgaggcctatcacgcgctggcgcgggagcggcggcgcgcgggcgacgtgaccgccgccatccgcctgtacgaaaccatgctgcgccggggcgacgaccccgtatccgcctgcgaggcgctggccaagctctatgagcaccgcctgcataatccagctcaggcgcttacctacacgcgccaggcgctgcttcttttgtcggaacccggcctttttcgctcggaggctgtacaagcccgccaagttgcgctacaataccgttatgcgcgtttacggcgcaagctttgcgccccatgcgccacatcaaccaaaaaggaggaaccgtcctcatgggaatcatgaccattttcaaagcccgcagcgccgcttccaagctgtccaagggcgatacggaaggcgcaatgcgtctgtacaaggaggccattgatgaagggcttcaggacgtgcgctacattttaacctatgttgtgctgctcatccgggcaggacgttatcaggaggcgcgcgaccttctggtgaaaatccaaaggtaccccatggccgacaaccttcgctgtcagctgtatgtggactacgcctcctgcgtatacaagatgggcgagctgcaaaagggaattgagcttctggagcgtcagcacgccaagcaacccagcggtctggtgtatgaaacgctgggctacctttacgtggaggcgggcgactacgaaaaggcgctggccttcaacaccgaggcgtacgactacgacgacgaggacagcatcaccctggacaacctggcccagacctattaccgcctgggcaacgataaggccaaggcccgcgaatttttccaaaaggccatcgagctcaagcccacgcagattgacacgctctact

SEQ ID NO: 2505 - DNA, 32759 bp, Unknown
  16S sequences of unknown bacteria
tataccggcatataagaacatctaaagagataattagaaatctattaaatgatttttataaaaataaaaatggatgtaacgttgcgtaatacacagattgataaatacatatatttaataagatataataaatggagtgaacagagtggacagactgacttttaaaggtaagaaacgtcttttaataacgcttacggcgtttatgtgttctttggcggctctttcggtaagagttggatatataatgttgacaaaggacgaggaatatcagaataaagcgtatgaacagcagaccagagaccgtcttataacgcctaaaagaggcagcatacttgacaggaacggagtgggaatggctgttacggaatcggtaagttccgtttctgttatacacgcccagataaaggataaagaagcaacggcaacggcgttatcggaaatactggaattggactatgatgatgttcttgaagatatagaagaacgcgttgccctgaaacgtataaagacgaaagtcgataatgaaaccgccgctgagataagagcgttggaacttcctggagtaatgatagatgaagatattgaacgtacatatccatattgtactttggcggcaaatgtaatcggctttgtaggaaaggataatcaggggataatcggccttgaaagtaaatatgaagactatctgaaaggcaaagccggaaaaatattgacgcagactgactcaaagggactgagagtgagcgatgctgaggaaagagtggagccgataagcggagacaacctggtaactagtatagatgtggtgatacagcagtatgcagaacaggaaataaaagcggcagtggaggctaaaggtgcaaaaagcgggttaattatagttatgaatcctcaaaacggcgagatatatgcaatggcaaattatcctacattcgaccttaacgaaccgtttactattaacgaccctgaacttgcaaaggcatgggacacttttacatcggaagaaaaaaatgattacctgaaccgaatgtggagaaataaggctataaatgatacttatgagccgggaagtacatttaaaatagttacggcgtcggcaggattagaagaaggtgtaataacgcccgatagtccgtttacatgtacaggttccatgacggtaggtggcagacaaataaaatgttggcgctatccgagaacccacggggaacagacgtttgtgcagggagtaagaaactcgtgtaaccctgtgtttatgcaggttgcagagaggataggagccgataaattccatgaatatatgattaaattcggatttaatgaaaagacgggaatagaccttaacggagaggcagtcggaatacttcataaaaaagatgatataggacctgtggaattggcgacaatgagctttggacagacgtttcaaataacgcctatacagcttttaagggctgctgctgcggttgtgaatggaggaaggctcattactccccattttgcggtaaaaaccatagatgacgatggatttacacagaaagtatttgaatggcctgacggcggaagggcaataagcgaggaaacaagtgaaaaaatgcgcgctatattggaatctgtcgttgcggaaggaacgggaaataaagctcaggtagacggatacagaataggtggaaagactgcgacaagccagaaattacccagaggcagcggaaaatatatagccagctttatgtcttttgcgcctgccgataaaccgacggtaatggctcttgtgcttatagatgagcctcagggagtgtattacggcggaacggtcgcagggcctgttatgaaagacctgctttctaatatacttccttatcttaacataccgaaaacagctgaaatatcggtttccgactaaatataagaagtaggaattatttacatcgatgtttgactgtgatataatcaattgattatagaagattttaaaaactgattgtttaggaggttttaaccttgatacttcagaaattgattgagaatatagattgtactgttataaaaggttctgccgatgcgcaggtacaggcggttcagtatgattcaagaaaggttggaaaaggcgacctttttgtatgtataacaggtttccaaagcgacggccataattatgcccgatctgcggcggaaaagggcgcttccgttattgtggctgaacatgaggttgacgtacctgacggagttacggttgtgattgccgaaaatacaagacttgcccttgcacagatatcggcggcttattatgattttccgtcggaaaaaataaatgtcatcggcgtaacggggacaaatggaaaaacaactactacatatcttataaaaactatacttgataatatcggctataaaacaggcgtagtcggaactatcggaaatatgataggcaacagaaagcttcatgcggacagaacaacgcctgaaagccttgaacttcaacagctgttttccgaaatggtagacgagaatgtaaaatatgtggtaatggaagtttccagccattctctgtctcttgacagggtggcaggcgttagatattccactgcgatatttacaaatttaacacaggatcacctggactatcataaaacaatggaaaactatatgaaagccaagggaatacttttttccatggctgacaaagccgtcataaatatggatgatgaagccggagaatatatgaaaagcgtttcaaaaggaaatgttatgactgtcggaatagattatgaaaaggctgatttaagagcggaaaatatttccgttacagccgacggagtaagctatacgcttgattatgaggggaaacagtatccggtaaaacttaatattccgggtagattcagcatttataactctttgggagctataggcgcatgtattttaaacggtatagaaatggaaaagattatagacggactcgcacttaacgaaggtgttccgggaagatttcagtccgtacccaatgatttggggataacggcaatagtagattatgcgcatacacctgacggtttggaaaatattttgcagactgcgcatgaatttgccaagggaagaataataacggtattcggctgcggaggagacagagacaggacaaaacgtcccataatggccgatattgtcggaaaactttccgattttgcaataattaccagcgataacccgagaaccgaaaatcctgcggctatactggatgatgtggaagtcggaatgatacctacaaaatgtccctatcataaaattgaggacagaagggaagctataaatgaagctataaaaatggctgaaaaagacgacgttgtaattattgcaggtaagggacatgaggattaccagatatttgccgataaaacaattcattttgacgatgtagaagaagtgaaaaaagcaatagaagccgctagggcataaggagataaaaatgatacctatagacataaatcaggccgcggaattttcgggcggaaaactgataggagaaaacaaggttattacatgtattacgaccgattccagagccgctgcggagaacagtctgtttgttgccgtaaaaggagataaatttgacgggcatgattttatagaaaaggcatgggaaaacggagccgaatgtgtactaagcgaaaaagagtttatcgtacctcacggtaagtcgctgatacttgttgaaaatacaagaaaggcgttgcttgacctggctgaagggtacagaagtttgttcaacatacccgttgtttcggtaacgggaagcgtcggaaaaacgacgacaaaagatattatagcaggcgttttgtctcaaaaatacaatgtgcataagacaaaagggaattttaataatgatataggcgttcctatcacgattttttctcttgaaaatgaacatacggcagccgtagtcgaaatgggtatgaaccacagcggagagatagacgtcttggctaaggccgttaaacccgatgtcggcgttatcacaaatatcggagtatcacatatagagaacctcggctcacgcgagggtatactaaaggcaaaatgtgagatgttcccatatatcggaaaagacggttatgcagtgctcaacggtgatgacgatatgctttgtaaaataagaggttttgagcatacatacggattgagtaataatgcaaaaataatatggtacggaacagataatgaatttgatatttgggcgtccgatatagagcctatgggacttgaaggaataaaatgcacaataaatactccgaagggaagctttgaagcaatgatttcggttccgggcgttcatatggtatataatgccatggcagccgctgccgtaggaataatacaggatatggacttagaaagcataaaaaaaggtatcgaaagttttatgcctacgggaatgagaatggaaaaattcaatttatccgatggtgcggtgcttattgacgattcttataatgccaatccggtatcgacaaaggcagccatagacgtactggcgtcatgtaaaggacataagtgcgccatattgggcgatatgtttgaacttggcgagtatgcggaaaaaatgcattttgatacaggcaaatatgctgcggaaaaagagattaacgaattgatagctgtcggaggaatttccgttaatatttttaacggggctaaaacagccggattagataatataaaatattataagaccgttgaggaatttttgaactcaggatataaaccgcgcggcactgttcttataaaggcgtcgcacagtatgcatttcagtgagattgccgagtatattaagaaattttaacggttttaaaaggagtaatacaaatgaatttattgataaaaggaatatacacgttaataatagctttcgtgctttgcatttttgtttgtcctgtgcttataccttttctgcataggcttaagttcggacagactgtcagagacgacggtccgcagacgcatttgcaaaaaacgggcacgcctacgatgggaggattggctttcttagcggcttttgtgctttcggcaatatttatgacacctacgcatgagactatagcggtaatcctcgtaactatcggattcggacttataggatttattgacgactatattaaggtagtaaagaagcgttcactcggtcttaaacctatgcagaagataatcggacagcttattatatgcgtattgtttatggtttatttgaataaatcaggcgtaggtacggaaatatatataccatttacaggcggaaaaacatgggatctgggaatactttttataccgttttgtattatagcggttcttgcaactgtaaacggagtcaatcttaccgacggacttgacggtcttgcagacggagtaacgcttatagtatgcgtattctttacaatgtgcgcatacgccgccggaaacggaatagtaacggccggcggagcgatgataggaggacttttagcgtttttaattttcaacgcataccctgccaaagtatttatgggagacacaggatcgctcgcacttggcggttttatcgtcgcatgtgcgtttatactgaaaatgcctctgtttatacttatagccggaataatttatgttgtggagacgttatctgtagcgatacaggttaccgtttataaaaagaccaaaaaacgcgtgtttaagatggcacctcttcatcaccattttgaactttcaggttggagcgaaacaaaggtagtaactcttttttatgtaataacggcaattgcatgtcttgtggcgttcctcggagcacaaaatatattttaatttaagaaaaatctatgacttcttttaaggaatatattgtttgtgcaggagaagagtctgaccgtactgcttcaaatatgaaaggaagattttaaaatgctttatgaaaataaaaaggtaatagtatgcggcatggcaagaagcggtatatccgcagccaaattgttggcgtccgtaggcgccgacgtaacgcttcaggatatgaaaccaatggatgttctgattaagctgcatgatatagaagcgtataaaaaagcgggaataaaaatttttgcgggagcaaatccggacgatattatagatagtttcgactatgctgttcttagccccggcgttccgtgcgacctgccgtttataaaaaaagcaaaaagcagcggagttaaagttataagcgaggtagaactggcttatacgctgaccgaatgccctgtatgtgccataaccggaacaaacggaaaaacaacgacgacaacattgacgggaatgttgttaaataaaaaatataaaaatacggctgttgtcggaaatatcggagtggcttattcggaaaaagttaaaagccttaaagccgatgattttgtatgtgcggaaataagcagttttcagcttgaaacatccgatactttcagaccgcatatagccgctgtattgaacatcacccccgaccatcttaacagacataaaacaatggataattatgttgccgttaaggaaaaaatctttatgaagcaaaataaagacgatttcacaatattaaataaaaatgatgaatattgtgtgaaaatggctgacaaaacaaaaggaaaagtattctttttttcaagtgcggagaagcttgacgagggaatatatctcgacggagacaatatacatataaaatggaacggactggatgaagatgtaataaatatccatgacctcagaatactcggtacgcataattatgaaaacgttatggctgccgttgcttgtgctgtctgtgccggcgtagatatggaaagcataagagaaattttgaaagaatttaacggggttgagcacagaatagagtattgcggaacttttgacggagttgattattacaatgactcaaagggaacaaatcccgacgcgtcaataagagccgtccttgctatgagaaagcctattgtcctcataggagggggatatgataaagactcatcctatgacgaatgggtaaaactttttgacggaagagtgaaaaagcttatacttataggcgcaacggcaggaaagatagcggaatgctgcgacagatatggatttaaagactatgagtttgccgatacgtttaaaaagtgtatagaaaaatgtaaggcttcggctgaagaaggcgattgcgtccttctttcaccggcttgcgccagctggggaatgtttgaggactatgaacagaggggaagaatgttcaaggaaatggtcgctcagtaaaaaagcggctgtaaaatttggtttacaggaggtaaagaatggccgactataaaaagaaagacggcaacgtctaccaactgaatagaaaaagatatgacgatattcctgacagaagccgccttaatttaagaaatcttattaatccgcacccgttcagaggaattgactatacagttcttatacttgttcttatactcgtaatgttcggacttgttatggtattttcctcaagctattattatgcgatgacagaacctaagttcaacgataagttctacttttttgcccgtcagctgagatggtctattgtaggtttggttgcaatgataatgtgtatgagcgtaaataccgaatttttcagaagagtttcgggtattgcatacatatttatcatcggaatactgggcgtcgttctggtggttggcgttgcaacaaaaggctcgcagagatggcttgaggttttgggtacgtcttttcagccttctgagtttgcaaagtttataatgattatttttatgagtgattatgtcataaaaaataaaaataagctgaacggaaactttaaatcgtttttgattttttccatacctttgcttttggcgtttatacttattgcaaaagaaaacctgtctacaggtatagtcgtaatggctgtaggatttatgataatgtttgtagccagtaacagagtgggaaactttgtcgtattcggtatgctcggggtgcttggatttattttgcttgtaatcgtagaaccgtacagaatggatcgaataaaaggctggcttgacccttggagcgacccaagcgatacgggataccaggttatacagtcgctttttgcggttgcgtcgggcggtctgtttggcttgggtataggtcagagcaggcagaaaacgtttattcccgaaagctataatgacatcatctttgcaattatttgcgaggaactcggtcttgtaggcgcgatagtagtaatacttctttttgcgcttcttatatggagaggaacaaagatagctatgacggctaaagacaaatacagctcttatatggctacgggtataacgacaatgatagccgtgcaggtaataataaatatttccgttgttaccaactcgataccgaatacaggtatgcctatgccgtttataagctacggtggaacatcgctggtagttatgatggcttctatgggactgttattgaatatatcgagagactgtaagtaaataaagttttaacgtgaagttataaccctgaacatatatgtgtttggggttattgatttattattcaaaaaatattagtatgaatgatatacttatataaaacgcattgttggattttataaaaggagggatcttctaattggaatatattacttattataattcgcccgtaggaaagataacaattgcaggtgaacacgaaaatataaccggactttggatagaagggcagaaatactatgcttctacattaccgaatgcggaagaaaaagaacttcctgtttttaaaattgtaaaacaatggcttgacgattattttaaaggaaaaaattcgagtattaatttttccgttacgcctaaaggaagcgatttcagacgcgacgtatggaacatattaacggaaataccatacggtgaattgacaacatacggaaaaattgcgaaacagcttgagaaaaaatacggaggaaaacgtgtatcggcacagtcggtaggcggagcggtcggacataatcccataagtattataataccgtgccatagggttgtcggttctaacggaagcctaacagggtatgcaggcggtttggataaaaaagtaatgctattgaagttggaaggtgcgccgttggaaggtctttttgtacctaagaaaggaacggcattataaacagaaaacgtacatattattaaaataatttaagaggtattcgtaatgcatataaaaagatataaattttctgaggtttttaactttcgcgatatgggcggactttatgccggaaatggtaaagccgtaaaatggaacatgcttttcagaagcgataaacttaacggagtacttaaagacgagtgggaagtgataaaaaaagcaggagcaaagacgattatagatatgcgctcggaagaggaagttaaaatgtttcccgataactgtccgaaagattttaattatatacactttcctcttgtagaagacaatctttcatttaataatatatcaagtccgtctatgcaggcttttgcggaaagtgtggcggaggggtataagaacatcgttttgtcgcatggagaaaatcttgcggaggttattaatataattgcggactccgttaaagacggcggagtattatttcactgtacgtcgggaaaggacagaacaggggttgtggcgtctgttttatactatatgctcggcgtatcggaagaagacattattgccgattatgaagtcagttatacatacaataagaatagggcagataaatttatgaatgattttcctcaataccgtaagtacagaagcgttgtactttctgaggcggaaacaatgtgtgagcttataaaactgtataaagataaggatattgaaaattaccttatatcaaaaggaatgaaaaaacaaagcttagagtatttgaaagaaatattattggaagactgctgaaaacagcgatacataataaacaaatgatagacatggaggcggttatatgaaaaaaatcagaaaaagcttattattcggtctgacgctgggcataatcacggctttatctgcttgtggcaacggctcaaaaaaatctgctgtaagtatatctgatacggcgaaagaatatgaatttatgtcatataaagaatttaaggaacaaacaggaaatgatgtggagttttaccatgggaatttgtttataggagaaagcacggatttttctgtcagcgtggtttacaacggagaatataacgaggatacgggtgaggtagtattgagtgatgaagctgttcccattcggcttcaaggaacattgggagcgttgatgaacggaataaatgaggaaatgacattagaagagattaccgaaaatctgtcatttgaaaataataagaaagcagacattgagatatcggaaggcggcggtactgcctattatgtaggaaacgattatgtacaaatacggtttgacagcgatgaagacggcgaatacgacagaaaacttttaattgcatatgataaatccgaagtggaaaccgtaggaagcgaaagcgtcgcatggctggaaatcatataactttttgttcgactttcgatttgttttatccgaaacgaaagcccgtaaaatagaatcacagataaaaacaaacccctctgtatgaaattaaacattaatgtagaggggttgttatttgtaaaatatattttcggtttaacaatgttcggcagtatagtatataagtttttccgtatctttccaaccgagacatgcgtctgttatggacttgccgtatatatggtctcctattttgcagtttccttcttcaatataactttcgaccataacgcctttaactacattgtgcaaatctttattctgggttctgttatgcagtatttcagctactattcgcggctgttcataaaactttttgccggagtttgaatggttagcgtcgcatattatacatgggaatttaagatttctctcaatatattcctcggtgagcgacataagatcctcataatggtagtttgcatgagcctttccgtacttatcgacagaacctcttattactgcatgggcataaggatttccgcttgtacttacctcgtgatccctgtaaaggaaagtatgttcatgctgaccggcgtgtatagagtttaacattacggaaaaatcgccgctggtgggatttttcataccgacaggctgatttattccgctcgtaacaagtctgtgctgctgattttcaacagaacgagcgcctattgtaatatatccgagcatatcgtcgacatatacaaggttttcggggtaaagcatctcgtcggcagctgtaagatgagattccgaaagggcgcgtatatgcattttacgcaaagctataattccggcatatatatttgtagctttttccggatcaggctgatggagcattcctttatatccgtcgcctgtagttctgggtttgtttgtatatattctcggaattataaagactttgtcttttacctcttcgtttatttttgccaggcgtgatatgtaatcgcatacggcgtcttcatcgcttgcggaacaaggaccgacaatcaaaataaatttatcggtttttcctgaaattatatctttcagttcagcgtcccttttggcttttatccctgtcagatgacgcggaaaaggcacttcgtccttaacttcatcgggagaagggatattctgttcattgatgaaactcatattaattctgctcctttcttatgttttaaaaatccgtctgcctttaaaagctgattatattttaaggcatggttaatattttactataaatatatttaatattcaataatgacataatattttttcctgtctttaaaataggcgctcaataaatttacttgaatataaaaaagaaccatagtatactataagaagtttatttttgatttttttacgatatttttatatacggaaaagaggaatttatatggctgatgagaaaaaaactatattcagcggaatgcagccttcgggttatgttacgctcggaaactacttgggagctctcagaaactggactaaacttcaggatgagtacaactgcctttactgtatagtcgatatgcacgctataactgtcagacaagaccccgtaaagctgagacagcaggcaagaactcttctcatgcagtatatagccgcaggtcttgacccggaaaagaatattatatactatcagtctcatgtccctcagcatgcggaacttaactgggtattaaactgctatacatatatgggagaattgggaagaatgacccagtttaaggaaaagtcaaaaactcattccgataatattaactcgggactttttacataccctgtattaatggcgtcggatatacttctttatcagacggatcttgttcccgtaggagaagaccagagacaacatcttgaaataacaagagatattgccgcgcgttttaacagcatatacggagacgtatttaaaataccggaggcatatataggaaaagtcggcgcaaggataatgtctcttcaggagcctacaaagaagatgtcaaagtcagacgaaaataaaaacaattccattgctcttcttgacgatcctaacgtgattatgagcaaaataaaaaaagcggttaccgattcggataacgaaataagatacagcgaggataagcccggtgtgagcaacctgctcaacatatactgtgcggtaacggaaaagaaaattgcagaggctgaaagggaattttcatcaagcaactacggtcagtttaaaacggctgtcggagaagctgtggtagcaagccttgaacctatccagcagaaagtaaaagaactggaaaaaaataaggactacattgacagtattataaaaatgaacgcagagaaagctcagagaatagcgcagagaacactttccaaggtacacagaaagataggtttccctgacagaataagataaaaatgacaaaaccgtacttattaaaacaggtacggtttttagcatataaaagaggttgataaaacaaaatttttgtagatataatatttagtgtaaaataccgacctgtcagaagttgccgttaaatctgaaaggtcggtattattgtatttttattttatcagttttattgcgtgcttaaggttttctataactattttttcggcgccctgctcgtattctccgtcaattgtccagtttactgacgatgatgtttctatttctattttttcagccgaaaaaaatcttaccgtttcgttatcatactgcctaagagtacatgagagcgctattttactaagctcaaatggagttgtcggattttttacaagaaatacttccaaaagaccatcgctcaaatcaacatattcgggatcgagcgtaagtattccggcaacagaagttgagttgctgacagcgccgaatataaaatcatcttcgtaaacaatatcgcctgctgtgattttggcatgaataggcttaatagcaggtaactcctttaaactttccatgacgtaggcaaaatgtccgaaagcatttttcagattttgaggagtgtcataagaaacctttgtaaaagctccgaaagaagctatatatgaaaaatatcttccgttaaaacatcctatatcatataaattaggcttaccgtttataatatcttgagcagcttgcataacattttttgatagttttaggctgtttgcaaagtcatttgtactgcctgacggtatatatccgagaggaacgtcgacgccacaggaaagtatacctgttataacttcattaagagttccgtctccgcctatgcacactatcaaatcatagtacgaggcgttgtcagctacatattgagaggcgtctcctgtgcactgggttacatgtatggtacagtcatagccggctttactgaaaagagaaattatatcgattatatacttgttagcctttttttgccctgaacatgggtttaatatcaaaagcagttttttattcataattttaactccctgactagatattgccgcatattataacattatcatcatatatcatacaataatcgaaataatattaaatatttacagcaatgttaaatagtattttattatatcacattttgtgcaaaaaatataatattatttttaaaacagttaataatgttctaacttaggcataatacaaataatttagtaataagaaaaaaactgacggagacatattatgaaaataatgaaaaagctgacggcttctatattggtctttatatcggtatgccgaccgttatatgttaatgcggctcagcatgaaaatataacagatcttggattaaagtcaaagagcgccatacttatggaagcgtctaccggagatattttgtatgagcaaaacagcgatgaaaagcttcctcctgcaagcattacaaaaataatgactcttttgcttatatatgaggctgaaagagatgggaaaataaaatgggatgataaggttactgtaagtcaacatgcggcttctatgggaggttctcaggtttttctggaagaaggagagacgcagacggcagcggatatgacaaaatgtatagcaattgcgtcggcaaatgacgctgccgtagctatggctgaatatataggcggaagtgaagacggatttgtagaacttatgaacagcagagcaaaagaactgggcatggataataccgagtttaaaaatgcctgtgggttggatacggaaggacatattactacggctaaagacatagcgttaatgtcaaaggaactgattaaaaattttcccgatattataaaatatactactacatggcaggacactataaatcatacgacaagaaaaggtacgacggagtttggtcttacaaatacaaataagcttatacgttggtatgacggagcaacgggactgaaaacaggaagtacgggaaacgccaagtattgcctgtcagctacggctgataaaaacggaatggagcttattgcggtaataatggctgctcccgacaacaaatcaagattttctgaagcaataaaattgttggattacggatatgcgaattacgccgttgtatcgggagctaaaaagggcgactcggcaggagaaatacctgtaagcaagggtgagcatgaaacggtgcttttggaagtctcggaagatataaatgctatgattcagaagggtggaagcgaacctgaaattgtatatgaattgacagaaagcctgcaagctccgattgagaagggggtaaaagcaggagaggctgtatatatgttggacggacaggtgattgcaaaagccgatgtcataacttctgaagcagtagaaagggcatctttgcctactgttgcggaaagacttttaaaaagctggtgcagataattacatataaaagagccaaggcgttgaaccttggcttttttgtttttaggaataaaaatgtgtttagcagtcggcttcatacatacggatgtcgtttccatcatcttcttttacatacatcataaagttccagccgcatttttcataaaattccgtatggtctgttattaagtaaagctttttataaccgagcgattttaagtcttttcttgcataatcaagtatatatcgagctatgccgtggtatctgaaatctttttccacatacagagcgcacaaatttggggataaatattttctttcatggaagtcgttttctattatacctgctccggctattattttactgttgtaaagtactatataccatctgggaatttccgtttttttatctatgcaatcatttatgctttcaatataagcttcttttgggatattccattttttgctgaaccattcggcggcagcagctgaatactcggtatattctgctaaatttataaattcaaaattttttgtatcgaaattatttttgttccacaccataaacagttccgcttcgcctgtgctttcatcggttgattttgaaacgattttaaaactttccctttcataaaattttattgcgagtttatttttttcatatacgttaagttccagactgccttttaatttttttacataatcaataagagccttacctatgcccgatgagcggcaaatggtgaatattccgtctatataattatcggtaattccgacaaatccgagtatttccacgttgtctcggtaaacatatatttccgactgcggtatcattttttttacttcgtcaaacatgcttttccagtaggacgattttataaagctgtgggcggaaatgtttgacgcaagccatatttgcataatatcatcgagatattcggttttaaatttttcaatcataatagttgttccttccaaaagtcaaaaaagattgagtatctattaaattttatgcgcggttataatagtgtagcttgttgcgtttatcgttatttttatattattgatttcacaatacagatttttacctttgcgatatatattacaatttttttccgaaattaaatttttacaatattgtacagggtcgatattatggatgtccaaattttttattattctgtcaatacccattttcgtagtatgaactttatcaatattatccaacagtatttcttctttcattttgcgtgtctcccatattttaatgttcctatattttactataagctaaaatcggtatcaactacgatgataaaaaatattagtttaatgttaaattaagaacgttgttgaaatctttactaaaatacttatttctgatacaataattatttaatacagaatatttatatatcggaggtgctttatgaatcaattgattgtatttttattggggatacccgcaataatgatagctacaacaatacacgagtttacaagagccgctgtttcatcctcactgggagacaaactgccgagggagcagggaaggcttacaataaatccgctcaagcattttgagcctataggaatgatacttatgttggcatgcggattcggctggggacttcctgtaaataccagcgctctttattataaggacagaaaaaaaggagtacttattactgccgtggcgcctacaatcgcaaaccttatatttgcttttgtattcgcttttgccggatggtttacgtcaaatatatattttctgtcaatattgtttgtaaaaacagcgtattattgttgctgccttgttatttacaatcttatacctgtagcgcccatggattgcctgaaagtgctttcttccgttcttccggcgaacagctattataaactgattcagtatgagaaagttatacagatgggatttttattccttcttttcctcggtctcggcaatttcttcggaagaataatagatatgctttatatggcaataacatcgatattcttttaaggcggtgtcccatgaataatatgactgtcagactggacagcttttccggaccgttggatctgctgtatcacttaatagagaaaaacgaaatagatatatatgatatacctatagctgaactgacggaacaatatatggagtttatcagccgtgaagaaaacaaaaatatggacggtatgagcgaatttatcgttatggctgccgaccttatagaaataaaaagccgtatgcttctgccgaaagtacaatctgaagaacctgaagaagacccaagggatgaacttgtacagaaactgttggagtacaagaaatttaaaggcgttacggaaacatttcagcgcatggaagagaatgcttcaaagatttttttcagagaacccgatataattataccgcagctttctaaaagagaagaaccgaccgttgaggaatgtctgcacggtcttactatggaagatttatataatgcgttcagggaagttatgctgcgaagggaaaagaaaatcgaccgtgtaagaagcggttttaaatcggtaaaaagagataattttacggttgatgaaaaaatatccagccttagaagtattcttaggataaaccccaaaataaaattttatgatatgtttacggactcttcgacaaaagaggaagtattggttacgtttttggcgcttttggaattgataaggcatcacagcgttttagtggaacaggagcaggttttcggggaaattatgatatatgccggagataacctggacggcgatgaaagcggtgaagaatatgaaaatgaatgagtatgaggcagtcatagaggctgccctttttgtggcaggagaggaagtttcgttaactgctttggctgacatgatagaaatggataaggcgacgacaaaagcgatagtaaatacgctgattgccaggtattccgatgaaaacagaggcatgagaataatagagataggcgaaggctatcaaatgtgcacgtctccctcatgctttgagaccataagaaaaatatataaggtacgggaaaaacacggactgtctccaacacttcttgaaacattggctataatagcgtataaacagcctgttacaaaggcggagatagaggaaataagaggagtaaacagcgaccatgccgtaaaccgactcgttgaaaaaggtctggtatgcgaaacaggaaaaaaggacgttcccggaaagcccatattgtttggaacaactacggaatttcttcgttatttcggatttaaaggaatggatgatttacccgaactggaagaaactgaaaacgagcctttacaggaggaataaaatggagcgtattaccgttaaatcagaaaacggatatgaactttccgagggtgtttcattggaaaaagtaattgaaaaactagcggcgtttgagaacatgtacgaggcgcttctgacggacatagataagacggttttatccgctgacaggttgaaaaatatgcaaaaaacaaagacggcaacatacagacagttgtttgcagaaaagcttaagctgaacgaaatgaaaaacaggattgatttttggttttgacaatatacgccgttatattttggactatgcaaaatataatagacaagagggggcgtagctgtgaaaatatttagaaaaataatttcggtttcaattttgataacgataatttttactttaaatgtaaaagcggaagaaatgaaagcacccgatgtaaaggcgttgggtgctgttttaatggatgaaaaaagcggacgtgtcttatgggaaaagaatgcttttgaaccgttagcgaatgcaagcacaaccaaaataatgacttgtatactggcaattgaaagcggaaaacttgatgaaacggttactgcttctaaaaatgctgcggtgcagccgaaaaccaaaatgggactttcggtcggtgaacagataaaattgaaagacttattgtatgctcttatgctgcaatcatcgaatgacgcggcagttgccatagccgagcatatttccggaagcgttgatgatttttgcagccttatgaatgagaaagcgcaggatataggagccgtagatacaaattttgagactcccaacggtctggataaaggagaacaccattcaacggcgtacgatatggctgtaattacctgctatgccctcaaaaatgaaacgtttactgatattataaatacaagacaagtaaatataaaaagcgatagacggacatataccgtaatcaataaaaacaggcttttaaatgaatatgacggagctataggcgttaaaacaggttttacgggaaaagccggcaattgttttgtaggagcggcagaacgggacgggatgaagcttgtgtccgtagtgttgggaagcggatggggaaaagtaggaaaagaaagaaaatggattgatacaaaaaacattcttaactatggatttgataactataagtattatgatttatgcatatcgggagactatattgccgacattccggtaaaaaattcatataataagagagtaggggtaagcgtttcaaagggaataacaataccgctcaactatgatgaaaaagaaaacataaaggcggaaatacagcttccgaacacgatagacgcgccggttgtaaaaggagacgaaataggaagcataatttttaaagtcaatgaagaaacagtactggtggaatgtaaattgacggctgatgataacgttgaaaaaaaagatgtgaaaacaacggcgtcaatgcttataaaatactggattaatccattgaaatcagatatactaaaaaatagcgtacatacttaaatttaatatttgtttgtaactaaggagaagaatatggaaagactgcaaaagtatatggcggactgcggagttgcctccagaagaaaggcggaggagcttataaaacagggacttgtttccgtaaacggcgaaacagttacggaactgggtgtaaaggtagaccctgcgaaagataaagttttatataaaggaaaagtcatatctccggaaaagaaaaaagtatatattatgcttaataaacccgagggatatgttacaacggcaaaggatcagttcggaagacccacggtgctggacttggtgaaaaatgttaaggaaagacttgtacctgtcggaagactggactacgacacgtccggtcttttgatattgacaaacgacggagacatcgtatataagcttactcatccgaagaacgaaataaaaaaagtatatgaggcaaagcttttcggagtgcccgacagcaatacaataaaactgtttaaaaacggaattacaatagacggaaaaaagacgcatcctgccaaaatagaacttctgaaagtcgacggacgcttttcatggtgcaatattaccatacatgagggaagaaacagacaggtaagaaaaatgtgtcaggcggcaagacaccctgtagcctcgctcagaagaattgcggaaggcgatataaccctcggaaatctgaaaaagggcgagtggagataccttaccgataaggaaatacgttatcttaaggagttataaaatgcttagattatatatgatgcgccatggagaaaccgtttggaatacggaaagacggtatcagggaatgactgatatagaattatcgcaaacgggaataaaacaggcggaatgtgctgcaaagcgttttgaaaatatagaaatagataaaatatactgttctccgctgaaaagggcaatggctacggcaaaaccgatagcggaggctaagaaacttgatattataccggaagaaaatttcagagaaatacatttcggcgaatgggagggaatgacagttcccgagcttaaggcaaaatacggcgatacgtatatgaattttataaaaaatccacatctctatgatttcccgggagaaggtaatataagtaatgttataaacagactgaaaccttcgctggacagaattatagagaacgaatcgggaaacatccttatagtttcacacggcggtataataagacttatgataatgtacataatgggactggataacagctggttcacaaaaatgtggataaataatacggctatatccattgttgaaataaaggatgacagacggctgatgcttaccgtaaacgacagcgcgcatctttctgatataggacaaaacgagagcaattttttaaaaccgtaaaagcgggggatataatatgaacgtaactgtaataggagcaggagctgccggaatgattgctgccggaagagccgccgaaaaaggacatgttgttgacatatacgaaaaaaacaatatggcaggaaaaaaattgaggataacgggaaagggaaggtgtaatataacaaacgcctccgaacccgacgaacatatagaaaatacaccgggaaatccatactttatgtactcggcgctttataagtttcagccgtcggatacagtcggactcattgaaaaaatgggggtattaacaaaggtcgaaaggggaaaaagagtttttcccgtaagcgataaagcggcggacgttgtcgacgctttagtaagatatatgaaaaaaaacggtgtaaggctgcattttgacaaggctgtcaaagatataataattgaagacggaaagacctgcggaatagttttgaacgacggaagcagagttttatccgacgccgttattgtagctacgggaggattgagttatccttctacaggctcgacaggcgacggatatagatttgcaaaaaaggcagggcatacggtaactccgctgctgccgtcccttgttcctctgaaatcggattcgccgttttgcggtgaacttatgggattaagtttgaaaaataccgcaatagtaataaaaaacggaaaaggcaaaacaatatataaggacttcggagaaatgctgtttactcatttcggagtttcggggccgatgatactttccgccagcagacatctacttaatagatttgatgaagatatgaccgcttatatagatatgaagccggctcttgatatgaaagagttggacatgcgtatattgagagattttgagaaatatataaataaagacatgaagaatgctctcaacgacctgcttccccagaaaatgatacccgtaattataaaactcagcggtattgacgagaacaaaaaagtacatgatataactaaggaagaaagaaaaagaatatgttctttaataaaatctctccctgtacaccttacgggaacagcgggatttaatgaggcggtcgttacaagcggcggagtaaatacggatgaaatagacccgtctactatggaaagcaagttgattaagggattatattttgcgggagaggtgcttgatgttgacgcatatacaggcggatttaatttgcagatagcgttttcgacgggatattccgctgccgacggattggaggaaagagaatgattacagctgtaagaggagccactacggtggaaatgaacgacaaagaaatgatctatgaagcttcggctgaaatgatgaaagaaataatagagagaaataatatagacaaggacgatatagtttccatagtttttactgccacttctgacttggataaagcgtacccggctgttgcggtaaggcaaatgggaattacggaagcagctctgatgtgcgttcaggaaatgaacgtggaaagcagtctgaggaaatgtataagggtcatggttacacttgaaggcaactatgacagaaagaatattaatcacgcctatcttagaggcgcggtaggtttaagacctgatttaaaaaaataagacggggtgtaaatatgaaaatatattcaatagctatcgacggacctgccggaagcggaaaaagtactgttgctaaaattttatcggaaaaactcggaattgtatatgttgatacgggcgcaatgtaccgtaccgcagcctattattgtatgacaaacggcatagatacaaaagacggcaatgccgttgcagccgccatggaaaaaatcaatatggatataaaaacagtagacggtgtacaacacatgatattaaacggagaggacgtaactgcgttcataaggacggcggaggtaggtcagggagcgtctgatgtcggaacctttgtgcctgtcagagataagcttgttgagatgcagcagaaaatagctgaaaaaatatccgtagttatggacggacgcgatataggaactgttgtacttcccaatgccgaggttaaaatatatctcaacgccgacgttactgaaagggcaaaacgcagacttaaggattttgaattgcagggcagaaaagaaactctcgatgaagtaatcgagcagataaagcaaagagaccataacgatatgacaagggactataatcctcttagaaaagctgagtcggcggtagaaatcgatactacaggaatgactgccgatgaagcggcggctttgatatcgaaaattgtatatgaaaaaacgggtgaacgataatggaaataataacggctaagtcagccggcttctgctttggggtaaacagagcgatagaagcctgctataacgagatagaaaaaggcggcaggatagttacatacggaccgcttatacataacaaaaacgtgaacaaagatttggaaaacaaaggagtaaaatctgtagacactcttgacggatgtgaaggcgcaaccgttataatacgttcccacggcgtaggcaaagctgtgtatgatgagcttgaaagacgaaatattcattatgtggacggaacatgcccttttgtaaaaaaaatacacaatattgtaagaaaaaaacgtgatgaaggatatgaaataattataataggggacggaaaacaccccgaggttataggaataaacggttggtgcgacaattcggcgattacggttgacaatgtggacgacgcacaaaagcttatacttgacgatgagaaaaaatatgccgttgttgtacagacaactttcagggaaagcaagtattatgatattttaaaaatcctgaaagaaaaaagtaaaaaaataactgaggaaaatacgatatgttcggcaactgaggaaagacagacggaagctgtaaaaatatcccaaaacgtcgataaaatgttggttataggagataaaggcagctctaatacacaaaaactttatgaaatatgcagaaaaaattgccgaaacacatattatattgaaacaattgaagatttggtgttgaataattgcaaatttaatgataaaattggaataactgcaggagcgtctacgccccctgcaataataaaggaggttattactactatgagcgaaatggacggagtcaaaaatactatggaaggtgaagagcttacatttgagcagatgcttaacgattcatttgtaactttacatacaggagatgttgttaaaggtacagttatttctacagccggcgaagaggtttccgtaaaccttggatacaagtcagacggtatcatccccagaggagaattcagcagcgacgcaagcgttgttcccagcaaggttgtacagcccggagatgaaatagaagtttttgttgtacgcgttaacgacggagacggaaacgtacttctttctaagaagaaagtagaatctcagaagggtatggaagaaatcgaaaaggcttttgaagaaaaagcaactgtaacaggtaaggttgtaaaaattgttaagggcggtctgattgctgttgctaacggaatccaggtatttataccttcatcacaggttgcaggaagatttgtagaagacctcagcgtttatgacggaacagaactcacatttaatattattgagcttgacagagctaaacaccgtataatcggcggcagaaaggctcttcttgcgaaagaggctgaagaaaagaaagcagctgtattcgcaacacttgaagcaggtaaaaaagtaactggtacagtatcaagaattactgactttggtgcgtttgttgatctcggcggcgttgacggacttatccacatttctgaaatgagctggggaagaatttcaaatcctaaggaagtactttcagaaggagatactgtagaggttgttgttcttgatgtagataaagaaaagagcaaaatttctctttcacttaaagacgtaactcccaacccttggacaatggcagctgaaaaatatgttgtaggctcagttgtagaaggaaaggttgttcgtatggtacctttcggagcatttatcgaacttgaacccggtgttgacggacttgttcatatttctcagattgccaacaaacgtgttgaaaaacccgaagatgaacttaagatcggtgaaacaatcaaagtaaaggttattgatgtaaacgcagaacagaagaagatcagcctttctaaaaaggaagctgaagctcctgtagaagaagcaacagaagaataattacggattttaaaatcgtattacttaaaaataaaaaaagaattctctgaaaattcaggggattcttttttatattatgaaattaccgaattgtcagcatatttaagaatcattaaattgattgaaaatattttgcgggttatttaaaagaaaatttataaagagaatttattagtctggcgccggtacaaaaacctactttgaagatagcaatagatgacacagaggatattgagtcgcttttttccaacagtttgttaaacataataagttgttctttagaaagacttgctcgtaaatcattacataaagacatatattcaagggattttgttttgaaatccggtgaaattttattgatgtccgtttcccatggagagattttcccatagtatagatcttcaagaaaatctgacataatatcgcctcctcagacgttttgcggttaggtgaaaactattcttttattaaatgttatcatacattcgacatttggtcaataattgtcatgtttgttcgatttaatacagatataacaaaaaatacgttctatatataaaatgataaacaaatcagtactccattatataacagtagtgattaaaaaatacaattaataaatattacaagtaaatgtaggggtaattacaaggtatatacttatttcttacaatatatttaagcatatagcaaatggcatatctatagtttataattcttttataaaatataaagtgagggatatgtatgataatatcgacaacggaaaatataggaaagaactatgaggttatcggcattgttaaaggaactacagtaaattcaagacatataggaaaagatataggggcaagttttaaaactattgtaggcggagaaataaaaggttatacggaaatgatagaggaggctcaaaaaatagcaacggaacgaatggtatccgatgcggaacgaatgaatgcggacgcaattgtaggcgtaagactttctacaagctctgtcatgcagtcggcttcggaaattacagcatacggaacggcagtaaaatttataaaaacagaggatggaaaatgaaaataaaacgttttatgattttaggtgtggcagttgccatgatagctgtcggagttgcaaacggcggattcagggacacgttaaacaaaggtataagggtatgtttggagtgtgttggaattggctaaaggttttaagagaagatacatacagcttataagcgctcttgtttataatgcaaatctgaagggttttgcagacggcagcttatactatggaaatattaaagggatatgcgttcccggactgaactgctattcatgtcccggagcagtagcctcatgtcccctcggaagcctgcaaaacgcagttgctgtatccggtaaaagattgccgttttatataatcggaacattgttgcttttcggtgttattttaggaagggttatatgcggatttttatgtcctttcggattaatacaggaactgctttataaaataccgactcctaaattgaaaaaaagtaaggctacgatgtggctgtcaaaattgaagtattttatattagccgtttttgtaataattattccgttgatgtttgcatatccgggtttttgcaaatatatatgtcctgtcggaacattggaggcaggaatacctttagcggcgaccgatgaaagcattgccgccatgctcggagctatatttaattggaaagttgccgttttaattacagttgtattaggagttatatttgcttacagaggattttgcagatttatatgtccgttgggagctatatattcattttttaataaaatatcaattttaggtataaaggttgataatgaaaagtgtacaaattgcggaaaatgtgttgcagtatgcaaaatggatataaagaaaccgggagactttgagtgtatatcgtgcggcgagtgcatagacaagtgcggtgaaggtgcaatctgttggaaaaataaaagggagaaataaactatgagaaagaagatgttaattttactgtcggcatgcctgctgacgactgcctgctctcctaaaatgagcggtgagaaaatagaaagcaaagatataagtgagtatgaaccgtctgaaacaaccgaagatacagagtatgctgcactcggagaaattgcccccgatattgttgtaacagaccttgaaggaaataacaagcagttatccgaatatttcggaaagcctacgataatggttttttgggcaacatggtgcggatactgtaaggatgaacttccggcattggaaatgttaaaggaaaagtacggcgacagcattaatgtattggcgttaaacggaggcgacagcgcagaagatataaaagattttatggaagaaaataactatacttttgagactgttatggtaggaatagaggaaagcataaaatttgacgcacagagtataccggttacggcaatacttgattctgaaggaacgatagagttctttacgaggggcagtttagatgctgaaactatgttcaatgaatattttgttcctactatagatgaaatatttgaaaaagacggggctgaaaatacagaaaatgcttaatgcggcggttttattaggggataatcattttacgaggaagtgatacccttgaaattaagaaagatatatattgttttttgtttatcggctatgataggtatgtttattattttaaaattaaacggctatgagttgaattttatttttaaatcagaagcgataacagcggttttatctgtagcttttttcatagtatatgaaaaatctgttgaaaaagcgcttattgataaaataaacaggctcaaaccgattcttaatgaggaaagaaatcccgataaatatattctggaaagtgaaaagctgcttgatgaggttaaaacagaaaatgaaagggcaatagttctaataaatatatcgaacgcatactgcgacaagcatgaatataagacagcggctgaaaagctaatggaaatagattgcgatagactttcggataattatgaagtaatgtgcagtttgtatagggcgtatgtatttttctatttgggagactacgcaagtgcactttatattatgacaaagtatgagcggaaatttaacaagttgagaaataatatagaattggagccgtttatagctgttcttaatatattcaggtttatagccgaaggaaatcttgaaaaagccaatgaagttttgtttatagcagagcagaggtgggacgcagacggagagaactgggatttaaagcaccttaaaagactgataaataaacctaaaagagaattttaaacgatgaaccattagacggttcattacttttggcaataataataaataaacggacaggatattaattctgtccgtttttgcatgtaatataaaattatatttagtgatgatttataaatcttccagctcgttaagccatacggtattaactgcgtcggaaggcatacgccaatcgcctctgggcgaaagacttattgagccgactttaggaccatcgggaagacatgaacgtttgaactgctgagtaaagaagcgtttataaaagtttttaagccattttaatattgtatttccatcatatatgccgtcaaaagcattaagagcgagatagtaaatttttttaggcgaaaaaccatatcttaccgcataataaataaagaagtcatgaagttcgtatggacctacaatttcctcggttttctggtttatattgtcgttgccgtcaggaggaagaagttccggagaaacgggcgtatcaagtatatctttcaatatggacgatacgtcgcagccgaggaacgatgagtctgctatccagcttacaaggacttttacaagcgttttaggtacgcctgagtttacaccgtacattgacatatggtctccattatatgttgcccagccgagggcaagttccgacaaatctcctgttcccacaacaaggccgttttctttatttgccaaatccataagtatttgggtacgttctcttgcctgcgtattttcgtatgttatatcatgaacatcgggatcgtggcctatatttttgaagtgcagaagtgcggcttcggcgataggtatttcacggattctgataccgagagttttcatgagagaaactgcattgttatatgttcggtcagttgttccgaaacccggcatagtaacgcctaaaacggtttttctgtcaatgccgagataatcacacgctctgacagccgccagaagtgcgagagtagagtcaagaccgccggatattccgataactagagaagaagcttttgtgtgctgcaatcttctggcaagtcccgatacctggatgttaaatatgttttcacacctgtgttctgccatatcgttgccatgtggaataaacgggtaaggatttatatgacgttccagattatttttatttttttcatacatagggaaagatactatttccggagcgggggagtattcatctccgtagctcatgttttttcgcctgtcatttgccaataattctgtatctatgtcagaaattatcatttcgctttcgatggaaaagagctttccttcgtttaaaacggaacctttttcacatattattgaatgaccgctgaaaaccatatcttgagttgattctccgactcccgatgatgagtaaatatatccgcatatacatctggaagactggttggatacaagagagcggcggtgctcgtttttggaagcaagctcgttacttgcagaagtatttgctataataagcgcgcctgaaagagtaagagaacagctgggcggaatatttgcccaaaggtcttcgcatacctctataccgaaagtaaagttttcgatgccttccgcagcgaaaataagatttgtgccgattggtatgctttgtccgcagagcacaatatttccgtttatgcctcgaccgcttctgaaccagcgtttttcatagtattcagagtaattcggtataaagattttaggtacggctccgagaatacaacccttgtaaacggcaacggagcagttgtaaagactgttacctatatttacgggaagaccaacaacaacaaccgtatctttatcttttgtttcttcggcaatagcctcgagtcctttttctgcggctgtcagaagagatgtctgcaaaaacaaatccgagcatgtgtagccggttatgcaaagttccggaaaaacgagtaaatctacatctttatttgacgccgtttctatcatggcgataatttctttgacattataaacgcagtcggcaactttcattttgggtacggcggctgcgcatcttacaaaaccatacatagttatttctcctttgcgacttattaattaaattatcggtttttgaaagtaaattgtcaagggcataaataatactttaagcagggatatataacagctttagaaaaaagcgttaatcaaaaatattttgaaaataagatgtttaaaaattgttgtttttataagtgaaaacatttaaaaaaacctgaatatgacattattatgtacatactcaggttatttgaaaattttttagatttattgtcttatcagcatggaaaacagcagaaccggcagaacaggtttgcaagacaaatgtcaaggcatatattgctcgttccgcatactataggagagccgcctccgtactgttgataagttgctccgcctgatttcattcggttaaggaattgctgatattccgcattattcggttcaagctttacagcctgctccgcatcgttcatagcctgtattttatttcccagtccgtatgcggcacacgcatggaaataataccatcttgcgcctcttgcgcttatatcgactgaatccagaacgttcattgcttctctgtaatgtcctgaatttatatagtttctagctgcggtaagttccgttgtggcttcctgatagttttgattaaatccgccgaagccgccgaacatgtcctcccatgagaagccgccgtaatatccgccgcctgcattttgaccggctccgctatatcctccggttgccttaccttctcttatattccttatctgatcataggctgcgtttatttcacgcatttttctttctgcgttttcatcaccaggatttacgtcggggtgatattttttgaccaattttctatatgctttttgtatttcatcatccgacgccgacggagaaaccccgagcaccttatatggatcttctgtcattttggaatttcctctctgcattgttcatgtacgtaattttcagtaaacatgatatattataaaccaaccgtatatgttttgcaaagacaaaagcatataaattaagggatttttaaggctgattatcattttttaatgtagttttatcatcagagtgcgttttatatttctgccatacaccggaatagagtatatttctgataatattttcattctttttaaagggcagggacagcatagcctgcgagcagtcggcaatgagcattgttaatattgaacctatatttgacgtgtctatagatgtcagaggattatatctctctttctttatgtcttcgctcaaatcgtcccaggcgtccagaatgtaaataaatcttccgaggtttgcggcagccataccgagaatttccgtattctcatcgtcatataccgtaaacagcgcggaaagaagtcttccgaatatatctgccggaatatcgggcgataatatgccttttttttcgacttccgcaagttgggaaagacagctttctataactgaacattgacgcggatacttttcaagtattttattatacttatttttgaaat

SEQ ID NO: 2506 - DNA, 1822 bp, Unknown
  16S sequences of unknown bacteria
cgtaatccctggcgccgaaatagcggctcacattgcccgaaacaaaaattgccgtggaaagtccgtcggcataaaagccgtttttgcacacaaccgtcaccgacgaaagcccgctttccgctgggtaaccggtttttgggttgagaatatgatgatattttttaccgtcctgctcgaaaaagcgctgatagtcgccggatgtgacaaaggcgaagctgccgtttctttcgatggttttgaccgaattgtttctgttttcggggtcggtgaccgccaccttccacgcctttcccgaggggttttgaccgaaagtgagaacgtttcccccgagggaaacaaccgctccctcgggattttgctctttaagtatttcgaaaagacgatcggtggcataaccctttgccaccgcgccgagatcaagctttgtgtcggccgattttttaagtgtgccgccctcaaggcttattttttcatatcccacagtttcaagcgcggccgaaatttccttatccgaaggcagtcggtattcgcctcccgaaaagccccaaagcttggtcagcgctcctaccgtaatgtcaaagtctccgtcggtggcgcgcgacagctcaagggatttttctataatatcggcaagctcgtcggaaagcttgcactcgctttggctgtttataaagcttatttcgctttcctcgttttccgccgaaagcaaagagtcgagcctttttatttcatcgatacatttctcggccgttttctcggaattttcaccgtataccgtaaaggtcatataggtgtccatcgcaaacaaggtcttttcggtcttttgcacctcttttttgcaggaacaaaggcaaagcaaaatacacacaaccgttaaaaaagcggtcagcttacgaaacttcatattacaatgccgcctcccgccgaaatgatttgccccgtcacaaaggagctttgctcggaacagagatagtatataaggtcggcgacctcggagggctttccgattctgcaaagaggggtttcctcctcaagagtcgcaacatccccgtcggtgagatttgaattcatttcggtatctatcaccccggggcagacgcagttgacccttatgccgcttggcccaagctcctttgcgagagccttcgtaagcccgataaccgccgcctttgtcgccgaatataccgcctcgcaggaaccgcccgtttgcccccacatggaggaaacggtgactatacttccacgtttttgtcttatcatatgttttgcggcaagctttaaggtcagaaaggttcccttaaagttcacaccgcatatgccgtcgaattgttcctcggttatgtcggtaaaaagcgaaatttgggatattcccgcgtttgaaaccacgcagtcgaccgctccgtatttatcgattacaaaatcaaagaacgccgacagttcgctttcttttgaaacgtcggcacgaaaggccgtgacgtttttataggcagtttccagctcttttgcttttgattcgctgtttttatagcaaaaggcggtgttgtatccgtttttggcaaacagctccaccgtcgcgcggccgattcctctcgagccgcctgttattattacggttttattcataccttcaccccgtttttcttattttacacaaccgtcggtattttttcaatatataatttttgcactaaatcaccgggatgtttgttacaattttgtcacattttattgattattcgaggggattgtgatataattcgcatgagtatgaataattaggagtgaaaatatgtctgaatactcccttgcggtggacatcggc

SEQ ID NO: 2507 - DNA, 32759 bp, Unknown
  16S sequences of unknown bacteria
ccggggaatcggctctgagcaggaaggttatcgccctgtccttattattcagaacgatactggaaacaagcacagccccacggttattgtggcggccatatccagcaaagtgtatgccaaggccaagctgcccacccattaccttctcaaagcaaagaacggcctggagctgccttctctggtgctgatggagcagctccgcaccattgacaaaaggcggctggaaacgtacatcggacatctggaggaaccgcatatccgccggctcaaccgcgccctggctgtcagcgtgggattgattgaagaaacgccgaaaaatttaatcatgtgcctttgtccggcctgtgccaataacttctacggcacaggctcttattatttgcgccgggtccaccctggccgggtggaaaaggagatctgcacctactgcggccagcggcccggttttgattatgaagtgataaaaagaaaacaggaggctgaaaaatgaccatagacagcgcatatcagcttatgttttcggaatatcccgatatagttacggttccgcaaatgtgtaaaatgcttggaggaatcagtctaaagaccggataccggcttcttaaaaaaggcgagatcgagtcgttctctatcgggcgaatctaccgtattcccaaaatcagcattctccaatatttggggttgaacgaagaatccaatgcgtaaaacctcgtcacacatttgccgtgtttagaaactcttgctacaataaaagggtcaacggcagatgaattgcgctgcaccaccaaaggaggttttattttatggttgcaggacatctgcgtgaaaaaagaggatactatcatatcgtcctcagttatacagacgaaaacggaaagcgtcaaacgccttccaaatccacagggctacccgtcaagggcaataaaaagcgtgccgaagccatgcttcaagaggcgcgccgcacgatggaggctgaattacagctccgtcagatggaaagggaaaaaggatacaccgacaaccctgcggacattctttttacccggttcctactggattggctggaaatgatgaaggccagcgtggaaatcaccacttatgcggcttattcatccggtatcaagaatcggattgtcccttattttgaggaacaccatccagggcttcggctgaggcaggttacgcctaagcagttgcaggactactacacttacgaaatgaaggtaaagggagtgtcggccaatacggtgatccaccgccatgccaacatccgaaaggccctgcaatatgcgtttaagacggggcttctgtcgagcaatccggcggatcgaattgaacgccccaaaaagcagaaatttgtaggcagcatttacgatgagcatgagctggaaaagctattccagatcgtgcgcggcgatccgattgaactgggcgtcatactggcggctttctacgggttgcgtcggagcgaagtcgtgggtttgaaatgggacgctattgactttaagaaaaagaccatcaccatccgccataccgtgacccaggtgacgctcaacgggaaaagtacgatcattgaaaaggaccgtaccaaaaccaagtccagctaccgcacgttgccgctggttccaccctttgaggaattgctgcaccggttaaaactccaacaggagcaaaaccgaaagctctgcggcaagtcttacaacaccgaagccgaaggatatatctatgtcaatgaaattggcgaacttgtgaagccgggttatatcacacagcactttccgctgattttagagaagtatggcctacgaaaaatacgattccacgatctccgtcatagctgcgcgagtttgctgtatgcaaacggggtcagcttgaaagaaatccaggaatggctgggtcacagcgatatttctacgacctctaatatctatactcatttggatttcaattccaaagtggcgtctgccaacgcgatcatgggggtatatcctacggtggtccatgactgaaatggacctccaaatttgcctcaaaacaggaggtccattgtcaaaaaagcctgattttgctgatgtgcatggagaagaatccaatgcgccaagcaaaaaagaaagcccgcaaacccttgattttactgggtttgcgagccattgaattctggtgccggtggtgggactcgaacccacacacccttgcggataacagattttgagtctgtctcgtctgccaattccgacacaccggcatttatatttttaagtcttaccccggatggagcctctgagaaatcggaggtccatcgtggggggacattaaaaatcacttacatattgaattgtcaaatttccttgaaaaatcaagggcttcagccgaagtggtaacaacagacgaatgggattttgagtccgtcacgtctgccaattccatcacgccggcacgtattgggtattataccatacttccgtggaggaggcaataccccggccggggtttttgcggggcggttttctccggctgcgccgctcatccgtcctgccgccgcttttccatcacgaagttcgtcatccgcacgccgtggcgctccacccgctgctcccggatcacgcggtacgccctggcctcaaaaaacggccgggccgtgatggaggcgtgggtggtgatcacgggcgcgtccaccgcccgctccagccggcccagcagcgccgtggcgatgccctgcccctgacggtccctgtgcacgtacagccggtcgagatagcccgtgccgtcgatatccccgaagcccacgataaggccctcgccctccaccgccaccagcgaatggtgcgccagcagggaccggttccagcggtcccggtccggcgcgccatcggcccaggcgtccagctgctccggggaatagtcggcggcgttcaccgcgtgcaccgtatcataaaacagcgccgtgatctgcgcaaggtctcccggctcatacctgcggatcttcatgcggtgcctcctctttcggggcgcgcgggcgcgcggctttcccccggcccgccggcagcgggggcaggaccttcacgcgcttgaagcgcttgagttttctgcgcacgtattcctccgccggcggcagatccgccagcgggcagcgcatagccagcacctgccagtaccggggatgaaaaaacaaaaccgtcgctccctcgcgccacacgcgtacccggcggatgctctcccagggcagcgtcacgcgcttaaccagcgtgagcccctccagcggcgggcggtcatccccggccgcgagccgctccacgatctccggggtggtgaagcgcgcgtagagccgcagcgcgccgcagccctccggcacgtagacgcgggcatggaccccctgccggtccagaacgaaatgcacgcgctccgggccgcgcagcagcatcagcgccagcagcgccgccagcatcccggcgagcaggcccagcatcacccacaggaagccctgccgcagcagcgccgtcacacccgccgccccggtggccgaggcctcggccgccagcacggccgccagcgccaccagccacgccggcagcgccacgcgcagcacatcgttccaggaaaaccagtccgtcacggggtttcggatgatcccgaaggacagctgctccccggttttggggagccttcccccacagtaggggcagctttcgcccaagggcgtttccgtgcggcatttgcggcaataattgaccagcggcatgggccacgacctttccgttttttgggacgcatgcccgcttgcctgacgggcatgcttattaatgaggtgatcgcaatatggatatttaccccactctgcgggacttgatcgaaaacgaccccgccagccggcagctctttgaccgcctgccgcccgacgcgcaggtagcgctgcaggagcagcggcaggagatctgcacctatgcggacctggagcgcgcggccgcaagttttgagcgccgcgggcgcggctggtaggcaatttggcggccggcagctcataggctgtagggacatcaccccgaaaggagaacctctatggccgaacaaaacggtaccaacacaggcaaatgcgccgaggagtacgtcgtcaagcggggcgacagcttctacctgatcgcgcacaagctgggcgtacccctgcgcgacctgctggccgccaaccgcgacattcaccccgcccgcctgatggtgggcgacgtgctgtgcgtgccccgcgaggaggacgattccccgcaggcgggcgggctgggcggctccggcacgacccagaccacgcaagccaccggcacggctccgtccaccggcacaacccagacaacccaggccaccggcacgactccgtccaccggcatggcccagaccacgcaagccaccggcacggctccgtccaccggcacaacccagaccacccaggccaccggcacggctccgtccaccggcatgacccagaccacccaggccaccggcacggctccgtccaccggcatgacccagaccacgcaaaccaccggcgcgacccaggccaccggcacgacccagaccacgcaggtcacgggcacagttcaggctaccggcacaacccaggccacgggcgcgacccaggctaccggcacgacccaggccgtccagccgacctgcatgaccggccagatcgccccggataccaccctttcctgcaccgaggacgaacagtggaccgtgcagaaggggcagaccgtatccgacctgcagctgcgcgggctggtgagccgccacacactggagacggccaaccccggcgtggacttcgaaaatctgcgcgtgggccagagcgtgtgcatccccaaggacaacgtgccctgcgagctgccggaaacctatacgctggccgccaccgaaacgctggaggccgtggccatgcgcttcaacctgcccgtggccagcctgctgcgcgccaatccgtgcctggccccgcaggactttgaagggggcgtcacggtcattctgccaaggtaaacgctcacccggcctcgcggatgaggcgggccaccagctgctcgatatgctgccgggcggcctgcgcggagagcagctcgtcctccggggcgggcggctcgtcgcccatgaggcccacgaactggctcaccttcaggcccagcgcgtcctgcatgtcctgatcgcttccgccctgagacaccagataatagcacaggatggagtccgtctgacccatgcggtgggcgcggtcctccgcctggctgtgcacggcgggcgaccagtccagctcgccaaagaccacgcagctggcgcgctgcaggttcagacccgccgccgcgcgcagcgacaggcagcacaaatcggtacgccccgccatgaagcgctccaccgagtgctccttcatggcgggcgtttcgcgtccggtgatgaaggccggcgaatacgccttaagctcctttttgtacaggtccatcacctgatgatgatgggcgaagagcagcacccgctcgcccgcgtccaaaagcgcgcgcacgaactgcgccacatagggcgccttggccatgccggtggcctgccgctcgccgctctccaccgccatcttccaaagggcgcgctgggagggggcggccgcctcgtcgtttttcagccgggcgagcgtcgcgcgcacgggctccatcaggcggcgatacaccgcgtcgtcgctttccacgggcatgaccagccggcgcttgggcggcagctccgtgagcacgtcgcgcttggtgcgcctgagcatgaggccctcctcacgcagcttttcgcccagcagctccggcttggccacgatctgattgccgtagccgtagcaccattcgcgcgtgaagctctcataatcgcccagaaaatgaaagtccagtatgttgacgacgttccagatctccgcgccgcggttgtagatgggcgtgccgctgaggcccaccacgcggcgggccgccccggccaggaggcttgcggcggagtatttctcggtgccgctgttgcgcagctcctgaatttcgtcaaagatcacggtggggatggcgcattcgggcagcgcctccttccagccgcgcagcagcaggtagtgcatcaggtagatatccgccgggggcagggcatagggcttgaggccgcggatcacatgcaccgacagggggcttccgtccggacggcgcacgaagcgcgcgatctcgttttcccagttgcgaagcaggtgcggcggggccaccaccagcgccggatacgcgcccgtctgcgccagcatcgcaagcgcctgcaccgttttgccaaggcccatctcgtcggccagcagcgcccggtccgtgcgcagaagaaacgccagcccctcctgctgaaagggcgtcagcgtgccggtaaagaccgacgggctgggctccacgcgctcgggcatccgccgcgccgtctcgcggcgcaccacgtattcccgcgcgtcggtcagcgcctgctcccagcgctcccggtccgcggcgcgcacggccagcggatagcgcagcatcagccagttgaggtcccccacgatgcgccggtgcgccgggaagcgcgcctcgccccggcggccgctctccgaccccggaaacagccgcttgcacagctccgtcacgcccgggtcgccccggaccacccagcagtcccggcggcggttgtagctgagcgtgccgtaggtgcggtgcgcgcccccttcctccggctgcgcgccgtccgtgtccagaagatagggcggaatcagcgaaacatcctcattcacggcagcgccaccccccacaggcggttcagcgccaccccgcgcacgggcttgccgtgcaggcgggccggaagcggcaccgcgcgctcggtcagcaccaccagcgcctccaccccttggcaggcggcgtagcggtccagctggcggcgcagggcggcggggtcgggccggcccttcttgatctccacgcccacaccgcccaccagatagtcgatgcggcagccgggggcgagcagggcctcatgcaccgcgggcaggcccgcggcgctgaggcattcccccacccgcaggtgaaggtccgcctcatagggcgcaaagggagacctgagcgtgcccagcgcgtccagcaccctgtccagcatgccccggcctcccttccctgccgattcatcggcgcggagggcacgtcggtgccctcagaccattgaaaaacccctgatgttggggagagacgcgtttcttgcgtcccggttgctcaatcattcgcgcttcccttcgcgccttcggacgctcgcaacgctcgcataaaatgctgcggcataaggctttggggctctgccccaaaccccggcaggggcctgaggcccctgcaccccgcactttgtcaacaccctgagagcacgcatgcgcccttcgcccgcgggcgttccttacaactcgatgcgcctgttctgccggctctcgcggtacatcacgaaccggcggccgatgcactgcacgggctcggcgtgcacgcgggcgcagagctcctccagcgcctcgcgggcggtgagctcgcagccctgctgcacggcgcacttgatcagctcgcgcgcctccagcgcgtcgtaggcctccttgacggtgttgtcggtgatgccttccttgccgatgtagaggatggtgtcgagggtattggccatgccgcgaaggctggcgcgctgtttgctggtaagcatgacgtactccttattcgatgaagtcaaattccatgtcgccgatggaaacggtgctgccctcgcccgcgcccttgtcgcgcagggcctggatgatgccgcggtcgcgcagcgtgcggtggaaccagttgaggctttcctcgtcgtcgaagttgacgctgtccacaaagcgctgcatggccgcgccctccacgtagaaggtgttgttctcgcggcggatggtgaagccgtcgtccgggagaacgtggctctcctccgcctcctcggcctcgaacacgcgcggcggcggaagctccccaaggagctgaaccacccggtccagaagcgcgtcgaagccgcggttttgcgcggcgctgacggggaaggcctcgtagcccatcgcctcaaacgcctgcttgaggcgctcgatctcgccgtcctcatagatgaggtcgcacttgttgagcaccaccagctggggacggccctccggctcgccgtacctggccagctcctcattgatgatgcgaaaatcctccatggggtcgcgcccctcgctgccggaggcgtccaccacatggagcagaagccgcgtgcgctccacatggcgcaggaagtcatgccccaggcccacgccctcgctggcgccctcgacgaggccgggaatatccgccagaacaaactcggtttcgtagcgccgggcgatacccaggttgggcgtgagggtggtaaaatgatagttggcgatcttgggccgggcggaggtgagcacggagaggatggtgctcttgcccacgttggggaagcccaccagccctacgtccgcgatggttttcagctccaggcggaacacgtgcgcctcggtgcggatgccgggcttggcgaagttgggggcctgacgcgtgggcgttgcgaagtgctggttgccaaagccgccctgcccgccgcgcaggagcaccttgcgctcgcccggccggctcatgtcggccaccacggccccgtcctcctcgcgcaggaacaccgtgcccaccggcaccttgatgatcaggtcctgcccgcgcttgccatggcagcgccctgccgcgccgtccgcgccgttttcggccagatacttgctgtggaagcgaaaatccagcagcgtgtgcatgttggggtcggcgtagaggacgacgttgccgccgttgccgccgtcgccgccgtccgggccgccgttctgcacgaatttctcccggtggaacgacacgcagccgttgcccccgttgcccgccttggcggtgattttgacccggtccacaaaagaagccatctgctctactccttcttcttgcaatgctcgcgcgtctcttacgcctgcgccgcgtcctccttgtgcgcccggcgtgcgggcgcgggggtcgtcaccgcgccgcccgcggccctcgcggccttgcacagcggccggagcgcgcaggcgccgcactctgggccccgcgcatggcatacgcgccgcccgtggaagatcagccagtggtgcgcggccacccagtcctttttgggaatggccttctgcagctggcgctcggtctcctcgacggtcttggcgtcggccagccccagccggttggacacgcggaacacgtgcgtatccaccgcgatggtaggcacgccgaaggcgttggccagcacgacgttggcggtcttgcgccccacgccgggcagtgcggtgagcgcctccatggtgccgggcacctcgccgccgtggttttgcatgatgaggcggcaggcggagacgatgttggcggccttggtcttgaagccgcagctcttgaccatcgggtacacgtcctccacgctggcggccgccatgtcgcgcaccgtggggtagcgctcaaagagcgcgggcgtcaccttgttgacctgcttatcggtgcactgggccgagagcatcacggccaccagcgtctcgtaggggttgcggaagtgcagttcgggccccgcgtcgggatacagcgcgcgaagcccttccagaatggcctttttgctgattcgcatgggggtgcggcttcctttctcgtatcgtcctggtgcgccgcgatggcgggcaccgtgttattgtacaggataacgcgcggggttgcaagtgccgcgcgcatcaggcgtcccagtcgcacgcgcgcatcaggcgtcccagtcgcagccagcaatcagcaggcgggccagcgcctccagcccctcgcggtcgccttcgtcgaagcggccgggcagcgggctgtccacgtccagaacgcccagcagcctgtccccgtcaagcagcggcgccacgatttcgctgcgggaagccgcgtcgcaggcgatatggccggggaaggcgcgcacgtccgggaccacctgggttcgcctctcgcgcgccgccgcgccgcacaccccgcgcgcaagcggaatgcgcacgcacgccggcatgccctggaacggccccagcaccagcatgccctgtttgtaaaggtagaatcccgcccagttgagatcgggcagggcctgatagatcagcgcggccgcgttggccaggttggccagggcgtcccgctcgccctccatcagcgcggaaagctggccgccaagcaggcggtagcattcccccttgtcccttgggtattccgtccgccgccatgccgccatgcgcctcgcctcccgtcctcttttctcccggcacagtataccacaaaacatcggtttcggcatccatgttttggggtagagtaaaagcagcacgcgcattcaaaggaggaatgaccatggcgctcgatcccaccgccctctttaccctaagctacggcctctacgtgctcaccgcccgcgagggggaccgcgactgcggctgcatcgtcaacaccgttacccagctgaccgaaaaccccacgcgcatcgcgctcagcgtcaacaagcagaacttcaccaacgaggtgatccagcgcacaggcgtctttaacatcagcgtcctgaccgaggcggccacgatggacctgttccgtcacttcggcttccagagcggccgcgacgtggacaaattcgccggccgggccgaccccgtgagcgagaacggcctgcgctacattgacggccccgccaacgccctgatttcgggcaaggtggagcaggccatcgactgcggcacccacatgctctacatcgcgctggtcaccgaggcccgcaagctctccgacgcgccttccatgacctacgcctactatttcgccaacgtcaagcccaagccccagcccaagcccgccgaggacaaaccccgccgcggcttcgtgtgccgcatctgcggctatttctacgagggcgacgagctgcccccggacttcatctgccccctgtgcaagcacggcgcggccgatttcgagcccgtgggcttctgatccccgcaccccctttgccccccaccggcggcaaagggggttttcttagcggaaaagcggctgtacaaaagcggaaaaaacgaatataatacccctgtgttccgctcaaaggcggcgatttttccccatgaggcaggaggtccagcgtgcaagccgcaaacaaacccgcgttccacaggcgttccatcaagcccgagcgttttctggctttgggttttttcctgctgatcgtggcgggcggattcgtgctcactctgcccgtgtcctccgccgacgggcggaccgtgggcatccgccaggcgatgttcagcgccacctccgccgtgtgcgtcacgggcctgtccatcgtggacgtgggcgtggagctgtcctttttcgggcaggcggtgctgcttatgctcattcaggtgggcgggctgggcttcatggccttcgccacgctgatcatggtggcgctgggccggcgcatctcgctgcgggaccgcatgatcctgcgcgacgccatgaaccaggaggcgctcagcggcatggtgcggctgacgctggcgtttttcctgatcgcgctggtggtggagctgtgcggcgcgctgttgctcatgacccgcctcatcccgctctacggccccgcgcggggcgtgtggcagagcctgttcacgtcggtcagcgcgttctgcaacgcaggcttcgatctctttggcggctacaggagcctgacgcatttgcaaaacgagcccgtgatcctgctgacgctgggcggcctcatcctggtgggcggactgggctttccggtgattctggaatgcctgcgagcgcgctttcgctggcgcaagctccccctgcacgccaagctggtgctgaccgtgaccgccgggctgatcgcctttggcacgctgtccatcctggcgctggagtgggacaacccccgcacgctggacggcgggctcacggtgtggcagaagctctacaacagcctctttcagtccatcaccttccgcacggcgggctttgcctcgctggaccaggcgtccctgaccgaccccagcaagctgatcggctcggtgctgatgttcgtgggcacgtcctccgcctccacgggcggcggcgtcaagaccaccacggccgctttgctggcgctggtggttgtgcaggtggtgcgcgggcatgagcgcatcacggtcttcaagcgcgaaatctccgccgatacggcgcgccgggccgtggccatcgtgctgattgcgttttcggccatcttgatcgccacgtgcgtcatctgcgtgatcgagcgcggacgggggcacgactttctggatctgctgtttgagacgacgtcggctttcagcaccacgggactgtccagcgtgaacaccaccacgctcacccccgcctcgcaatggctgctgatgccgctgatgtatttcggccgcgtgggtcccctcacgctggcctacgcgctggccaaccgcctggaaagccagcgcgccaaccgcgtgcattaccccgaggaaaagatcatgatcggctgacgggaaaggatggtatctccatgaaaagcaagcagtttctggtgctgggcctgggccgcttcggcgcgagcctcgccaagaccctgtgcgacctgggccaggaggtgctggccgtggacgccgacgaggagctggtcaataacatcgccccctatgtgacgcaggccatgcagctggacgccacggatgagacgctgctggcgtcgcttggcgtgaagaacttcgacgcggccatcgtcagcatcggccagaacacgcgcgacagcattctggtgtgcgtgctgctcaaggagctgggcgcgccctacctggtggccaaggccaacgacgacctgcacgccaaggtgctgcgcaaaatcggcgcggaccgggtcatctttcccgagcgcgacatgggcgcccggctggcgcggtccatcatcacgcccaacgtgctggagctgatgaacctgagcgacgactatcagatcatggagatccgcgtgccggagcgctgggtgggcgataccatcatcggcgtgaacgtccggcgcaaatatggcgtcaacattctggccattcaccgcgcggaccgctttctggtatcgcccgcgcccgacatggccttcgtggaaggggatacgcttctggtgatgggcaagcgcgaggatatcgagcgtctggacgcataagcccgtcccatccggcatagagcttaccataccatgttttttcacgaagggagcgtcaagccatgaaacccacgcagcccggctatttcgatcgcgaggaatgccgccccttctatcaccggggcggcgacaacggcatcctgctcgtgcatggcttcacgggcagcgcggcgcacatgcgccctctggcggacgagctgtcccggcgcgggcgcaccgtgcgcaccatcaacctgcccggccatgcccagaccgaggaggacatgggccgcgcggactggcagagctggcttcaggccgtcaagcaggcgtgcctggagatgatgggcgagctgcgcgtattcaccgtatgcggcctttcgatgggcggcgtgctggcgctgatggcggccgagcagatgaaggtggacggctgcgtgcccatctccgcgcccatggcggtgaaaaaccgctttctgcatctggccggacctgcctcgctattcataaagcgcatctcctggggcgaccccggaaaccgcgccagcctggtggacccggcctacgatttcggctacacgggctttcccacggccaagggggcggatttgaaccgcctgatccgcctggcccggcagaacctgttcaacctcacctgccccatcctgtgcgtgcagagcgacgcggacgaaaccatctggaagggcagcgccgactgcatcctggagggcgtgagcagcgaggtgcggcaaaagctgtggctgagcggcatgccgcatgtgtgcaccctttccagagagctgcccgccatcgtggacgcggtggacgccttcatggaccgcgtggaggcggaaaaggaggggtaacgcgggccgtttcgcctcccgctgcacaggccgcatgggccgctccggacacgggcgttccctccctcgcggaggagcgccctttttctgtgcgcttcctcccatcccttccagccggccagccttgcatctgccgtgttctgtggtataatggtcgtgtgtgtgattttgccatgacggcttgagggggcggctgtgtgacttcgacaagtcccagaataaaaaaaccggcgcgcacgcttctgtgggtgcttcttgacgtgctgctcgtcaacgcttcgttgtttctggcgcaggtggtgcggtattcgtccaatatttcctacagcttctttgaaaattccatccgcctggcgcctgccatgacggtcatttttctgctggtgttctgcggctttggcatgtaccgcacgatgtggcagtacgcctccgcaaacgacgtgctgcgcatcgccctggccacgctggcggcgtcgctgattacctacctgttctccctggcggccaacgcctttgtcaggccgcagaacctgttccggctgcaccggatggtctacctgctgttttggatcatttccatggcgatggtgggggcctcccggcttttgtaccgcattgtggtcacgcgcgagcgcttcgcgctcctgtccacgccgcgcgacgatgtgcgccgcgtgatggtggtgggcgcgggctgggccggcgcgagcatcgtgcatgagatgcagcgcggcagctacggcaaccgcgcgcccgtgctcgtggtggacgacgaccgcatccgcaccggctcggagctcagcggcgtgcccgtggtgcgcgggtcgggcaacattctcaagctcgccagcgattaccgcgtggatgaaatcatcatcgccatcgccacccccaagggcgatctcaagcccctcatcgaaaaatgcctggccaccggctgccgcgtgcgccgcctcgcgcccctgcaggagctgggaagcgacgccgccgtgcccaccgcgctggtgcgcgacgtcaacatcggcgacctgctgggccgccccgaggagcagctggacatgacgccggtcgccgcgttcttccgcgggaaaaccgtgctcatcaccgggggcggcgggtccatcggcagcgagctgtgccggaggcttctgccgctggagccggagcggatcatcctctatgatatcagcgaaaactacatgtacgacctcttcagcgagctcaagctcctctacggcgacgcgctcaaggaaaagctcctcctctgcgtgggctccatccgcgacgcgcagcgcctggacgagatcttcgcgcgctaccggcccgaggtggtgctccatgccgccgcgcacaagcacgtgcccctcatggaggactgccccgaccaggcggtgaaaaacaacgtgttcggcacgtggctgaccgcgcaggcggcggtgcgccacggcgtgaagcgcttcgtgctcatctccaccgacaaggccgtcaaccccaccaacgtcatgggggcgaccaagcgcctggccgagatgattatcgaggccctcaacgcccagaccgagacggaattcaccgccgtgcgcttcggaaacgtgctgggctcccacggcagcgtggtgccgctctttgagcagcagatccgcgcgggcgggccggtgacgctcacccacccggacatcatccgctatttcatgaccatccccgaagccgcctgcctggtgctcaaggccgccagcatcgccaagggcggggagctgttcgtgctggacatgggccaaccggtcaagatccgcgagctggccgagcgcatgatccagctctacgccccgcacgacggccgcaaggtggagatcgtatacgtgggcctgcgcccgggcgagaagctctacgaggagctgctgctcgcgggcgagggcatcgccaagacggagagcgaaaagattttcgtggccaagcccgagctggtggacaagcccacgctggacgccatgctggcccgcctgaagcgctgcctggacgagggcggcgatatgctggcctgcctgcatgagctggtgcccaccttcaaggaggccgatcaggtcaacagcgcccgcaccgctgctgccgggcaggccgccgccgtatgaccccgcatgaatccctgatgcggctggcgctggaggaggccgaggccgccttccgcgagggcgaggtgcccgtgggcgcggtcgtggcgaaggacggccggcccgtggcccgcgcgcacaacctgcgcgagcagaccggcgaccccaccgcccatgccgagctgctggccatccgcgaggcggcgcgcgtattgggcgcgcggcggctgaccggctgcaccctgtacgtgacgctggagccctgccccatgtgcgccggggccatggtgatggcctgcctggaccgctgctatttcggcgcgcgcgacgcgcgtcagggctgctgcgaaagcgtatacgccctgcccggcgatcccgcgttctatcaccggctgccctgcgtgggcgggctgatggaggaggaggccgccgcccttctcaggcgcttttttcaggcccgccgctctaccgaagaaggaggaaccccatgaccatcgacaccatcgtgaccgatctggacgataccctgctggacggcagcggccagctgagcgcctataccattgaggtgatggccgaggtcaagcgccgcggcatccgcctgattccctgcagcggccgcacgcacgccagcatgtatccctttctggcgaagctggatacgggtctgccctacatcgggggcaacgggtcggagatcgtgggggcggaccaccgcctgatcgagcagctgacgctggatgtggagctggcgcgcgagatctgcgccttccttgagcaaaacgggctgtacgtgcaggtctacaccgacgaggccttctactattccgccgagtgcgacatcgcccgccgctacaagcagtcctccgggatgaagggcgtggccgtgggcgacctgtgcgcgtttctggactttgctacgcccaaggtgctcagcgtgggcgagccggaggacgtgcttcgcctgatgcctctggccaacgagcgttttctgggccgggccgccttcaccatgagcaagccctattttctggaggccgagccgccgggagccaccaagggcgaggcgcttttgcgcctggcggaccgcatcggcatcgtgccggagcgcaccgtggcctttggcgacagcctcaacgacaagagccttttggccttcacccccaacagcgtggccatggccaacgccatccccgagctgcgccaggcggcggcctacgtctgccgccccaacacggaggacggcgtggcccgcttcgtggcggagcacatcctgtaaggaggcgccggaatgatcgacctggaggactttcgcaccaagctgggcctggagctgctcggccccacgaccaaaaagcagctggacatcaacgtgaccgacatcaaccgccccggcatgcagttctgcggattttacgaatactttgcccacgagcgcgtgcaggtgatcggcaaggtggagatgacgtacctggaatcgctggaatcgcgcatgcgccgccccgtgctggaaaagtacatgagctatcccatcccctgcatcatcacctgctggggcatgacacctccgcgggatcttttggaaatcgcccgtgcgcacgacgtgccggtattccagagcaagctcaaaaccaccaagttctcgttgcaggccatcatgtacttaaaccgcgtgctggccccgcacatcacccgccacggcgtgctggtggacgtctacggcgtgggcattctgctcacgggcgagagcggcgtgggcaagagcgaggccgcgctggagctggtcaagcgcggacatcagctggccgccgacgacgtggtggacatctgccgcgtggccgacgaccgcctcatcggcgaatcgccggagatggtgcgccacttcatggagatccgcggcatcggcatcatcgacatccgcgccatgtacggcgtgggatcggttattctcagcaagtccatcgacatggtcattcacatggaaaagtgggactcctccaaagaatacgaccgcctgggcctcacggaggaaaccgtgaccattctgggcgtgaaggtgccctaccagaccatgcccgtccggccggggcgcaacctggccatcatcatcgaggtggccgcgcgcaacctcagcctcaagcgcatgggctacagcgccgcgcatgagctggaccgccgcctcaacgagctgatcgcgcagaattccggaaatcatacctgagacaacagggaggcttttctatggtctatatcggcattgatctgggcggcaccggcatcaagatcggcgtggtggacgaaagcggcgccattctctcccagggcgaaacccccacgctggcgggccgcccctacgaggacatcatcgcggacatgggccgctgcatgctggatgtgatggcgcgcggcggctttgaggaaaaggacatcgcctccatcggcgtgggcatccccggcgtggccgatgaaaagacgggccacgtgatcttctgcaccaacctgggatggagcgacgtgccgctgcgcaccgagctgcaaaagtacctcaacaagcccgtctacatcgacaacgacgccaccgtggccggctttgccgagagcatctgcggcgtgagcgcgggctgccattccagcgtgttcatgacgctgggcacgggcgtgggcggcggcatcgtgatcggcggccggccgtggagcggctttcacggcgtgggcagcgagatcggccacatccccatggacatcggcggcgagccctgctcctgcggcaactacggctgcctggagcgctactgcagcgccacggcggtcatccgcatgggcaagcagatggtgttgcagcaccccgacagcctcatgtacgacctgtgcggcggcgacgtgagcaagctgacggccaagatggtctttgacgcggccaaggagctggacgacgtggccatgaaggtctttaaccactacgtggactatctgtgcaaggccatctacaccatcatcgccttcctggacccggagatgatcgtgctgggcggcggcatcagcaaatcgggcgactttttgctcaaggccgtgcgcgagcgcatcccccgctaccttttgttcaagacgctcccctactcgcgcgtggagatcgcgcgcctgggcgcggacgcgggcatgatcggcgcagccatgctgggccgccacgcctgagggtattcaggacaaagcgcagacgcaacccatttgggaggtttggaggggccgcgggccctccaaagtgaattcgtatcgcccggctttgccgggcgggcggggagtttgcgcctccggcgcaaacatttcttaagcatctggcggaaaaggccggcgcagccggactttttcgacacgctgatagaggaggcttccttttcatgtcggatctgaacattcgggacctgtatctcgcgcccccggaggcgggcatcaaggaatgcaccgtatccggctgggtgcgcaccgtgcgcgacagcaaggcgttcggcttcattgagctcaacgacggcacctgcttcaaaaacctccagatcgtcctggaggacggccacacccgcgacttcgccagcgcggtcaagatcacgctgggcagcgccatccgcgtgaccggcgagctcgtgctcacccccggcatgaagcagcccttcgaggtcaaggcctcccaggtcgaggtgctgggcctgtgcgccccggactttcccctgcaaaaaaagcgccattcctttgagttcctgcgcaccatcgcgcaccttcgtccccgcaccaacacgttttacgcggtgttccgcatccggtcgctggcggcgcagcttctgcacgccttctttgccgagcgcggctttgtgtacgtgcacacccccatcattaccaccagcgactgcgagggcgcgggcgagatgtttcaggtgaccaccctgccgctggacaaggtgcccctcaccccggacggccagcccgattacacgcaggatttcttcggcaagcaggccagcctgaccgtgagcggccagctcaacgtggagaccttctgcatggcgttccgcgacgtgtacaccttcggccccaccttccgcgccgagaagagctacaccccgcgccacgcggcggaattctggatggtggagccggaaatcgccttcgcggacctctttgacgacatggccctggccgaggacatgctcaagtacgtcatctccggcgtgctggccaaagccccgcaggagatggccttcctcaacagcttcgtggaaaagggcctcatcgaccggctgaatgccattgtaagcagcgagttcgcccgctgcacctacaccgacgccatcgacatcctccaaaagagcggccaggcctttgaataccccgtgtcctggggcatggacctgcagaccgagcacgagcgctacctcagcgaaaagcacttcggccgcccggtgttcgtctacaactaccccaaggaaatcaaggccttctacatgcgcatgaacgacgacggaaagaccgtcgccgccgtggacctgctggtgcccggcgtgggcgagctcatcggcggcagccagagggaggagcgcctggatgtgctcaaaggccgcatcgaggagctgggcatgcgcgaggaggactattccttctacctcgacacccgccgctatggcaccacgccgcacgcgggcttcggcctgggcttcgagcggctggtgatgtacctcaccggcatgcagaacatccgcgacgtgctccccttcccccgcaccacgggcagcgcggaatactaagtggcgaaaaagtccgccttcagcggcctttttcgccagggtttgcacgtttcccctgcgccttcggcgcggccggggaaacgtgtaaggaatgtttgcgcccaagggcgcaaactccccgcccgcccggcgaagccgggcgatacgaatacactttggaggggacggagggaagcgccagccctgtgggctgttgccaccgaaggtggcaaagcgacccgaaggagtcaaccgaaacgagcggcggacgcggccagcggccgccgcgaagattgaggttgcggaactacggccctccaaacctcccggaaagggtttatcaacagtctgacagcgaagcggcggcgggccatgtggcctgccgccgctgattgttgcacttgttggcggagccgccctcctacagccccgaaaccgcctttgccgccgccgcaacctccgccacgggggcgggcgcgtcggtgatgacgcccatggcctgcaggatgatgaccagaatgcccagcaccgccacatacaccgcaaagccgttgagcgagacgcggctgatgagcctgaggaagaagcggatggccagatagccgctcacgccggccaccgccatgcccaccagaatggcggggaggtccggcccgatgttcacgccctccttcagcacgtccatgccctcgctgaccaggccgcccacgatggccggggcgctcatcatgaagctgaacttggcggctgtctcacggtccagccgcgcggccacgccgccgaagatggtgctgccgctgcggctgacgcccggcagcatgcccaccgcctgcaggcagcccatggccagcgcctcgcccacgcccacgcggtgcttttccacgccgcgcagcgcgtttcgccgggagagccactgggtcagcaccagcaggagggccgtgatgaggaagcacacgcccaggaggctgttgtgcgtctccacataatcgaggggcttgtcaaagaggatcttccccgccagcgcgggcagcgaggcgatgaagagcagcacgagggtgtggtttttgatgggatgggcgatcatcgccacccagtccttccagaatacgatggccaccgccaccagcgtgcccacgtgcagcaggatgttgaacagcagctggtgctccacatccacgccgaaaagcgcctgcaggagattgagatggccgctggaggagatgggcagaaactccgccagaccctggatcaggcccagaagggccgcggtcaacacattcatgccagaatcgttcctttctgtagccggttcagaggcagtatacaccatttcccggtggatgtcacgctttttacagacgcgccctttcaaaagtatggcccggcagggtataatagacgcgggaggtgactggaaatgaagcgttatcgccttgtcttgccgaaaaagctcgccttcggcgatcttttccgccaaaggcttaagaaatgtttgcgcccaggggcgcaaactccccgcccgcccggcaaagccggacgatacgaatccactttggaggacctgcgggccctccaaacctccggaaaagggtttgtcaagagcccgaggcgtagccgtctttttttggggcttgtgctggtggttttgctgctgcttgcgggcgcgtgcgcgcgggcgcaggagcaggttcaggccctgtttatcaacgtgggcaaggcggacgcggcgctgtttttcctggatgaccagcgctttctggtggacaccggcaccaaggacagctacgaccagctcgagcgcgtgctggaagcctacggcgtgacccggctgaacggcgttgtgatcacccacacggacaaggaccacgtaggcgggctgaaaaagctgctgaaaagcgggattgccgtggaccgggtctacgccggagcgctccactccgaaaagagcctggaggatcatcccgtctacgaggccgcggaaaaatacgccgtcccgctcacctggctttcggcgggagacagcatcgcgctggagggaggcggcgcatttgacgtgctgggccccctcacccaggatgacgagcaggaaaacaacaactcgctggtgctgcgcctgaccaccccgcagggcgacatgctgctcaccggcgacatggagctgcccgaggaaagcgaactgatcgaggcggggctgatctctcaagccgcggtgctcaaggtggcgcaccacggcaacgaggacgccaccagctggcaattcgtgctgctggcccggccccagtgggcggtgatctccaccagctcggtcgaaaagccggagacgcccagcagcaaggtcctctcgcgcctgtatgacgtgaaggccggcgtggccgtgacgcaggacgcggaggtgggcattctggtgacgctcagggacgggcaggccggcgcggaggccatcaactggcgctagcgcaccgggccgtgccgcatcgcataggatggcttggcgaaaaccgcttcgggaagcggatcgccaagccatcctttttgtatccaggaggggacccgctatgcatcatccgccctgcacctgccacgcctgcggcgaaaagccgtccaggccgtgcccgccgccgtgtccgccgcccgcgccggattgcggctgccgcccatcgccgccctgcccgccgccgtgcccggcgcccgcgccggactgcggctgccgccctcatcggccctgtccgccgccgtgtccgccgcccgcgccggactgcggctgccgcccgccccggccctgcaaaccctgcaagccgggcaagccggaaggcgtgctcctgcaaaagattctcagctgcgaccgcttaagcatctcctgcctgtgcgtggacctggccctgagcgggctggactgcgcccggccgccgcttacgctgatgagcgtacatgaaagcggcgcccagccttcctggacgccgcttggtgagcccgactgcgccgggcgcgtgatggtgcgtgtaaccgtgcccgtctgcgcccaggtatcggacgcgtgcgggcagcgcttctccgccacggggcaggtggacgcggaggtctgcctgcgcctgcccggcgcctgccacggatattacagcctgttcctgctgccctgcgtgcgcctgttgtgcgcggacggctgcgcggaggggccggtgttccacgcgcggctacaggtggtgctggacgcatacgccgtccggccggagccgtgcatgctgcgccgcccggagcccgcctgcccggacctgccgctctatccgccgcccatcacaccgggtccgccctgttggccacaatgcccagcaggcccggacccgtgtggatggccagcacggggctgacggacatgatgtaggtctcgcccgtcacatccagttcgcttctgaggcgctccatgagcttttcggcctcctcgcgcgccttgccgttgaccacggaaagctccgccctggccccgccaaggaagcgcttgacctcgccgaccatggtatccaccgcggatttgtacccgcgcgccttggccagagtggcgtagatgccctcgtcgttgacatagatgatgggcttgatctggagcaggcttcccaccacgccctcgaccttgccgatgcgcccgcccttgcgcagaaattccagcgtgcggatgacgaacatgcccagctgatttctgcgcacggtctgcgcgcgctcgatggcctcctcgggcgtggcgccttcctccagcgcgcgggccgccgccagcaccatcatgcccagccccatcgacagcgtgcgcgaatccaccatgtgcacgcgcatgcggctttcaaaatcccgggtgatcatgcgcaccatgttgaacgtgccgctcaggcccgaggagatggagatgtggatcacatccgtcacgccctcctgcgccagcgattcgtacagcgcgctcacgtcctccggaaggggcaggctggtcttgggcagctcgtgggtcagaagctcgtagagctcatcctcctgaatgtcgatgcggtcgcggtattccgcgttctggcacacgatgcgcagcgaaatcatgcggatgccgtagcgcgaaagctgctcgtcgctcaggtcacaggaggaatccgttacaatcacggttttacgcgttgcatccattcccgctcacctctgtcttgccgcggaaacccgcggcttaagcttgccggaaaattccgcctgcggcggtcttttccgacaggacacgtttcccctgcgctttcagcgcgtccggggaaacgcgcagggaaaccttgctacacaagacttccgaatccaccgcacatgtcgctggattcggtttttacccggagggctgcggccctccgaacctctcaaaaggcttttttgacagtctgttgccgcggaaacccgcggcttttctgtcatcattctcaaaacatacctattatatcatgccggcccgcgctgtcaacgccgcccggcggcggcgcggaggtttttttacatttgcttcgccccgcgcgcggccgccaccgttgacaaccccgtgagaatgccttactatggaggatgggaatacacgcatacgaattttggaggcaacgccgatgaaatcgctgaagatgaacctacgttggcttctgaccgcctgcgccatggcggcggtctgcgcgctgatctgcctggcgcccacggcccgcgcggcgggcggcgaggtgtcgggctgcgcctatgtggacgccaatgaaaaccttgtccatgacgaaagcgagcagctcatcacgggcgtgcccgtccggctggagctgcgcgacggcggcgcgtggacggaggcggcgcgcaccgagaccgatctgtacggcaagtatgccttcacgggcctttcggcgggcgaataccgcgtgatctgcacgctcagcgggcaggagctctacgccgtgagcgtgggcacttcgatggcgtcggaggccggcgccgtcgtgggcgatgcggtgacgctggaggaggggaaatccgtatccggcggcgacgtgggcctggcgccctccgcccggctggcgctgaccgtttttcaggacagcaacggcgacggcaagcgcggcgactacgaccgcggggtgcccggcatcgaggtgacgctgctggagggagaaacgccgctggattccacctccaccgacagcgacgggaaggcggcgctctacgcgcgcgccggccgctacaccgtccgcgtgacgctgcccgcgggctatgggatatccgacgggagcgtgcagagccgcaccgtcgatctggacgtttccttcgccaccggcgaggaagaggccctcaccctggccgtggcccccgtgggcgcgctgggcggcagggtgtttgaggacatggacaacgacggcatcatgggcgacggcgaccccggcgcggcgggcgtgaccgtgcgcatcgagggcaaccgcacgggcacggtgcgcgaaatcaccaccgatgaaaccggcgagtacctcttcgacttcctgcccgacgacatgtacaccatttccgccactttgcccgagggcatgctctatgcccgctattcgcagaccggcggggatttgcgcagcatcttcaccggctccaacatcacccgcgagtttcccgtgcgcgacgccgcgcgcgtgatggacaagaacatcggcgtggtggaaaacggcgtcatcagcggcgtggcgtttctggatttgaactataacggccgcctggacgagggtgagccgggctatgccggggtgacggtggaggccctgcgcgggagcggctccgaatcccagggcaagaccgaaaccggcgaggacggcgccttccgcctggagggcctgcgcggcggcgactaccagctgcgcgccattttgccggacgacggctccatcttctccgtgaccgccgagggcgccgcatccgaggtcaaccgctttgaacagcggtccacgcggcgggagttcaccatcggcggcctcacgctgggcagcggcggtgaaaccaccgcgctggtgggcgtggcgcgcaccgcgtccgtgagcggcgtggtgtttgaggacgcgggctacgacggcgtgctgggcgaggaggacaagcgcctctccggcatccgggtctatgccgtggacgcctccggccagtccgccgccgacgccgccaccaacggcaggggcgaatacaccctcaccggcctcatgcccggcgtctacaccgttgaggtgcagcgcaaggcgggctacggcttcacgcggctgcgccccgccgaggacggcggcagccatgtgaccgcgctggtgggcgagatgggcgtgaccgccgaaatggacatcgccatgggcgaggccctcaccggggtcaacgccggcatgctgcccgcctccacggtcagcggcgtgttcttccacgacgtcaacgacaacggcctgcgggacgaaaacgagatcggcatgctgggcgccgaggtgcgccttgtgtccgaggacggcgagatcgacctgatccagacccccgccgaggacgggacctacttctttgacggcgtgatgccgggccgctacactctgcactacctgctcggggagcaccgcgagatggcgaaggtggccgagggcggcaacaccgtggcccacgacgggcccgacaccgtctacggccctttcgaggtcgtgatgggcgaggccctcaccttgcccacggcgggcgcggtgacgctgggcaatttcagcggcgcggtctttgaggacctcaacgccaacggccagtgggacgagggcgagaaggccctctccggcgcggccgtgaccctcacgcccgaccgcacgggcatcgaggccgcgcaggccgtgaccggcgcggacggcgcctttgacctggaggggctgcgcccggcgggctacacgctcaccgtcgcgctgccggagggctacatcttcagctgcccgctggaggggctggccttcggcacgctgggcgagcagtcgctcgtgtgcgcctggcagacgctgaccgaccgaaccgacaaggccatcggcgcggtgaagccgggcagcatctccggcgtgatctggctggacgaaaacgaggacggcgcccgcggcgagggcgagctgctcatgtccggcgtgagccttgagctggtggacgagcggggcggcgccgtcgtcaagcgcacggcctccaccgatcagggcttccgctttgacaacgtgcggccgggcgcctacaccgtgcgcctgacgctgccggaccagtcctcccctgcggcggacagcgcctccacctttgtggcaaacggccttcggatgacgcagaccggcgtgaccgtcgaagcgggcgaggacgtggacggcctgaccacgggcctcatctccgccaccagcgtggccgggcgcctctacctggacgaaaacggcgcgcgcacgccgcttgccggcgtgacggtgagcctctacaagggcggggagctcagccccctcatgaccgtgctgaccgacgacagcggccgctaccgcttcgacggcctgtggcccgcggactattacctggaggccgggctgcccagcggcaccatctttgtccggcccgacgatcccaactatgaaagcggcgcgtccgcggtgacggcgtcgggcgaaggggcgggcacgagcgagctgttctacctgcacatggcccagcaccggctggacatggacgtgatctacatcaagcccgcgcgcgtgggcgacctggcctggctggacgaaaacggcaacggcctggtggacgagggcgaaccgggcattccgggcatcacggtgcagcttttgcaggacggcgaggccgtctacgaaaccgtgaccgacgcctacggctactacctcttcaccgacgtgtaccccggcgcctacacgcttgtggcgaaggcctatcccgagctgaccccaaccagccaggtggaggcgctgcgcatcatctccagctgccttgtcggcggggacgggaacgaggcgcacagcgatcccttcgaggtggaaagcggcagcctgaacgtaaattatgatctggggtatcttctaagggagggcgagtccctcccttccgccatcacggccccgcccacgcgggactggaccctctccaacacaaagtaaaaaaagcggcgcggccgcgttcctgctatcgggaacgcggccgcgcgccgctttgtcaggatttgtacatctcgcccagcgggatggccagaaacaccagccagcccggatgccacagcccgaagaagaagcccagcaccagatagatcagcgtgaccgtcacgggattggtcagccgctcccactgggagtcgaagtgcatatagtggatcggcaccgtcagaaacaccagccaccccggatgccacagcccgaacacaaagcccagcaccaggtacaaaaccgtgatccacaccgggaacatcgcgtcccccctggccctgcgggcctcttcctccctgcgcgccttatgttcaaaatagctgccctccgggcccagcccgtcgtgatcgctcatgaggcatcctccttcagccggtttcggtcgtttgtcaggggtatcttaccatgctttgccgccgaaaaaaagggggcggcgctcaaaaaccggtaagcgccgcatgaaaacctcatgagaatttggtgagagcggcctgcgtttcggaaaaaattcttgcaaaacgcacatcactatgctataatcatttttgcggtttaagacaacccacagcatgcgcaaaagaggtgagaatgcgtgaaagaaaagatccatcccaaatatggcaagtccatcgtccgttgcgtatgcggtgagacgtttgagacggggtcggtcaagcccgagctgaaggttgaaatttgctccaagtgccaccctttctttaccggcaagcaaaagctggttgataccggcggacgcgttgaccgcttcaagaagcgtttcaacatggaatgagccattcaaaagagcgccgtttcggcgctttttttgattttcccccaaatgctggagtccgcgccgccgcggcaggaaacaggccgggccgcgtcgaaatataggatttgcgcacctgtgtcctttgcaggcgcgcagaaaggaacaggagaatttatgaacaatcgcaagcaaggcgcgtgcgggcgcgtggatatcggcggtcaggcggtgctggagggcgtgatgatgaaggccccggacgccatcgccatctcggtgcgccgccccaacggcaccatcgtgacccggcgtaccccctacgagccgctttccaaaaagcacccatggatggggtggccgattgtgcgcggcatcgtcaatttcgtaaccatgctttccatgggcatgagcgtgctgcagcagagcaccgacatgctgggcatgctggatgaggaacccaccaagttcgaaaaatggctctccaaaaagctgggcaagggcattgacaagatcgtgatggccgtggccatcgtgctggcggtcatcctgtcgatcgggctgtttttcgtgatcccggagctcttcgcgcgcctgctcaaggcgtggatgccagacccctcctccaactggctcatcaacctgctcagcggcattctgcgcatcctgattctgatcggctacatcctcttctgcgccaaggtgccggacgtgcgccgcaccttcgagtaccacggcgccgagcacaagaccgtctactgcaacgagcacggcctgcccctcacccccgaaaacgcgcagcagttcaccacgctgcacccgcgctgcggcaccagcttccttttgatcgtgttcgcgatttccatcgtgctgtttaccctggtgggctatcagggcgaaaacttcttcctgcgccttggcagccggcttttgctgctgcccttcgtggccggcatcagctatgaggtgctcaaggccctggcccacagcgaaagccgcctggcccgcatcctgcgctggcccggcatgcagatgcagcgcctcaccacccgtccgcccaccaacgaaatgctggaggtggccatcgtttccatgaacgtggcgcttcacggcctgcccaaggggtgcgaaaccaccccggaaggctacaccgtcatccgggactaccgcgtggccgatcccacctacacgccgcccgccgcggaggaggcggacacgcctgcccccgccgaccagcctgccgaatcccccgcggagcagaccgcgcccgaagccgggcagcctgccgcggaagccgagtgacatggcggacgttcgtcacacccttctggaggccacccgtgctctggagcgggcgggcgtgcccgatccgcggctggacgcggagtggctgctggcccacgtgctgggcatggaccgcctggccatgcgcatgagcggcgcggcccaactgaccccccagcaggagcagcgcatggcgtcgctcctgctttcgcgtacccggcgcacgccgctgcaatacctgctgggcacgcagggcttttacgggctggagatccggaccgacgcgcgcgcgctcatcccccggcaggaaaccgaaacgctgtgcgaaacggggatcgcgcacctgcgcgcccttggcccccttccccctcccgccgcgctggacctgtgcacgggcagcggggccatcgccctggcgctcaggcacgaatgccccttcgcgcaggtatccgcctcggacgcgagcgccgaagccctctcgctggcccgcgaaaacgcgcggcggctggggctttcggtggattttttcgcgggggatctgtttgacgccgtcggggagcggcggttcgacctgattctgtccaatccgccctacatcccctcggacgagtgcgcccggctgcagccggaggtgctccgcgagccgcgcatggcgctggacggcggcgcggatgggctggatttctaccgccgcatcgcccgcgaagcgcccgcgcgcctgaccgcgcgcggcatgctggccgtggaggcgggcgacgggcaggccccggccgtcgccgcgctgtttgaggcggcggggctttgtggcgtggagaccgtcagcgacctctacggccatgcgcgcgtggtgcgcgcctatgcggcgggccacctctagcggagcgtttcccccctctgccccaccccgaacccaaggaggaaaacggcttcatgtttgaaaaattcgactggatgctggcccgctatcaggaattgtccgaggcggtgagccagccggagatcatcgcggatcaggcccgctggcagcggctgctcaaggagcatgccgcgctggagccggcggtggaggcctaccgcgcctaccagaaaacgctgtccaatctggcggaggcccgcgagatgctgagccagcccgacatggccgagctggcccaggacgaggtaaaccggctggaggcggaaaagcagcggcaggaatatgagctgcggctgcttctgctgcccagggacccggacgcggacaaaaacgtggtcatggagatccgccagggcgcgggcggcgacgaggcggcgctgttcggcgcgctgctgcttcgcatgtacacgcgctacgccgagcgccaccgcttccgcgtggagccggtcagctacaacatgaccgagctgggcggcgtgaaggaggcggtgttcaccatcgtgggcgagggcgcgttcagccgcctcaagtttgaaagcggcgtgcaccgcgtgcagcgcgtgccctccaccgaatccggcgggcg

SEQ ID NO: 2508 - DNA, 4921 bp, Unknown
  16S sequences of unknown bacteria
actatcggggtggagaaaatagagcttaaccccggcgagatcgtattttagagaaagagacggaaaggtgacggagatgaaaacgctgcaaagaaaagtgacgataatcctgacttttgtagtagcctgcgcgatgttcgcgatcgggctattgtgcgtatataagccgataaagacgcgcgcggaaacgacgacggcggtcatcgatctgggcggcgtattatcgggcacgcaagaaatgtcgcttttagaattttatagcgagagcagttttgagctcggggatacgttgttttataacggcgaacgcgcggaaataacggaactcccgagcgaagcggaaggaacggactattatacgttaaggtgtgagacgggcggtaaattttatcaaagccaaagaaaaatcattacggtgatagtcaatccggtatcggaagagctgttctttaatacgggcgcatcggcgtcattggatgcgacggatttgtatcgcttgcgatttgcggtgtatgtttcggaaagcgcggtgcagtcgaacagtctgttgacggtaagctttgtatcgggaacggacacggagtgtaaattaggctttgagagcgatgaaatctccgaaaggcaagcgacgaaagatttaagcagatattattttacaagcggctatacgacggtgtatatctacgtaacaggaccgttacacgcggaaatgcagctgttggcgacggtaggcggcgaggcggcgacgagcgatgcgcggagtatattctacgtctggcagaaagccgtggaaaataatttcggcggaatggtggtcgaagattcggtaaaaaactatatcacgctgacggtggggttttcgtcggaaaataacacctttgaaatcagccaagcggcgcaactgtcgcagagcagcggtctgtcgttgatggtaaaagtgccggagtcgtatctgacgcagttgaaacagggcaagcgggaaacctcgaaagaaacgatttattcatctatatcgggagtgccgatcggaacgaggtacacctacgaggatcactttttatacattcgccggacgacggatctgaatgactacggaaacgcggggatgacgctgtcctgggggtatatgtatcacgtatcgccgggggaatgtatagagccatatacgaacgaagcggaggcgttgagcgaagaatttttaagccgcgggatcgacgtattttcattagggctgccgacgaacacggagcaggagtattattattttgcgacgatcctgaaagtaacgcgaacggacgcggtgtatatttcgggcagcgagaatcaggaaacgttcggaacgagtgtagagtcgttttcgcggaattattatcagacgtcgctgaaaagcctggcgctggaagtgctggaacgcgacgcgagtatgacggacggagagcgagcgtggatgcaggacgtggcgggggtgaagccggacgcgaacgagatcacggtgacgctgaaatacaaagaactgacggattacgcgacgctgacggagaaaaactacgcgtttttagtcaagagcgtctgggcgcagaataaaacgctggtgctgtccgcattatacgatttgacggaatttagcaatatcgccaagctgaacgcggtctatacgggtgatttctggcgcgacgggtatcgatatacgacgcagaagcggatcatcttgcaggcggaagattttgagtacagctataatgcagtatcgcagacggggacgctgacggtaatatacgcggattttcagtataaggatctgtccttgcgtgtgacgaacaacgacccggcgaacaatctgacgatagactattacacgtcggacgtggtagcgggcgcgacgagcacgacgctgacattcagattcgcggacatcgaggagcagctgcataattcctgtaattggctgttcgatttcggaaaggagaatattcgtatcacgggcgtgccggagggcgtgacgacgcagctgacggaggaggcgctgatcgtgaccttcccgaacgccaaagaaaacgagcttgtcaatttatcgctgatcggcgttgctgagattatcgaggacgtggaatacacgctgacgtatgagtatgcggagctgacgctgaacggaacggagatctcggaaacgtggaaaacgtctgcgccgattgtgaaactgtatagtgagatcgtgacttgtaatttcacgaatttcatgctggattacggggaagcgataagagcggcggtgaatccggagtttttggacggcgcggcgtattatattcccgcgtcgatcaggaaggaatacagcgcgtatgattcggaaacgcatacctgcaaaatcacggtggaatatacgtataacacgcttttcggaatcacgaacaactacgacgagagcgtgacgttcaaagcgctcaatcacagcagcctgagctatccgggcgggtatttcgtggacagtattccgtccgggtatcgagtgaaaggaatttccacccccaaacccgataagctgacggtgacgaatgcggaggattaccgaaacgcaaaaatagaggtgcggacgagtacgacggcgaaagaggtgctgtcggtcgtgatagagttcacggacagctggaatctgaaaatcaagtaccttgaaaactatcaggactatcggatccgtacgggcgagaaggaggcaaagccgtgcttcgcggaaaagaaagtattttcgggaacagtcaaggtcagggattacgaaaacatctatgcgttgacgaacgaggatataaaagcgattttagggcttgaaagcctggatattttaggtttggcgacggtagaaaagataacggtgaaattcgacgggatttccacctatacggcggagctttcgtattcgcacgctgcgttgaaacaaatcgattacgacggcaatatgctggaaattaaaatcccgctgacgagctatgcggagtggtgcaagcaatacgggcaggattggtcgatattgtttttgaatactccggaaagacactatttcaaatactcaaacgatgtaacgagagaaaacctgtacggctttttctcggtagcggtgttcaaggagcaggtgtctgatcttaattattggtttaagaacaacacgggcgacgggtgcatgacgatcttcgaagggaaacaggtgagcgggtcgggagtgtataaatttttcgataacctgacgacgaaaggcgtgattacgtctgtgctggggtatgtgggtatgtcgttctgcgagatcgtgaacgacgacaacgcgatgtattacagttactttttctatcttgacggaacgagcgataacgcatatctggcgacgaacggagcggacgactcggatgatacggatagcgcgattaaaaacgcattcaatgacgcgaaggaatggctcaaaaaaacgtgggataagctgaacggctcgaatgccatgaaatggttaaagatcctgggaggcgcggcgttgggaattttagcgttgacggggcttatagcgggcgtatataagctcctgacgtggtcaggagtcatcaagccgaagaaaaagacaagcggaagcacggcgaagaagaaaacgacgtccgccaagaaaaagagcacaggaacaaagaaatgagcaaggagaacggaaatgacgaaaacgaagaaaaaggcagtgccgaagaaactaactgtgaaaaaaacgacggtaagacagccgaaggcaagccataagacaaaaatagcaaaagcagaagaattgcgtcgaaaagtagtatcgacgcaacgggaagaaagggccacggtaaataaatggatcaaggcgagcagtgcggagaaaggcgcgaaacaaaagcaaatagattcagcgtatgaaaagaaaattgaggcggtaagaaaaagaggggataaggcgtacgaaaaatattataagtatgtgcattcggaatttacgccggaacaggtaaaaaaggcggatacgccgaagggacaatttatagatcgcccgttcatcaatcgccttgcaagcatggagaaaaacaatgcccggacaaaagaaaaagcccgccgtaaataaaacggcgggtaagaaaaaatccgaaacaaaaccgaaaaagcaaaaatcggacgtgcggaagatatataaaacgacggacggatatttggcggggaacgaacgttcaaaaaagccgcgccgtgttgcggtagtaaagcagcgcaaggacgacggcgcgatggcggtagtaaagatttattccaagaaagacaagagcgggaaagcgtatgtggaaaagctgatattaaaaccggagaatcattcttcgcttaccgaagattccatagtcggtcgccgcgtttatgtggggataaaaaataaagccggagaatatacgccgattttcaaccgtgatcttaaagaaacaaatgataagttaacaaaaaaagaacaccgcagcgtaatgaaacaagcgggcggtgaaacaaagcaaaaccgaaaaactctgaaaaagacgctgggagcgtggaaaaagcatttcaagaaataaaaaaatcccgcgtcggctgttaagcagggcgcgggggagaacatttctagaaaacgttcaagccttattggcattattattatacccaaaaaaccaaaaaaagtcaaggggttttggaaaaaatgttgaaaattctaaaactgataatccgaatcgtgatatatgtcgccataatcttggcagtgctgtatctggtaagtacgtttaagcgggtattctgaaatggaaaaagaaacgagacggcgaatagaccgccggacaatttatcatatcgtaagcgcggcggtattggtcggctcgttgctgttttctgttttttatttccgcgcggtattcttccggac

SEQ ID NO: 2509 - DNA, 32759 bp, Unknown
  16S sequences of unknown bacteria
cgaggcgctcggtgagccactccgcggatttttccgctgacgacgaaagagcgcgaacaggggacaagctttcggttttccccacgcacccgttcagtgcagccgaaatcgtaagtgccgcaagcgcagccgaaatcagtttcttcatggtgcctcccggtcaacttctgctttttgtaaaagtaagaccgaaaattattcccattactccgcctactatatgcccgaactgcgatatgttgtcgtgagccgtcacgccggagaatatctcctgaccgatatagatcgccgccacaagaataagcgtcagcgggatcttacggtcgcggaaattggttatcgacgccatcagtatcgccataaagactatcccgcttgcgccgaggagaacggttccgggaaacagcaccatatggagaacgcccgtgacaaaagccgttatcaccatcgccaaaaggagattcctgctgccgtatttttcttcaacaatcggtccgataacgaggagaagacatatattctgtgaaaagtgagccatatcggcgtgtccgagcacatgcgtgaaaacacgcacatacatgagcggatcgcggaacgacgtccggtagaccgaaaacagcatgcggttaaggtccaccggaagccgttcattgagcagcagcacgacaagcgatatcacggaaaacgtgagaaccaccggcgcgttatagctgaacaggttcgacaggcggaaatgtccctcactgcgattctttgccattacttttcaagcttccactttgtctggaggaccgagcagaaatcatcgccgggatagcactgataatatacggttatgagcgatccgtcagcgcattcggtagttgcgggatatccgagatcgctgaacgggatattgtcattgaggacataatcgtcgctccaagtctcgccgccgtcgtagcttaccgcggctctctccgacttcttttccgatgcgcggcatgcatagctgaggatgaccgcgccggaggaatgaaggaacaggtgaggcggaagtccgtcaacgtccgtggacttaggcattgaccatgtctttcctccgtcgtcggagtatgtggtatagcaggtgtcaacaggtgccaccttgcggcagtgaacgcggatcgcgccgaggagtcgtcccgtgggaagttcgatcacatgaggctcatgaagatgatcccatgtgagatcgggcggaagcggaacatcacccgttttctcccacgtgcgtcctccgtctgcgctgatataggaagcaatgtgggacttcccgtcctcgcgggggaacatatccttgccgaggaataccgcacgtccgtcggaaagcctgctcggaccgtgcggtgcggtcatgggaaccgcgatcggctcgctccacgatacaccgtagtcgtcggacaccttgacgtatgcgccggatttcatctcctcctgcgggagaagcttgcacactctgcccatgctgagaatggtctctttatcgtagggcttttcccactcgaaatccgcatgtcccgcgcagtcgtcgtcatagcgaaggctgaaccaagaaatgatcatttttccgtctccgaggctggcaacgccggtgtcgcggtcgtcgaggtacgaatcgttcacgacgatcggacgggtccatgtttttccgtcgttgaagctgacgaacatagcgttctttccgacggggtcgacgtgctggatacggaagctcgatgcggtcgcataaagaactccgcgctcgtcgcggcacacgctcggccagccgttgtatttaaaaatcgatttgggattacgccatactatcccctgctctgcctgcggtctgatttctctcatgatttacaatcctttcaatacttgatcttataggaaagaccgttgtttttgtgaagctctgcgggtatttcaaatacgctcgttccgtcggagaccgtgaagtcaactgcactgccgtcgagcgttatgctctttgcggcgcagttttcaagacggacggtgaacgatgcgacctcgcccattgcggggatagccggatcggactccttgcagcgtccttcctctctcttcgctcttcccgcaaacgatcccgttcgcatgccgacatcaagcataaacgctccttcgcggctgtccttcagggatatcacggtatcggcagtgccgccgttcatatagtcaaacgtatatccgtcgtcctcaacgagtacaaattcgcagtcggcgccggggtaaacgctgaggatatagttctcgggaatcaccttctcgacgtattcctgcggctccatcattgcgataaccgagcctgcacgtacaaacagcgcgccgccgcgtccctcgggaatcttatactcgatatttcttccgccttcatacgtttcacccgtccaatagtcaatccacttaccctcgggaagggttacgttcatatcgaataccgcgacaaggaggctgtcaccgagcatatatgtattcgccacataatcgtattccggaacatcgggatacatgagcgagagcgcacgggcaatcggcagcgcggtgcgcgccgccttatgcgccatggaatagatatacgggaagagggacgagcgcagacgtgcgtaatagcgaatcatgtcctcaagctcctcgcgcaggaaccacggctgctgccaatttcgccatccgagctgctgggtccacggagaaaggaagccgtaatgtattccctccttgcgtgttacctccatatcgcacgaaacattggtgtgaccgctcagaccgtagttcagcattgcaactaccgtatcgtatccgccgccggtatctcctgcccatgatgccgcatatctctggcttccggcatagaagcacgccgtataaatgcacgcgcggcgtccgtcggtctgatcggcgaatccctcctgcatctgcttgacgtagatcgtcgggtatacgttgtgaacctcgtcgtcaaaatacttgccgccccagagtctgtcggggtgatcgttgacctggaaagctccgtcgagcttgaacgcacttgcgccgttatcgacaaactttctcaggtggtcgaaccacggagtgtctcgcacggtcaggttgtcctgatagcggggctgttcgaaatgcgggtcaaggatcgacgcgccctcataggaataatatacgtcgccgtatttcgaacgttcgccgacctgtctctcctcttcgtaaagaagatcgtaatcgttgcagagccaaaggctcagcttgaatcccatctcgcggaggttgtagaagaaggtccatgttccgctctgattctcctcgaaccatgtgggaaggtagaagcggtcgtcatcccactttttatcgatcgaggtatcgtagcatacgctcatccactgaggctcgagcccgaccatatcacacgggattccctcgcggcggaaggtcttgcagtcccagagcatctcgcgtgcgttcgtctgctcgttgaggacgaaggtatatccgtatgcaaatttgggaagcacggtcggctttccggaaatgcgggtatagagttcaagcgtatcggcgatcgaaccggattcggagacgaagatgtaaaaatcctcgttgcccttcggcacgtcgatggatattttaccgggatcggtgcagccgatatcgtaattctggacgtatgtgctgttcacgaggattccccagccgttcgagctcatgaaatacgggaccggtccgtaggatacgacgttctttacatcgatacgcgcctttgttccgcggcgcgcgaggctctcgcggctttcgtcgccgagaccgaatattctctcgctgtcgtcaagcgataccgttgccttatagccgcgtcccgcgtctccctcggcaaaggtgaagcgaagcggtgctttcgcgccttccatcacgatttctccggtgctcttgtaaagagtaaaagatgcgccgggtgcgtcaatctttaccgtgtcggcgctttcggtgacctcgggctcgatctctccgctttccctcagaatctcgtatctgttcatcaggctttcgcgaaattttccgtcgtgcgaaactctcagtctgaaaactcccttttcgacgcagcggatttcgcagtccgccgaattaagtttgattttgaacattcgaataagcgcagattgtctgctctccttaattgatctgtgtaattataacatacggcaaaatatatttcaagcgacagcgggatttttatcgttccgacacatcataaatcagcgcgcgatgtgcgacttcgttttcagaaaagcagagcgaatccgtgaaaagctcttctgccgcgggaaaaagcttcggatcggacgaatacatgacggcgacggtgtccccgatttcggcgtactctcccgtttttctgagaagccgcagtcccgcagaaagatcgatcgcactgtccttcgaggttcttcccgcaccgagcatgcaggcgcattttccgatgttttcgcaattcatcgacgcgatgtatccgcttctctttgccttcacctcgaagctgtacgcgggcgaggcaaacgatctttccggatgatctccgtcgtaatccgcgccctgcgcgcgcatccactcgcagaatttgccgtatgccttacggcttgagatcatttcctccgcctttttgcatccttcctcacggctcatgccgagcgcaagcgatatcatctcgccggaaagtgcgatcacaagcgaacgcagatcgtccggtccctctccgcgcaggacggaaatcgcctcgagcacttctatggaatttccgacggtccgtccgagcggtgtatccatatcggttatgaacgcgctgacacgacgtccctcgctttttcctatcgagaccatctcggacgcaagctttttcgcggattccggatccttcatgaaagcgccgcttccgtacttcacgtcaagcactatggaatgtgctcccgacgcaagctttttcgacatgatcgacgacgcgatgagcggtatgctgtcaaccgtcgccgtaacgtcgcgcagtgcgtagatcttcttatccgcaggaacgagatttcccgtctgacctacaagggctatgccgattctctccgcctgatacagaaattcatcgggagaaagcgaggagttatatcccctgacggattcaagcttatcgacggtgccgcccgtatgaccgagcccgcgcccggacatcttggcgcatataacccccgcactcgccgcaatcgggagaacagcaagcgttgtcttatctccgacgcctcccgtcgaatgcttatcggcgctgcgcgttccgaagcgcgaaagatcgatccgttcaccggaatcaagcattgcgcgggtcagggacaccgtttcctcatggctcattccgcgaagcactgtcgccatgagaaacgccgacatctgataatccgggatcgtacctttcgtgaagccgtcggtcagaaagcgtatctcgtcgtcggtcagttttccgccgagacgttttttctcgatgagatcgtacattctcacagcccgtcacctccgttttcgtctctgtcaagcgcaaatgcaagcgggagaagctcaccgagggtaagttcccgttccgacgatccggaaacgagtatgaccttgaaatccgctccgcagaattccgacatcacctgacggcatacaccgcacggcgcggtttcggctgaaacattcccgttcgcacctccggcgatcgcaatcgcctcaaattcacgttcaccgtccgataatgccttaaaaaacgcaactctttccgcacacacggtaggcgtatacgatgcattttctatattgcatccggtatacaccttacccgatcggcatagcagagccgcgccgacggaaaaatgcgaatacggcgaataggcattttccatcgccttctttgcctcggacgcaagatcttcatacttcatgcgcattctcctttttcatttaagcgtaaagcggtttttcgtaaagcttataagtccgtcgtccctcatctttccgagggtgtttgaaagagcacttctttccattgacagataatccgccatgccctgtctgtcgaacggtatgtcaaacgtactgcttcctgccgcttcggcgcagtatgagaggtacgacattatcttttccttggcgctcttcggggttatatgtcttattttattcgtgatctcggtatttttcaccgaaagcgtctttatcatatttttcatgagccgcacatgaaagctgcatatcgactcgcacggctcgagaagctttgcgctgtctatcagaagcacggtgctttcccttttcgtaatcgcggaaacggggagcgtctctgcgccgccgcacgaaaacgcctcgccgaaaacgtcaccggcttcagccgccgagatgagcgaacggtttccccaatagtcgtcatacacgacatacacgcatccgtcaagcactatccccacatactgcggacgatctccgtgggaaaacaccgtaccgtctttttcgataacgcgcaccgacggagagaggcatttaattatactttcaagctctcccgcggcaaagcccgaaaaaagaggggatgaagcaatgatcttttcatatctgcgataatccgttattccgggcatttcactctccgtttctcctcatgcgaggcggcaaaataatctttttttgataaagcgcggacgggcggcggcacttggtgcgtaatcggcactatccggatccggcacccgacccttccgaatataaaaacggtctgcaaaataatttttctacacataccgtatttttttgaatttcgttgttctgacaacggctttttcatcttcattatagtataattgatatgtcaaatcaagtgagataagcattttcggatattttttccgaatcgaagggaagaaatcatgaaaagaagaataataaaaatcgaccgaaacaaatgcagcggctgcggactctgcgccgaagcctgtcacgaaggcgcgatcggaatggaggacggaaaagccgtgcttctccgcgaggattactgcgacgggctcggcgactgtctccccgcctgtccggcggacgcgatatcgttcgaagagcgcgaagccgcaccgtatgatgccgaagccgtgaaaaagcatcttaaagcaagaaaagcgttcgctccgcctcacgcaggatgtcccggcagccgtgccgccttcatctcccgcgaaaatgatgcaaaaagcacggatcaaccttttacgccgtctcccggacgtctctcgcagtggcccgttcagataaagcttgtgcccgtcggcgctccgtattttaacggagcggatattctcatcgccgccgactgcacagcgttcgcatacggatcctttcacgaggactttataaaaggacggataacactcatcggatgcccgaagctcgacggtatcgattactccgagaagcttgcggcaataataagcggaaacgatataaaaagcatcacggcggtcaggatgcaggtaccgtgctgcggcggtctggtcaacgcagtatccgaagcgatacggatgagcggcaaagacctttcgctgcgcaccgtcataatttcgccggacggaatgatcgtcggcgacagataaacaggacttattaattataaaggagagcttacaaatgaagattaccaacgacatcacctacatcggagtaaacgacagagtgatcgatctgttcgaggggcagtaccgcgttgaaaacggcatggcttacaactcttatctcatcaaggacgacaagatcgcggtcatggacaccgttgacgcgcacttcacacacgaatggctcgacaatctcgagaaggctctcgacggacaaaagcccgattatcttataattcagcacatggagcccgatcattcggcaaacatcatgaatttcatgaaggtatatcccgataccgttatcgttgcgaacgccaaggcatttacgatgatggggcagttcttcggaacggatttttccgaacgtcagatgaaggtcggggacggcgattccctctcgctcggcaggcacacgcttaattttgtgaccgcgcccatggttcactggcccgaggtaatcgtcacatacgacagcttcgaccgcgtgctcttttccgcggatgcgttcggcaagttcggcgctctcgacaccgacgaggattgggcgtgcgaggcgcgccgctactacttcgggatcgtcggaaaatacggcgcgcaggttcaggcacttctgaaaaaggctgccgtgcttgacatcgggaggatctgcccgctccacggtccggtgctgaccgagaatctcgggtactacctcgggctttacagcacatggtcgtcctacgaagcggaatccgacgggatcatgatagcgtacacctcggtttacggaaacacgaaaaaggctgcggaaaagcttgccgacggtctgcgcagacgcggcgcgccgaaggtggttcttaccgatcttgcacgttccgatatggcggaggcggtcgaggatgctttccgttatccgaaacttgttcttgcgacgacgacgtacaatgcgggcatattcccgttcatgcgtgaattcatagaagagctcaccgagcgcaactatcagaaccgtaccgttgcgtttatcgaaaacggaacatgggcgccccttgccgcaaaggtaatgaaagggatgcttgaaggctcaaagaacctcacctttgcggaaaattccgtccgcataaaatccgcccttaatgccgaaagcgaagcgcagctcgaagcgctcgcggacgagttgtgccatgagtatatcgagcgtgacggagcatatgcaaacaagaacgatctcaccgcgcttttcaacatcggatacggtctgtacgtcgttacttcaaacgacggacggaaggacaacgggctgatcgtaaacaccgtatcgcaggtgacaaatgccccgaaccgcatagcggtcacggtaaacaaggcgaactactcccaccatgttataaagcaaaccgggaaaatgaacgttaactgcctgtcgattgacgcgccgttctcggtgttcgagaatttcggattccgcagcggacgcagtgcggacaaatttgagtcgtgggacattctccgctccgacaacgggctggtatttctcccgaaatacatcaattcgttcatgtcgctcaaggtcgagcagtatatcgacctcgatacgcacggcatgttcatctgctccgtcactgaatcccgtgtaatctcgaaggctgagacgatgacatatacctactaccagagcaatgtcaaaccgaagcccgaaacggacggaaagaaaggctttgtctgcaaggtctgcggatatgtatacgagggtgacacactgcccgaggatttcatatgcccgctctgcaagcacggcgccgccgattttgaagaaataaaataaaagcgcgagctgtagattcacacgcaaattcaccggcagatatgcgcagcgcatacggaaagatcccgaaggatatccttcgggatcttttttatcttttgcggatattgaccgtggctgctttataacgcatcacggaaaggagaagtatatcgttcttctgccgtgaagcgaaaaatcactcgtatgtaccgttaactttgtaccggatacagttttacccgaacgcgccaaaaaacacttacccgattccgaagaaccgatcaaagaacgctctcagcttttcgatgacggtccgctttttatctgcacggttaccgccgccgaaccgtgagatcggcggcatcaagccgtcgatgtccgtacctgtcgtttttacagaaccgtcacggaaagcactgtccataaagcggcgagtctccccgtccttcagattttcttcctttatgattgcggcgagctgccgttccttttcctcggcaacaaaggttcgccattccagcatcacgtccgacacatcgttgataccgttgataaaggtttcaataagcgcttttttgctgcgcagatccgggcttgcgtccacagccttccggatcgtaatgagaatttccttatcgtcgcagtgggaatcgtgatacttttggacaagcatcagaatatagtcgatattgatctcgatctgcttgatgagttcaatctcaaaaacaatatcgtccgtgatatcctccttttcgccgccgggtttacggtttttccactcgtctcgcagatcctgatagcgaccgaggtagtcctggaaatccctctcactcaagatttcatttccggcaaattcatcaaaagaggtcagcaggttacgcatccgcaggattgcgccgaacaacacgataaattccctttggaactgttcgcctgtgatacgctcctccgacagcgggaacttagccgtcagctcctcgatcatatcccgatagcccgtatggtgcttcccgtcattatcttcataaccgaagtaataatccttatatccccgcatcagcacgatgccgcccgcttccttgtctccgaaaagggagatggcgtcgtcggtgcgcttttgcagattacggaagcacacgatgttaccgaacaccttgatggagttgagaatgcggttcgtgcgggaataggcctggatcagaccgtgcattttcaggttcttgtccacccacagtgtgttcagcgtcgtcgcatcgaagccggtcagaaacatattcactacaatcagcagatcaagctccttgttcttcatccgcagagaaacatccttgtagtaattctggaacttatccccgtccgtagagtagttggtgcggaacatctcgttgtagtcacggatggccgcatccaggaaatcacgggaattccgatcaagtgcagaggtgtcctccgggttctcctcgtcgaggattccgtccgtttcttcctcgtttgcgccatagctgtaaatgaccgctatcttaagcctgcgctgcggatgctctgccatttgacgctgaaactcggcataatacagcttggcagcatcgacaccggacacggcaaaaatggaattaaacccgctgacacgctgcttctgtttgatctcatcgatctgctgcctgccgcttgcggaagccacttcgctaacgtttttcagcacactgaaggtgtaggtcttatcgccacgatatgttttcttgtcaaagtgcgtcaggatataatccgtaacaatccggatgcgctcgggagcaagaaacgctttttcccggttgatgtcccagacttccttgtcgtcaatatccggctcggcctccatcgtcttgatgtaatccactcggaagggcagcacgtttttgtcgttgatagcatctacaatcgtgtaggcgtgaagttggtcgccgaacgcctgctccgttgtgcggatggggctcttgctcacgcccgcattgactgcaaagatgggcgtgccggtaaagccgaacagattgtacttcttaaaatacttggtgatagcctgatgcatatcgccgaactggctgcggtggcattcgtcaaaaatgatgactacccgcttgtcaaacaccgaatgtccggcgttctttttgatgaaagtcgccagcttctggatggtggtgataatgattttggcgttgtcatcttccaactgacgcttcaggaccgccgttgaggtgttgctgttggcagcacctttttcaaagcggtcgtattccttcatcgtctggtagtccaaatccttgcggtccacgacgaacagcaccttgtcgatgtagtccagtttcgtggcaagctgcgctgtcttgaaggaagtcagcgttttgccgctgcctgtggtgtgccaaatatacccgccgcccgccgcggtgccgtatttcttgtagttgtcggcgatctcgatgcggtttaaaatgcgttcggtggctacaatctgatacggccgcatcaccagcagcatattttccgccgtaaacacgcagtaacgggtgaggatattcagaacggtatgcttgcagaaaaaagtcttggtgaagtcaacaagatcggggataatgcggttgttcgcatctgcccaaaacgaagtgaattcaaagctgttgcttgttttggacttcttggtcttctgtgtttttgcatctttgacatgattgaaacgggtggtattggaatagtatttcgtattcgtgccgttggagatcacgaagatctgcacgaattcatacagcccgccggatgcccagaagctgtctcgttgatagcgatcgatttggttaaacgcctcccgaatgggaacgccccggcgcttcagctcgatatggatcagcggcaaaccgttgaccagcaccgttacatcatagcggttatcgtgggcagcgccctcctcggcggaaacggtatactgattgataagctgcaggctgttgttgtggatgcactttttatcgatcagctggatgtttttgctttccccgttgtcccggcggagcacctgcacatagtcctcctgaatcaggcgggtcttttcgagaatgccggagttggtgttcgccagcacctcattccaaaagcgcttccattcgccgtccgtaaaacggtagttgttcagcttttccagctgtgtgcgcagatttgcaatcaggtcggcttccttatggacggtcagacgctcatatccgagctcgcaaagcaggcggataaactccttttccaagtctgcttcgctctgatatgcctccgagcgcttcgactgcggcttgtattcggtgacaacagtgctttcgctgctttgggcgacgatgttgaaatacggcataagttagcccccttttacaactgctataatagcaacaatcatagaaataaatgaactcagtgcagcaaatatggcatataaatcgttgcgattttccattttacttgtctcaacgccagccattttgaaaactcttgacagagtaaataagaatacagcataaacatccaacagaataaacttccaccaagaaatgtttccaatctggggcaaaatcagtgtaacaataggatatataaaaagtgctaaagcgactaactccaaaacaaatttaagaacatggaaacaggctgatgtcaaattctgaataattgcaaccgaggctcgatcccctttgatgaaatgtttattaacaaacattgcacgggcaaccgatgatattttgttgcaaacaccccttaggcctgttttgtttttatcataaccgattgccttatgccattcatttaactcctcggcttttccggccgcctcgcgtttaactctgatatcctccgcttcaacaattgctttggcaatcaagtgttgaagttcgtctgccgatatctgtacgggagcagcgcttacatgatcggaagttggacattgtttggttttgctttttgttttagacttctttccattgctcattggtcgatacctctttaaatgacaataatttatcgcggtaaaattcatattgtttttgacgcgcttcaatctccgcaggcagaccgatattcagatcggagcagatggcatcgaagttgtcgaggacatcaacgaggcggttttggacagaaagtgacggcaccttaatttttatctttgacaagtctatcttgttaagtgccggagttcccccttcatttttcaataccaatatatctgaagaatgacttattaaccaatgatagatgtatttatttatgataaactcttgcttttggctacgaatggcataacacaaaggaccgagataaaacggtttactttgatacccaacatatccgattccaccttgccctcttgaaggagtggtgacggtatcaccctcacaatttggttgttttgtgtatcccgaattacccgtaccggcattaatgtattcatattcggaaattgtatccaaaagctcatcgggcttacttcctgtatatatgtccgcaatatcccccaaattgcacattgctacttgctcattgctcattgtcagcagttcgtcccgataatacgcatactgctgtttccttgctgtaagctctgctgtaagctctgctgtaagctctgctgtaagctctgtgaaattgtccagtatacggacaatttcacgctgcaccggcagcggcgggacggggatttgaaccttattcaaaactgtctgcgtaagacttggaacaccaccagcagtattgtattgttcaagatgttccctttgcaaacaatagaaaaggtatttgggcgcgatccggctgctatcaatatctgtgtaaaaaatcgtatcaacattccagaatggtgtttcgacatagtatagtttatcgacagaaccttttctggggattaaaacagatggcttgtcatacgaaaactgatctacatatgtcataataccgcctgagccataaacaggaactttacccgttcctaagtgtttgtaatcgcttccgttcttgatggtaagaatttctcccaattcacaatattctaccccattggggcaaaactcctgaattagttcatcaagttttgtcatctttctcaccttcttctaccatttgacgtgcttgtgtaccatgttgtacttgcgtgattgaatcaatgaaaactttttcgtaagttgcccttgcaaaggtaaaacaatatagcgcgttaggaactgatatataaatctttttccaactatctccggcacgaatgctctgcaaaaattcaagttcatcttgcagcatagaatcatctgcataaactgaggaaattacaaaaagatgatactccccaagctgcaaatattctgcatcctgtagtttttttatttttccctcgactgctttatttaccaaatcaaaactgtttctttccgaagtaaacaacataccatcttcatattttgctccgcattgcctaatacgctcaattttcctttgtttttcactgaaatctgtatacggcaattgggaatataagttctccgcttctaatgtctctttcttttccgctactgtcacttcgatacctatattatttgatggagactgtagatccggtttatctgccaacaccaaaccattaaattgctccgggtagagactttctaagacaacttttgcataacattcattgtaatctcgtttcgtgtgcggaggtaatgggcaatctttttcaatcttagccatagttatttctcaagttcgctgatcattgccgatttcagcaataattcgatcaatttcctctctcaatttctgctcccgtgcgacgatttcggcaatttcggcgttcagttttacaatgtcgatcttctcacgggtgtcctcctgctccacataggtggaaacggagaggttataattgttctgcttgctgccgacctcgtcgttcggcacgaggcgggcaaagtgctgctcatccctgcgctccgccacgacggacacgatgcgccggatattatcatcggaaagccggttgttctttgtgaccttcacaaactccttggaggcatccacgaacagaacggcgttatccgtcttgttctttttcaacagcataatgtcaacggaaatcgtgacattcaggaacaaatttgatggcagctgaatgacagcgtccacataattattatccaccagatacttgcggatcttctgctctgcgccgccgcggtacataatacccggaaaacaaacgatagcagccgcaccgttggaagccagccacgaaaggctgtgcataataaatgccatatcgcccttggaatccggagccagcaccccggcaggtgaaaagcggggatcgttgatgagcagcggattttcacttgcacgccacggcacggagaacggcggattggacacgatcagttcaaacggctgatcatcccaatgctgcggactgagcagcgtatcctcccgcacgatactgaatttgtcaaactcgatattatgtaagaacatattgatacggcaaaggttgtaggtggtcaggtcaatttcctgcccgtagaagccgcgttcgatattctcttttcccagcactttttccactttcagcagcagagagccggagccgcaggcggggtcatagaccttgttgaccttcgtcttgcctatagtaccgagacgggcgagcagctccgaaacatcggcaggtgtgaaatactgcccgccttttttgccggcgttggcggcgtacattcccataaggtattcataggcatcgccgaacatgtcggggttgatgccgtcggcggagaacagcggcatctgtgccacgccgttcaaaagctctaccagaaccttattgcgcttggcgacggtttcgccgatggccttgctgttcacatcgaaatcgtcgaacagtcccgcaaaatcgttttccgcatcgccgctggcggcactgctttcgatgtggttgaatacccgttccagcgtttcgttcaggttgtcgtccttatccgcacgggcaaggacattacagaacagttccgaaggcaggatgaaaaagccctttacctgtatcaaatcctcacgggcaggctctgcatcggcgtcggacatcttggcataatcaaagtccttgttcccggcggcgtgttcgccttcgttgatataggcagtgaagttctccgaaatgtagcggtagaacatcgtgccgagcacataagatttgaaatcccactccgccacatgacctgcatgaacaaggtcggttgcgattttatagatgcggcggaacagctcgtcccgctcatgatcgttatttctgtcagccattattgtcactccttccggaagattagcaatattataccataaaattatcattttctcaacaccatttggaaaaagcggaacttttttcgtcgtaaaagcgggtttaacgtgatcgccctgacgatggtaagtctttgcagaggcaataagacaaaagaagaataaagatcgaacagacaaatgctgctccgaaactgacgtaaaaaggaaacgcgagcgttagggcaagcatttactttgcttccgcgggaacgttcacgtttccaaagaaaaatgatatgcaggctgccgtgaaggaaattcgtcaaaattcacagcagtccgagcattctgcataaagcaggctgcggagcattccctttcccgggactgcaccgcagcctatataaaaactttgttatgtgtccgagcgtattacacgaaggatttccatcaagcgccgcggtgttttatttgagcattgagatcgcgtcgatgatcgttttttcgtaagcttccttgccgtacttatcgacctccgccttgtttttctcgccgtgagtcaggcatcctgcgccgccgatgcatccgccgacgcacgccattccttcgatgaagttggcatcggagagatttttgctctttttgagcagtgccacgcggcatgcctctatgccgtcgcacgagcatgctttaagctcgaagtcgtcgagtccgtgttccttcagaccttccgcaacagcatccgaaagacctccgcagcgtgcgaaaattcttccgaaatacgatgcgttatcgagaacgtcctcttcaagcccggttatatctatctcacggctgtcgaaaagcgcctgaagctcctcgaaggtcatcgcaacatcgacatactgtgcaacctccggcttctgcacctcggcttttttcgccgtgcagggtccgataaacacgacctttgcgggggcttcgtgctccttgatatactttgcgatggttgccatcggtgaaagattgtgcgagacgaacggcaggagatcggggaacgacttctcgatatagcttacgaacgccgggcagcaggagctggtgaggaatcccttttcggcaagctccgcggattcggcatatgcgaccatatccgcaccgagcgcagcctcgacgaccgtatggaatccgagctttttcagtccgcttataacctgcccgagcttggcatatgtaaactggctcgaaatcgacggtgcaatgaccgcgaacaccttatatttagtgttgttctcgctcttctttatgatgtcgatcgcatcgaggataaaggacttgtcggttatcgcgccgaagggacactgataaacgcaggctccgcagcttatgcacttggaattgtcgatcgccgccgccttgttctcgttcatgtgtatggctttgattttgcaggcgttctcgcacgggcgccgtctgcttataatcgccgaatacgggcacacctttgcgcatgagccgcattccttacatttcgtcttatcgatatgcgcgacgtgattctcgtcgaaggaaagcgcgccgaagcggcagacgtcctcgcatctgtgtgcgaggcagccgcggcaggcgttggtcacttcgtaaccgcccatcgggcactcgtcgcatgcgatctctatgacctcaatcacattgggattgtcgctgtcgccgcccattgcgatcttcatccgttccgtaaggatcgcgcgctccttgtatacgcagcagcgcatcgtcggagtgtttcccggcacgatcgtcgtaggtatatcaagcaggttatcgagcagtgtatcgttccacgcaagctttgcgacctcgcgcaggaccttgtatttcagatgctggaccttggtatcgaattttctcatctattatctccatcccgccgccgtgcggctgcaaaaagtaaaacggttgtgcgcttatcagaaatagcttacctttattctcttgcccattttcttcaggcattcggaaagctcttccacaagattcatctttatattgaagtttatcggaagatcggggttctgatgagccgggttgaccgcgcgtccgacatagaagtttatatcggttgcctcctcgaaaagaaggcggcagatcatagaagctccgtctcgtccgagactccatttttcgtaaagctcatttgagccgagggcatcctttgcgtattcgatgaccctgtttatcgttattacgccctcggtgacgagatcgactccttcgatctcggcaatcggcggaacatcgctcgactcaaacgaaaggctggtttttacggtctttccgaggtactttgcggcgatcgatgatgtggttccgccgcatacgatgtgtttcccctctttcgagaagaacagcgacatcatccggtcgcagtcatcgcggttgcgcggaggtccgaacaggatgttcatcggctctctccggcgaacgcggacaacacacgcggtcgcgtcgtctccgggatgaaagccatacagcttattgcactcgtccacaagcatcgtggaaagagtttttgcagtatatcccgcgggcacgacagcctccataaaatcggttatctcctcgaccttccacccgaaattataggctattcctattccggcgtgggggcatccgtcgctcatcgcaatgaagacatcgccctcctgaagggtcacgcccgagctgtatatcttctttccgtcgatattcagctcggttttcggataatcgtaattccttccgtcacgaagcataatcacgcacggattgtcatactgcattatctccgccacggtattgtcgatgaggtgtatgaccgtaaacgtggagtatgcgacaccgcggaccgagcatatcggaagagttgcggcaatcgtggaaacgcattcctcaagggaaagcccctccgccatcatcgtagagattatctttgaagtgagcgtggaaagaatgctcgccttcactccgctgccgagcccgtcggcaaggacgatcacggtggagttttcgccctgctccactatatcgacatgatccccgcatagctgctcgccctcgtgattgatgcttttccagccgatatcggcacaaagattattcatcgctgatcgactccttcagcttagtcagcgcgatcttcgtttcagccgcggtttctccgagcagagatgcgatctcctgaacaatcctcatctgcttatcgacgacgcggtcggcgatctcgactgtctgccggctgatatcctctttcttttcgcgctgcagctcctcttcggtaacatcacgcattatgcagataagatgccgaccctctttatcgtagaccacggtctcttcaacatatttctcatattccgcgaggtaaatgcgcttattgtggatatcctttccgcggctgagcacgttgagaaaatctccggggtcgagtatgcggacgacctgatctccgagaatatcggaggctcttctgatgttcagtatcttcagcgcggctttgtttatctgctgaacctcaagtttctcgttgagcacgataagaccgttcggcgtattgcgcactatcgtatcggagaagctttcggcgcggtccttaagataaggcaggcacatcgatatctcggcctttccctgacatacggctatcgccttctcgcggcaggtatcgtatccgcacgagccgcagttgagctcatcggagggcttgaccttgcccatctgacgaagtgtttcccttatctcgtcctccgtcggctgcttcagcttgcgttcaatgaacgtaaacgtcttttggagcgacagcgcatcgggctgatcgacttcaaaatcacgatttcccgcaaagcgtgcgacggcgacataatccttgacgggcgaacggtggaatttctccataacggggccgccgacgcagcttccggaacaggcggacatttctataaagcatctgtgcagttttccgctttcgatatccttgagcgcggatatacagttttccgtcccgtcgatcgccatatatgtgtagctcggattctcatgcgacagcgttttcagtattccgcccgtcgtcgggaaaaagcgcgcgcggctgttcccgtttgcgtttatctcctgcttcagctcgatattttcggacttgagccatgcggtgagctcgtcgaacgtaagcaccgcatcgacgattccctcataatactgcgcttcatccttttttgcgacgcagggtccgacgaacacggtttttgcctcgggaatgcgtctctttatatccttgcagtgcgcctgcatgggggaaagcacggacgcaagataaggaagctccgccgggaagtatttctgtataagaagattgaccgagtggcagcaagatgtgattataatgtcgcgggtgttctcgtcgatcattctttcgtattcgttttttacgatcgttgcgccgatcgcggtctcctcggcatcgaagaagccgagctttttgagcgcttcgcgcatggactcaataccgacgccctcataatttgcgacaaatgaaggcgcaagacttactatcacgggatcgccgctctggagcagaacctttaccttctcggtctcgtccacgatctgctttgcgtcctgaggacatacaacaaagcaatgaccgcacatgatgcattcgtttcctattatgtacgcctgatttcccgaaaagcggatggatttaacggggcagtgacgtatacatttataacagttcttgcagttcgattttttcagtgtaaggcaatccactgtttcaatttcctccggcagatattttgttcaatattttatcttcgaaaaacgtattgaaattatcgggagtaactccgacgaatatttcgtcgtcaaccgtgatcgtaacgccttcgcggttacattttcccgcgcagaagcttccggcaagggtgatctcgttttcgagtcccctctccgcaatcgcattctgaaaaagaccgacaagccgctccgagcctttaagatggcaggaggaaccgacgcaaatctgtacgaccatgtcagcctacctttgcaagcacgttatcgttgaagaactcgtcgaccgtctcgggcgagacggagtggaattcgccgtcaacggtaacgcagacaccctcctgacatttgcccatgcagaaggttcccgcaagatcgacctttgagttaagggagttctcgtgaatgagattctggagacgctcgacgacctgacgcgagcctttgatgtgacatgaggatccgatacaaactgtgattttcattatggtaaaccctttccgtattttatatttctatttcgtttttccgcccgcggcgggatttttcggtttcagttttcgcttatccagccgtttagcatatcccttgcgctgtccccgcactccacgctgcgggtcgcggcaacgatcgggatccagcggcgcacatactcttccgccgttttgcttttctcgcagaaaagcgaaagatacttgtccgcgcccgtttcgtctccgtcaaggagaaacatcagatatgtattcgcggcatcggcggcggcgttgccctgcgtcgcgtgcgaccagtcgagaatgtacggctctccgtcctcggagatcagcacattcgaaggattgaagtcaccgtggcacaccttgctgtgcttcggcatcgcctgaagtcttgtgtaaagatcgtaccgctttgtcgcgggaagatcagccatatttatctttctgctcattctgtctctcagctttatgagaagcgggcaggtcttcgaatgcatctcaagctgaatatcaacgagcttttcgaggtattcgttctttcgctccggctcttcctccatgagttccgaaagagtctttccctttatgtactccgaaacgatcatgagctttccgccgtcgagaacgacctcaagcaccttcggaatcttcagcccggtctcctcagctctcgcctgattgagcgcctcgttcagaacgtcagccttcgaatagtagtccgcgttgaacaccttcatgcagcattcgccgtcgcggtacaccgttttatcgtttcttacggcaataattctgtcaaaattcattttcggaaaattcctttcattctcactcgccctgctgcctgtttatctgcattttgagatgcgcaagcgaaagagccatgttttcatactgcacaacggtatccggcggagtatacagccggcacggcgcaaagcaccatatcgcccgtatcccgttatcgcagagcgcattacacgcctgctgcgcggcttcctcaggtacggctatcactccgatcctgacatcgtgatccgcgcagaaggaggcgagctttcccatcgaaagtatgggcttccccttcggggaaagcatatccgtacaaacgtttacgtcaaatgccgcaagcacggacatcccgaatttttcaaatccgccgtaatcgagaagcgcgcgtccgagcttgcctgcgcctattatgaccgttccgccgtcactgcagccgaggaagctttcaaggctctttatcagctcttcggtcacatacccgaccttcggctttcccgagccgcacagcactccgagatcttttctcacctgcacttctccgagtccgagaccttttgcaatattcgttgccgaaacggtatgcgtctgcggcgaaagtcccctgacgtactcaaggtacgcgggaattcttccgagagttgcgcgcgatacatccgattccttcaaagtgacacctccgtcggacacagtctttcaattttaccgcttatattatatcaggggttcatgctcttgggaattgcctcttttgcatatcggtattgcttttatcgatatacccgtgtgcgaaataaattcccgtgccggggcgcgcgtttgttttgcgttttacccgatctcaaaactgtcggttatatctccgccgtcgagctttttccagagaaagtgcccgttttcaagggtcatataggagcggacgctcccctccttagggatcgacacggagcccgggttcatgtaaacataggtttcgtactccgtgcatttcggtatatgcgtatgtccgttcagaagaatatcccctttgcagagcggcggcacgttcgattcgttatacacatgaccgtgcgtggcgtataccgccgacttgccgaggtctatcaccgcgtaatccgcaagcacgggaaaatcgagcaccatctgatcgacctccgcctcgcagttgcctctgacgcacataatgcgttctttcacggcgttgagcatggcgatcacctttttcggagcatattcctccggaagatcgttccgcggtccgtgataaaggatatctccgagaaggagaagccggtcggcgccctccgcgtcaaatctgtcgagcagtcggaggcagcacgaagcactgccgtgaatatcggatgcaataagccatttcatttttcgttgtacgcttccgcggcggaagcccctttctttatctgtacggcaaaaatgccgtttttattataaggtctcgcgcttcacgccgacaagccgttctatgaacaatcggtcgaattcggaaaggcagtgatcctttctgtggataaggacatccttgaagagcgcggtgtcatcggtacattttttctgcacaagtccgtatttttcaaggacatctttcggcacgggggacgtgcacgcaaacgcatacggatttgaagaaaggatcgaaagaactgccgcgcggtcgaaaacgtgtatatatctacgctcgccgtccgcggattcaacattatcgcgctccgcaggaaacggcggggcatcaggcgaatcatatctgtccgtgtatacgacctcggcaagctccagcaactcttcgcgcgtgacgctctccgaatctgcaagcggggatgccgaattcattatcaccgtcggagagaattcacagataagctcataatcaagctcttttgaatcgagaaagcttttgtattccctgtcccgttttgcctcatatctgattattccgagagcgcattcctcacggatcacgcttttcaccgtctgagccgtatctgcctccctgaaaaacagatcggcatggatttttccgtcggcccatcccgaaaaaagcgcaaaggcttcggcgatataatcagcgtgcggcacagagacggaaaagcgtttccgctccttcccgccgccgcggaacatattttccatgctgtccacctgctcgagtatgcttcgcgcacgtcggatgaattcctctccgctcggagtgagagtcatccccttcgaactgcgctcaaaaaccgcagccccaagcgaggtctcaagctctttgaccgcgcggctcaatgcggactgaccaacataaagcttttccgctgccttattgatcgacttcgtttctgcgatggttacggcgtatttcatatgaagtaggttcatatatccccctatacggaatcactcacaataagtatagcacaatccgcttttaaaatctacggatatgcgccgtttatttgcgtttttttgagttttttgatataaggaccgatattttcgacaatgcggtgcgtttcggggaaatgtccggagcagaggcggcgaaatccggcgcttatctgaagtacgcagacttccggcgcaaagccgtcggcgcatccgaaccttgcaggtgcgccgtaatgccgatcgggaaaatccgttgcggtatcgcgcggagattgggaaaaaactcgcggtaaagtcgtaaaagcggcggctttttcgaagaaagccgccgcttttatcaattttattccggacaggtccggggcactgcgatctttccgcagattgcagagatgctcagtgcgtgaggaagaacatcgcaaggaacagcacggtgattacccatgtgccgacctttacttccctgatctttcctgcgaacaccttgatcacgacataggagagaagtccgaaagcgattccgtaggaaatgttataggtaaacggcatcattgcaagggtaaggaaagcgggaaccgcagaggaaacatccttccaatcgatatccttgacgcttcccatcataagaacgccgacatagatgagggcggcaccgtacgcaaaagcgggaatcagctttgcaagcggagcgaagaaaagtgcggccacaaatgcggcggatgtgacgagagaggtaagaccggtctttcctcccgcagcaactccggcggaggactcgacgaaggtcgttaccgtggacgtgccgagcgccgctccggtacaggttgcgatcgcgtcagccatcatcgccttgttcatattcggaacctcaagctcgcccctatcgttctttacgagcagatcgccgccgcggcatgcgccgtacagagttccgagtgtatcgaacatatccaccatgcagaatgcaagcgccgtcgttataaaaagaatgacaagtccgccgactgaatgtccttccgtgccgagatatgccgagaaatcaaatccctcggtgaatacctttccgaaggattcggaggcaaatgcagtgaacggcttgatgggatcaaacgtgaaagtctcggcaaaggtatcgtagaagccatccaccgtaaagccgaggatgtaatacagtgcggttccgccgagtattccccaaagaatggagcctttgatgtttctatatgccagaactgcgatgagcagaagagagaatacggcaacgatcagcggcataacggacgcccaatccgcactgccgatgaagttgaacgacgcaagcgtaacgccggtcgattcgctgggaatgacaagcttcgcatcctgaagaccgaggaaagcgataaacagaccgattcccgcggggattgcagtcttaacgacaggcggaatggcttcgaaaataattttgcgaagtccggttgcggtcagcagcacgaaaataagtccgtcgataagcacgaacacaagcgcgtttgcgtaggaaaagccgagagtaaggcataccgtatacacaaagaacgcattgagtcccattccgggagcctgcgcaagcggcaaattggaaagaagaccgataagcaccgttcctatgatggcggaaagcgccgtcgtaacatacatggcgtcgaacgataccacgccgagagttgcaaacattccggagtttacgacaagtatgtatgccattgcgaggaaggtagtcaatcccgcaatcacctctgttctcggtgacgaccccatttcattgtaccggaactttctgttccagaacgagcttttttgttctgcgttactgtttttcataaatcttttccctttccgaaatatatatttgattggttgccgacaatgatttgaaatatcccggaatgattcccggcgaaaattccgcgccgcctttttgcggcgttacggataagccgaaggcttccggaatcaaaactaaggcacacttatcccacgataagtgtgcctaaacggtaagttcgaaacaattctcgctccgtgcagcgcccacttcaatccgtcagttccaaagacgttaatgattatatcacagtaagttcatcttgtcaagcacggcgcgtcacgaataatatttttgcgtattccgccgaataccgaaaaaacgtgtcggattttatcagtagttttcgcttttgagctcgaaaaagccctgagaatgaaggcagaccgggcatatctcgggcgcggacattccgaccgcgatatgtccgcagttgcggcattcccagaccttgacctcgcttttatcaaaaacggacgcgctgtccacattacgaaggagcttgcggtagcgctcctcgtgatgcttttcgacctccgcgacaagtctgaacttcgccgcaacagcgcgaaagccttccctttccgccgtctccgcaaacgatgcgtacatatcggtccactcgtaattctcgccttccgccgcgttcagaagattatccgccgtatccccgagaccgccgagctcctcaaaccacagcttcgcgtgctccttctcgttatccgcggtccgctgaaacagctcggcgatctgctcgaatccctgcttttttgcaaccgacgcaaaataggtgtacttgctcctcgcctgagtctcaccggcaaacgccgcgtaaagattcttctcggtttcgctccccgcgtacttccccgtattcgccatgacttttctcctttaagataatgtatcggaaattttccgtgatatattatcgtcacgcaaaagtcggttttatacgcatggcgcgtacttctccgcttgggcaaaacgcttttttgcttctccgccgacgtgcatccggatatacaaaagtccgcagacggcgaccgtctgcggacaaaagcactgtatttttttcggcgcgccgttcaattgcacacctcaagggactgagcctgacggagccacagcgcggctgttgcgtcgctcggcatacgccaatctccgcgcggagagaggcagatgcttccgatcttcacgccgtccggcaggcagcttcgcttgaactgctgagtgaagaatcggcggtagaacgtcacgagccactttttgatcacgtcgggcttgaaatcgttttcgaacgcgcggcaggcaagcgcaaatatcttctccggctcaaatccgtatctgagaacgtaatagaggaagaaatcgtggagcgcatacggtccgacgatatcctcggtctgctgcgcgatctcgccgttttcgtcgggcggaagaagctccggactgatgggcgtatcgagaatatcgcggaggatatcgctgctgcttctgaatatgtcgtattccattatgctgtcgatcatccagcggacgagcgttttcgggattccgcagttgacgccgtacatactcatgtgatccgcgttatatgtgcaccatccgagcgcaagctcgctgaggtctccggttcccgctacaaatccgccgatctttccggcgtagtccataagcacctgagtacgttctctcgcctgcgaattttcaaaggtaagatcgaatttgtcgggatcgtgtccgatatcggagaaatgctgctcaaccgccttttttatcgggatctcaagcgcggtgatgccgaggcttttcattagtgctagcgagttgttgtatgtacgtcccgtcgtgccgaaacacggcatcgtaataccgacgacatcggtgagggcccttcccgcacggcgcgccgcctctgtgcaaacgagcagtgcaagcgtggaatcaagccctcctgacacgccgatgaccggacgtgcgcccgttacgtccatgcgctttttaagccccatcacctgcatttcgaaaatattcatgcatcgctgtgcacggtcacgtttcacgtcgggaacgaacggaagctttctcaccggatagaacgaaaggtcacaccccgcggaaaatgcgcacggaatcgaaacggttctgaacgaggacgcggatgtgttctgctccgcgcagtcggaaaatgtctttattttgatcctgtcggcacgaagctttccgaggtcgatgtcgctgtaaaggatatagtcggtatcgacggtcttcgtgttctccgcaaggactctgccgttttcacagacaagggtgtgtcccgagaaaataagatcggtcgtcgattccgtgcagcccgcggaaacatagacatatgcgccgagctgagacgccgactgctgctgtacgagcgaacggcggtagcggcgcttcgagatcgtctcgttgctcgccgaaagatttattataacctccgctccgccgagcgcaagcagacttccgggagacaccgtcgcccaaagatcctcgcatatttcggcgccgaagcgaaacgttccggtatcaaatatgagatcgcgccccgcggggatactttccgactgaatttctccgagtccgagctccgcggcggcaagtgaaacgctgccgaggcgcactcccggagtaaaccaccgcttctcgtaaaattcattatatgtggggatatacgttttcggcacaattccgtaaagacgtccgcggtatatcacggcggcgcagttataaagcgcgccgtgtatttcaagaggaagtcccaccgcgatcacggaagaaaaggcttcgctgcacgaaacgatctttttcagcccctctctcgcggaacgaagaagggtctgctgaaagaagagatcggcgcaggtatacccggtcagcgcaagctccggaaaaacggtaagctgcggggatttcttctcagcctcgtcggccttttcgattatgcggtccgtattctccgcagcgtttccgaccgcaacgtccggaacggcggcggcaacccttataaaatcaagcattgtattcctcccgtactgtcataccgacggcaaaatccgtttatattataccaccgctcacgcgcaagttcaaccgttttttgaatatgcgcgaaattaaatcgtcgtgcggcggacgcgcggctgcatgaccgataccgcagaatagtccgcggcgtacagccgtatatccggcaaaacgccggagcagcccgcctttatgcggactgctccgataccgtattcccgaattattcagctttcgagctgctttccgagaaacagcgccgcggtctgtatcagtttttcctcgatgtcctcggcacatactctctgatcgcggtcggatattaccgaagcgaccgcgccggcgatatccccttcggcgatgatcggcattgcgcagcttacgaaggtatccgcgccttcggtaatgcatatcttttcggagctgtccttcgatgcgaaaaagcttctcttttcgatcaggtcttcaaattccgcgcttattttcctgtcgccgtaatccttcttcggaactccggcgctggcaaccaccgcgtcgcggtcgcatatcacgatcgcaagctggcaggtcttatgaagagtttccgcgtactgcacggcaaacaccgccagctccccgatcggagagtattttttgaatatgacctcgccctcgcggtccgtatatatttcgagcgggtcgccctcgcggatacgcatcgtgcgtcttatttctttgggaataacgactcttccgagatcgtctatacgtctgacaataccggtagctttcatttttacgatacctttctttgtttttttcgcggaaggaaaaatgctccgttcgatcttcacatgatgtgaagccttttctccgctgtatctgttaaatcatttttacaagctcatcttgccgtaatattgtttgcattaaatgaaaatttatacggatattaaaattttaaccgatgtggcgaaaaaacaagcgcggtgttcctgcgttccgttcggactgcgccggcggatgtgcgaagccttatcgggataccgaatcgccgtccgccgttcacttcgagttcacaaggtagggttcgacagattttcgcacataagcgtacaggttcatgtgaatattttataaagcaattattgttttccgaaatacaatatgttataatataaaaaataaccgatccgaaaggcagtcttacacggcatgaaaagaacaaagcttaacgacagaacgcttcccgattacacgaagggcgaagagattttcaatatggtatcccacatagtcggaggcgcggtcggaatatgcgcgcttgttctgtgtgtcgtgtttgccgcactgcaccgcaacgtgtggggcgtggtttcgtgttcaatatacggtgccgcgatggtgatactgtacaccatgtcgagcatataccacggtctcagcccgcgtctcaaagcgaaaaaagtatttcaggtgatcgatcactgctcgatatttcttctcatcgcgggaacgtacactccgatcgcgctctgctcgctccgctctcagaaagcgtgggtcggatggaccgttttcggcgtaatctgggggcttgccgctctcggaatcactctcaattcgatcgaccttgcaatgttcaagcgcttctcgatgatatgctatctcggaatggggtggatgatcgtgctctgcgcgaagctgacataccttgcaatcggagtatggggatgcgtatttctcatcggcggcggagtattctacaccgtcggctccgtgctctaccttctcgggaagaagagccgcagaagatacatacattcggtattccatctgttcgtcgttttcggaagcataatgcacatgttcatgattcttttcttcatagtataaagcggcacgaaatatgaagcgcgccgaagcaaataaacgccgccgcgcggcaaaacggagagcaatatgaacaacaaaatctttacctgcattttcacggtattcattctcgctgtattcatttccgctccgctctcttacgtcctttcgaaaaacgggataataagcgttgcaaatgtcggcaacataatcaagcccgaaaagacgtatgaaggcgacagcctatacgcccgtattttcaacggagtcgaggaaggaaagcgggtcgtaaacgacgtatacataaactacgtccccggatatgttccgataacctcgtttgtctccgggcttacgaatacgctgaacactcccgtttccgacagtctcggacgctggggcaacaaaatcatgctttccgcagactccggcagcattccggcgtccgcagaagcggacgcacccgacacctcgggagatgatccggcagaaaccgaggacccgcgcaaggacgtgaatttcagctacaatgcctcctacgtcacaagcgacaatcttcaccgattttaccgcgttaacgcggacggcgacaacggagacagctttgagtttctctgccgtgttccctccgcaaacagaaaatccctgaagcgcaatgtcaccaagcaggcggaaaagataaacgcgctcgccgaggcgcgccccgacataaatctctatctcta

SEQ ID NO: 2510 - DNA, 1835 bp, Unknown
  16S sequences of unknown bacteria
ataagagacagctccagaagctccatgagaggatcatagatgcgttcatctactttttcaccgccggggacctctaccagttttggctcatagttttcagggatcgcgttttcatagtttaccaacatcaggttccagtcggtatcatcatccgctgcctgcgtgttttggggtgtgctttcatccaaaaggccagttccaggcaccagcgttgtggttgtgtcgtttgcttggggattttcaggcgctccctcgtcgccaaacaatgtgaatgcatatccgcaaacagccacaaccagaataactgtgacaatacttccccagggaaagcgcctgcgccgctgcttttgcctccggcgatgtcttccatcgggaacaggcagcatattttcttccatcgtataaagcctcctttctgaaggggaacaaaagcgcccctgtcagcattcattgtactgaacagaggcgcttaagactttaatgtgaagttgtttatttcctaagaaaatcctaatgtaagggggagattttacttatgttctatccggcggcggcctgtagctttgcatcggacaacactttccctctcatataatatttgtcaacagaaatctgaatttgaaatgtgtaggcggtgttgtttttgaccttcaaatccagccagccttccgccaccgccgcgtcaattccttggggaatgccgggcgtactgcggtgaaggtcgactccgtgtgtatgctgttctgtaacggtcagcggagtatgcaggaacagccaatacaggaaactgctcatttggcacagcccacccccaggcagcagctggagctttccatccgataatgtatagccattcttataaggaacttcccggtttgcatcccgaacagcattccaaaatgaaaatgtttcccctggagcaataatcactttatccagaacccttgcggccagcctacagttgtacgctttattttcctggtaaatcaattcataacccgtttcataattataaagtggccaattggcataaaagagcgggttggcaagcatggtatcggagcgtgtttctgaatagcagttatggtccaatctcattcctatgtagtagcaaaaaatcttctgttttttccgcagaggcaacaggcacggaaaaatctgcgtcagtcgtattcttcccatcattttgctcctttcggtgattcgtctcataaaagagcaaatccatgctcctatcagcattctaccggacagaagcatggagtgttttaataagaaattgattgattcctaagaaattacgaatttgtaaacggtagagaaattgtaaatgtaaccacatgatttctgctggatgcgctgattgtcccgccatgcagcgtgacgatctcctttgctatggctaagccaagccctgtaccgccggtgtcagaggatcgagactgatctgcccggtagaatttatcgaaaagagacgccaatgcctcattgggaatgtcatcaccgctgttctgaaaccgaaggatgacttcatgttccagtttttctgcggagatcacaatctcagtatgtggatcgctgtacgatgcggcgtttttcaggatgttgttgaatacccgtgccagcttttccggatcggcttcgatggtcaagtcctcgtcaagatgcagggtaacagtgttccctctgggggccaaaacaggggacaattcatccgatagctggaccagcatataataaaggtcgatggtctctttggacaaggtgattttctgagatttatattttgtgatctcaaaaaattcatttaccatcgtctccagccggtaggcttt

SEQ ID NO: 2511 - DNA, 7250 bp, Unknown
  16S sequences of unknown bacteria
gagacagggcctagccttgtgtacctagcctgttctgtgccccggggataggccttgctgccatgcctgtttttattttgccgtgtcggtgggccaagacctgcccttcttttatccagcgcacagcgtttctgccccgcagccatgcgtttgctttgcgcaatccgctcccttccgtcgtgtccatccccttctgctggcatccaatcagaggctgcgctgctttttagcggcgtttttttgcagcaatccctgctctttcccgtctggttggaggatggccctgctccggctctcctccgcaataaaaaagagcccttttcgggctctttttttgtgcatttaccagcgcgctctgccatcccgcacatccacatgcgtaaacgtagcgtatttgcccacgccgccgttggggtttaggcggttggcaatgtcatagacctgcttggccgtcataccctccacgcggatatccgccgccttggccaataaatgctggctcagcggcgcgccgcccacctttttgttgtaggcggctgtgcggtatccgctgttgatgatgacggcgcggccgccgcaggccgtgcggatctgttccagcagcgccatcagcttttggaggttggcgtaaaacttggccggcacctccgtgccgtcatggcatttgaattccgaagccttgaagtgcgccgatgccggctgagcgccgcccggcgtgcccgcatacagcgccgcccaggtgtccgggcccacaatgccgtccgccgcgatgccgccagccctttgcaaggctttgacggccgcctgcgttttgctgccaaagatgccgtccgcgttgcctgcgccatagccgcgggcgtttagctcgttttgcaggccgcgcaccttggcgcccctggcgccctgctttaatacaccatccacctccagcgaatcccaagtgtccgttccaatgatgccgtccaccgtgatgccgtagtttttttgcagcgcgcgcaccgccttttcagtgttctctccaaagatgccgtccacgctgcctgcgccgtagcccttatggttcaaaagctgttgggcggttttcacttccttgcccctgtctcctctgcgaatggttttcatcctgtttcctcctttgtgtgtgccccggcggggcctttatatcctatgcatccgtctagtagacggcgccatgcccggccggaatcatgatgccaagcatgtgccgtgccccggggatgggcctagttgccaggttcttcttcgcatccatctagcagacggtgccatgcccggccggaatcatgatgccaagcatatgccgtgccccggggatgggcgtttgttctactcagtctgcctctttccgtctagtagacggcgccatgcccggcccgtgctgtttctatgcgtgctctgcgccccggcacaggggcctgtggtggtgcttgtttcccaggcgtgctataatggggctcgaacgatgcaaaggagcgaagtttccatgtttgccaaaaaagcaaaaagcaccgcgctggtgcttctcaacaatgctgtacgccgcctggtgccgggcgaagctcaggacaagctgcgtgcgctggccgcagagccggattttcagcagtcgcccgcctatgccgcgttttgcgagtcgctgtgccgcgatgtcttgttggatgcgcgccgccagctggcctttaagtccccttcccatgcccgcacgctggaaaagctggtggcccatcccgaaacgctgtatcatgaaagcgtgctctccccgcacggcgtctatacctttccgctgctgttcggcctgttgtttttctcgctgacccgccgcaccccttccctggaggacctgtccgtcgtacagcaatattttgataagtttctctgcgagctggcgcaagaggcatgaaaagcgccggctgctcggcatttttccgcctatgctttcgtctcccgccaagctttctgcacagcccgtttatcccggcccgtaggcagtgcaccggctgtatccgtgtctaagccggcatacatttcattctttgtaagaaaaagccgccccatggcggctcttttattgattggtttttttgatttcctgcttggcctttttcatctgtttgataacctggttgcacatcacagcggccccagaggccaaaatgccctgcatcacgccctgcacgccgccctccaccaaaaagcccagcaccatgccgatgcccgccaaaaataccggaatcaggcagtccggcacggctttgatgcgctttagcaccgtgcccaacacatacagcgccagcacgacgatgtgcatatcctcctgcaaggcctggctgatgagttcttccatcggcgctcgcctcctatgctataccctatgcgtaccggcacgcgcgtgtgaacgcccgcccatccgggtatactggcatcaggaggtgatgcccatggcctatatcgaccccagccttatgcccctggtcaacgccctgccgccggaggtgcagggggcgcttttgcaaagcagcgcagacatccgcacccccagcatgctgaaagccgcgctgcgcctattggaaagctacggcaggtgctgcgcggacgaatgaaaaaacaagcccgcatgggcttgtttttctttatcgcttgtgtgcgttttgcaataccaaatcctttaccttcaacagccgcgtgttgttggccctgtcgttttcctccagctgcatgcggatacggcgctgcgcctgctccaggtcggggatcagcacatgctccagcgcccccacccgccgccgcgtgcgctcaatctcccgccccaaacgccggatgttctcttccatctcggccagggccagcagctcgggccacagcgcacaaagctgcgccatcccctctttcaggcccgccgtttccaggcatagcgccggctgcggcggggcctgcccccgcagcgtgcacagcaccgcccccatcgccttttgcgtgccggcctccacggtaagcggcggccccggccagcacagcgccgcaaaataggcggcttgccccatctcggcccgggcggcggccatcgcctggtaataggcggaaagcgctttttgcaccgtctccctctgccgccgggccttagagaccagcgccaaaaaccggcgcatcagctcatcccgcttatccttgagcagcttgtgcccgcgccgggcggtggccagctgccgtttgatacggcccagctgcatgcgcgtgggcggcgccatcggcccggccatttaggcttcctccttttgcgcatcgtaatagcgcgccaaaaattccggcttgatgcgcaccagctcctgccttggcagcatgcgcagcagcgcccagcccagatccagcgtctgctcgatgctgcgctccgtttcaaaaccctggcccaggtattgctgctcaaacgcctcggcaaaggccgcataggcccggtccgtctcggtcagtgccgattcgcccagcaccaccatcagctccgccgcgtcccgcccccgggcataggcggcaaacagctggttcatggtatcggcatggtcctcccgcgttttgcccgggccaatgcccttgtccttgagcctggaaagcgagggcagcacgtcgatgggcggctggatatgctttcgctccagcgcgcggctcaataaaatctgcccttcggtgatataccccgtcagatccgggatggggtgcgtcttatcgtcctccggcatggtcagaatcgggatcatcgtgatgctgcccggcttgccctcgatgcgcccggcgcgctcgtatagctgcgccaggtcggtatacatataccccgggtacccgcggcggcccggcacctccttgcgcgcggccgaaacctcgcgcagcgcctcggcatagttggtcatgtccgtcaggatcacaagcacatgcagccccctgtcaaacgccaggtactccgccgccgtcagcgccattttgggggtggaaagccgctccacggccgggtcgcccgccaggttcaaaaataccgccgtccgtgccagcgcgccggtgctttcaaatctttcggtaaaatactgcgcctgctcaaagggaatgccgatggcggcaaacaccaccgcaaacccctcgtccgtgccccgcaccttggcctgccgcgcaatctgcgccgccaaacgcgcatgcggaagcccgctggcggaaaagatgggcagcttttgcccgcgcaccagggtattcagcccatcgatggcggaaatgccggtctggatgaattcttccggataccgccgcgccaccgggttgatgggcgtgccgttgacgtccatcaccttgtccggaatcagcggcgggccgccgtctatcggccgccccagcccatcaaacacccggcccaaaagccccggcgaagcgggcagcaccatcccccggccggcaaagcgcacccggcaggtctcggcggacagcccggccgcgctttcaaacaattgtaccagcgcatagccctccgccgcctccagcacgcggcacagccttttttccccgctgggcaaaaggatctctcccatctcgttgtacgccgccttttttacgccctctaccagcagcagcggccctgcaatctcgcggatgcgtttgtattctgtcggcatctatctctcctcctttggcacagcgtccgccagctggcgctgcaaatccgccaggatgcgcgccgcctcttcctggcttttctcctccggcacgcgcttatagcgcgcaatgtcctcgcgtaccggcagcgcagccaagcgctctacttccgcgccctcggccgcggcggccagcgcgccgtcgtagtacgccaggatcagctgcatcatgcgccattgctttgcaaggctggtgtaggtgtccacctcgtcaaacgccacctgatgcagaaaatcctcccgaatggagcgcgccgtttccattttgatgcggtcctgcggggcaatcgcgtccatgcctaccaatttcaccacttcctccaattccgcctcctcgcttaaaagcgaaagcatccgccgccgcgccgcgccccagccgggatgcacctcctgctcaaaccacggcgccaattcatcggcatacagcgaatagctcgtcaaataatggatggcggggaagtgccgcttgtatgccaacgccgcatccagcccccaaaacaccttgacgatgcgcagcgtggcctgtgagaccggctctgcaatatccccgcccggcggcgataccgcgccgatgatggaaagcgcgccctcccggggcgttgtgccgatggatagcgcgcgcccggcgcgctcgtaaaactgcgccagccggctgcccaggtaggcggggtagccctcctcgcccggcatctcctccagccgcccgctcatctcgcgcagcgcctcagcccaccgcgaggtggaatccgccatcagcgccacggaatagcccatatcccgaaagtattccgcaatcgtcaccccggtatagatggaggcctctcgcgccgccaccggcatgtcggaggtgttggcgatcagcaccgtgcgctccatcagcggccgcccggtcttggggtcggtcagcgccggaaattcattcagcacatccgtcatctcgttgccgcgctccccgcagccgatgtataccacgatgtccgcctccgcccacttggccagctggtgctgggtcacggtcttgccgctgccaaacggccccgggatggccgccaccccgccctttgccagcggaaacaggcagtcgatcacgcgctgccccgtgatcagcgggcggtccggcgccagcttttttgccactggccgcgccctgcgtaccggccatgtctggtgcatcgacagcgtccgcacaccgtctttgccctgtatggtgcaaatcggttcgtccaccgtccatttgcctgcgcgtatctgttccaccacgccaaaaacgcccggcggcgccatgatcctgtgcagcaccagcggcgtctcctgcaccgtgcccagcacatcgcccggctgtatgcgctgccctgcctccacgcacgggcaaaacgcccatgttttggccctgtccagcggcggggcctgctgcccgcgatgcagccggctgccagccgcttggtacagcgctgtcagcggccgcccaatgccgtcgaaaatgccgccgataagccccggccccagctccatggccagcggccgtccctcggaaaagaccggctctcccaccgaaaggccgctcgtctcctcatagacctggatataggcctcctcaccgtgcatctcgatgatctcgccaatcagccctcgatcgcttacgcgcaccacgtcaaacaggttcgcccggcgcaggccctttgccagcaccagcggccccgcgatctttaccactctgccttgttcgttttgctgcatgttatccttcctctccccacagcccggcgcccgccgcctgccggatcgcggcctcaatctcccgttccgcctgcccggtgtttcctgtttcgcccggcagaatgagcaccggcggcccctctttttgccgcatcgcctctatgtgcacgcgggcgtgccgggccgccgcctccgtcaccaaaatcagtgcgcagcccgcgcgctgcgctttctccaacgccgccttggcctccgcctcggactcggccgcatagccgtccacgcccagcgccgtaaaccctgccaggctctgtctatctcctatgatggctgcgctaggcatactgcaagcgccccctttcctgcaaaggcgtccgcccgtcctccaaaagccgcaggccaattgtctgcgtctccgccttggttttcagccagtacgccgccagcgcccccggcccaaagggatcctgtgccagcgtttcagccgtttttaggacctgcgcatcgctccatgcttcaaaggcggcggcgctcatcgcctcagccgcccgggccttttccccatcctgctgccaatgcgcgcacagcgccctgcgcccgcgcaccgccgcctcgatcgcccgctcgttgtccccgcccgggccaaggcgcgccagaatttcctctttgtcctgtccgtacaccgcgccgaaaaacagcgccttgtcctcgtccgcctgcaccatcgcccgcgccagcgtgcttagctgcgggctgccgctctcttctgccagcgccagcatggccgcccgcttttcccgctgcagccggcgcatcagctgcgggccgggc

SEQ ID NO: 2512 - DNA, 4697 bp, Unknown
  16S sequences of unknown bacteria
caggcctgtgtcgccgcaccgaagctggtctatgcgggcggaacgccgatcgggatgtatctgcgcacctccggcgtgctggtcgttggaaccgatgcgatctatgcgaaaagcggagagctgtgctgtccggccgaatcagtgctgcaggcgggagattacatcaagatggctgacggaaaggcgctcgcgacgaaggaggagctgatcggctgccttggaatgagcggcggtaaatccgtgcagctgcaggtggagcgggatggcgagcggatcatgtgcagcgttgcgccggtgcttgatgagtccggcgcttaccgggcaggagtctgggtgcggaatgatacgcagggtatcgggacgctgacgtatgtggatgaggatggacattttggggcgctggggcatggcatcagtgatattgataccgggacgatcctcgcgatcgacggcggcaccttatacgatgcagatgtcgtctccgtcgtgcggggacaggagggagcaccgggggaactggccggtgtgatccattacagcgagggctataagatcggcaccatagaaaaaaatcagcaaaacggcatttacgggacgatctccggattctccttgctggccgataaaatggagcagtacgaggtcgcttaccgtcagtcggtgacgaccggcccggctcagatcctctgtacgatcggcgagcgctgcgaggcctatgcggtggagcttaaggaggtgcgtcgtaccggaggggacgtcaataaaggaatcatcctagaagtcacggacgaggagcttcttgcaaggacgggtggcatcgtgcagggtatgagcggcagccctattattcaggatggaaagctgatcggagccgtgacgcatgtgttcgtgaacgacccgaaaaaggggtatgggatttttatagaggatatgttagaaacctccataaaaggagattgacgaaaacgattctgacaggtacggggttttcctgttcaggatcgttttattttgtgctcctggaggcgccggcaagtagcgaagctaggtcttgtcagcagagctgcagggatggattgagaatatccgattgatctgctgtaagtccggaattcatccgatagtaagaaaggcagtagtttcagaactaacctttattggtactatatgtatttactttcgtgctaatatatattatcatattagcatgaaaggagaatatatatgactcagtttgaacaattagatttattgctgaatgaatatggaggaataattcagacctttcaagttatagataatggaattagtaagcctgtattttattcttatgtaaaagagcgaggattggaacaagctgctcatggtgtgtatgtatcacctgatacgtggacagatgcgatgtaccttttacatttacgttgtagtcaggctgtattttctcatgaaactgcattgttttttcatgatttaacggacagagagcctttgaaatacaccataacagtaaaaactgggtataatccaagccgtttgcaggaagacggttttcaagtgtatacagttaaaatggatttacatgaaacagggattacgactatgcagacaccatttgggcattcagttccggtttatgatatggagcggacaatttgtgatctgcttcgcagcaggaacaatatagaaatgcaggtctttcaggatgccttaaagcaatatgccagacgcaaagataaaaatttaaggacacttatgaaatatgcatccatgtttcatgttgaaaagatattaagaccatatttggaggtattactttagatgataacaacagcaaggcaattaaaagatttgattcggaatctatcaaagaaaaaatctgctgatgcacaaactttgatgcggaattatatgatggaacgttttttagaacgaatttctttatcagagtataaagacaaatttattttaaaaggtggaatgctggtggcagcaatggttggcctggatgccagagctactatggatttggatgcaaccataaaagctgctaacgtcagtctaagagatgtggagatgattatatcaaatatcatagcaatccctatagacgacggtgtttcatttcgcattaaaagaatatcggaaatcatggaagaagcagattatccgggagtacgagtgagtatggaaaccaagtttgatggtgtcatcataccattaaaaattgatatttccacaggggatgtaattacaccaaaagaaataagatatcgcttcaatcttatgcttgaagatcgtacaattgaagtatgggcatacaatttagaaactgtattggctgaaaaactggaaactgttatcagtcgaaatgtcacgaatacacgaatgagagatttttatgatatttatatcttgcaaaaattgcatggagaacaactcaataaagaaatactatggcatgcgcttgtagcaaccgcaagaaaacgtggaacattggagcagatagaatctggagatataagagaaatattgaatgaaatagaaacaagttctgttatggaaaatttatggaaagcataccaaaaaaattattcgtatgctgttgatatttcttggcatatagttatggagtccgtgcgatatttatatcaaattggatgttctgttgatttttgaaataaacatattctccattaaaaattcaagaaaaaatgataatatgtaatacggtgaagcaatgcagaaaattttaattgtcgaagatgattatgatattcaggacatactgaaaaaccatcttattgatgtaggatatgaagttgttgtcgtttctgacggagtggtcgggatagcaatgtttgacgatacaatggaccttatattgttagatattatgcttcctaaaatcgatggttatggtgtatgtgaggtcattcgcaagaaatcgcaagtcccaatctttatcgaggtcagaatggggtcattgaggtcaaaaattcgaatcctgacctcgatgaccctaataaagaccataatgacctcaaagatgaccttgaaactcgattatcggaattgattcgtaaaaatccggaactgactcataaagcattaggagaagcacttgcggtttcggcagcaacgattaagcgtactcttacgaaaatgcagcatgaaggtaaagttatccgtgagggttctaatcgaaaaggcaaatggatattgacagataaaatgaaataggattggcgggatatgttgtaatcttttcgcttctctggtaaaatcaatgcagacaggaaacaacaagggcatttgccgggagagggagaaaggtttatatgaataaaaaaaatctgaagatgcgttcagtaggcagtgaatatatggaacagtacaatgcgcttctgcgctatgtgtttcaggtgactgatgaggaattgagttcgatcggatggcaggagaaggagatcatccgggcaaaatttccgacaatggaaaaagcagatgtcatcggctggttcgatggagacaatctcatttctcagtgtgcggtctatccgatgcaggtgcggattttcggacagcaatacgcaatgggaggcctgaccggtgtcggtacctatccggagtacacgaacatgggactgatgcacaagcttctggagcaggcactgaaaaacatgcggaagcgcggacagtatatttgctatctgtatccatattctattccttattacaggagaaagggctgggagatcatctcggataagatttcctatgagatcaaggactatcagctgccgaaaaatcatcaggtacgcggtgatgtgcgccgggtaaagactgaggatgaggaactgaaacgggcttatgagcgctttgcagagaggacgcacggcacaatcatccgggacgagctggcatggaacgagtactggctctgggatccggacgacatcatggctgcgatctattataatgaggacggcgaaccggacggctacgtcatctactggatcgccaacgaagtattccacattaaggatatgatcttcatcaatgaggatgcgcgtgccgggctgtggaactttgttgcggcgcatttttcgatgatcaatcaggtcgagggcgatacatacaccgatgagccgctcgcctttcttctggaggacgccagcatcaaggagacgatctcaccttactacatgggacgtatcgtggacttccctgcatttatttcctcttatccgttcaagccggattctgaagagcgggagtgggagtttgaactgaccgatccgattatggagtgcaatcagggcagctttcggctgacgatatccagggatgggcacggcatagcagaacgcatctcaaagccctgtttcgggcgcatcagtatccagacgatgacgactatgctgatgggctacaaacgtccggattacctcgcccgcatcggccggatcaaggcgactgatgacgtgctcgatatgctcgaggatgcgattgagcagcagacaccgtttatatcggattatttctaaagaaccggagaattgtggaaacaggccgcttcccaatttgaacgcagataagcattcccccgattcaagtgcgcggagcactaagcggcgggtgagggggatgcttatgtcagtgggagttgaaagctcccactgacagatcgcgaagcg

SEQ ID NO: 2513 - DNA, 17481 bp, Unknown
  16S sequences of unknown bacteria
ggctttgcgaatagcgccgcaaagcctcgtcaaagcattcatggagttttattttgacctatccttacaatttacataaactttttgagataggcgctgaaaacctctcccatccaacgatagcccatggcgttggggtgaatggcgtcgctcatataggaagcgagcgtcgccgcgtccaaagcgtccatgtccttatagttgtaaaaatcgatgacgccgatcccccactttttctgaatctcatagaggtcgtcgatcaaagactcgtacgcggcgttattgaagtcgggattggtgtagaaagtcacttcgcagccccaggttttctgcgcgtaggcgatgatgaattcgatcgccccgagcaccgtcgtcgtgtcgaaatcctccatatttttattggaagctattttgcccactctcttattctgcgtgacgtcgttggtggaaagctgaacgatgagatgatcgatcttcgcgtttttatcgaagtttttgagcatacggctgacgtaggaattcgaactttcgttggcgagcgtcgtgccgctgatcgcttccttcacgcagatacagttgagcgagttgacaatttcattgacaaacgaggagccgttattcgtatggccgtaggtgacggaagagccgaggaaataatagccgggcgcgtcctcaaacctgccgtaaacagtcgtcgagcgatcgagcgccgcaaagtcttcttcctctatcgcttccgcgttttctcccgccgtttcaaaaccgctcaggatatagccgcggcgcgcgtactcgtcgtaatgataggtaagttttccgtcgcggtatacgttgacgccgataaacgaatccgaacaatcgagctgttcgacgatgacgtcgttttccgccgccacgtatttcacgtccccgcctaccgattttaaagaatagccttcaaggtaggtcgtcgtgccgttttcggtgcggatatactcgcattccgttttgccgattttgtaaataccgccgcaaagagaagcgatggttcccctgtttctgattgcgaacgtgccgccttctttggtctgggaaaacgccgtaaaatatccgccggaaatttcgtccaccgcgccttcgttggcaagcgcgatcatattcggcgcgttaaattgatggattccgtccgccgtaaacttcccgccggagatttttccgattctcgaattggcattattcgaaatggcaaacgcccattgcgaagcgtaagtgaccgcttccacgctgccgccgttaatttcttctatcgcgcccgattcgttataaatgccgaacgctttgattccggcttccttcggcgcgctgcccgcaacggctttcaaactgccgccgttgatcgccgctacctccgcgcctccctgatttcggagcgcgatcgctaaaccgttatttccgttgctctgcgcgtaaatcgcgccgccgttgatggcttttattttgccgcctttgatattggaaattcccacgatattcgaagcggtgctttcgctgagggaaatggattcgatcgagccgccgtcgatgacctcgatcgtccccgcgttgacaatgccgtgcccccatttcgttccgaacgataccgcgcggagctttcctccgttcatcgtcagactcccgcccgaacgattgtagatgccgtgcgcttccgtcgcgtcgctttgcccgtctattctcgcggcgacgttttcataaatcagcgtcccgtaattgtcgatgagaggtttaacccccgcttcttttacggaagcgtaaagtttgcccgtgcctttggaatcggtaagcgtcgccgtaccccggttgacgagggcaccctgcaattcctgcccgttcaagtcgagcgtgagcgtcttctccgcgggaatctcaaagttttcggaaacgtttttaataagctcgattacgctgccgtcttcggctgccgcaatagccgcagcgatcgaagaatattcctgctccccgatgcgcacgacgctgcgttccgtaccgatcagattatattctttaaggagcgttttgcctgcgtcgtaagttctgcccgtctgaatcagcgaatcggccgcgtcgtattcttccgtatacttgccgccctcgggcaggacgtaacgatatcccgtttttgcggaagccgcattaagggaatagctttcgccgagcgtatttccgttattttcggtatataaataatggttgtcgtttttcttgccgatatagtaagcgccgcccgtaatggaggcgattctgccggcgccccttgttctcaatccgaaagtgccgccggtgggcgtcgtagacgcggcgtagaaggtgccgcccgtaatggaatttacgggaccgtccgcggcgagcgcgatggcattgggcgcgtttttagcgtgatcgatcgtggaaatgagttctccgccggagatcgttccgatcgtgccttcgttccaaacgccgaacgaccactctgcggccgtggaattgcccgtaatccttccgcccgaaatctcgtctatcgtgccggcggaagtgttgtaaatcccgaacgcctttgccgtaccggcgggattatatacgttcgcgtacagcgtgccgccggaaaccagctcgattctgccgccttcgttgcggatcgccgttgcgcaacttacgttgttttctctcttgccgctgccgccgttttcgccggccagcgtaccgcccgaaatatttttgatgacgccgcctttattgttgcggatggcggaagcgtatcccgtaccgagcgtttccgcgtataactccccgcccgagatattttcgatggtgcccgtattattgatggcgagcgtattgcttcccgaacccgtattcgtaatataagcgccgatattcccgcctgcgacgcaagagatcgtgccgagattctgaattccgaatccccactttgtaccggtggactcgacgcgaatgtccgcgtcgagaacggagagcgttcccgttgtggcgttggaaattccgtgcatgatcgacccagcgccgctgcccgtcatttcgatggaaattccgtccacttccagctcgcccttattgaggattgccgccaccgtggtatccgaagcggaattatccgaaagggagatcttgcccgtaccgagggaatcgacgattttcagtttgccgttattcgtcaaggtcgcggcgagcgtattgccgtttaaatccagcgtgatgtcctgcgcggcggctacggtcaacgccgacgaagagccgctttcgagttttaccgtatctccgttcttagcgccgtcgataagttcctgcgcgttttgcgcggtcgtttccgcgagagccttccgatccgtacggaggaatccgccgcccgcaataccgctcagcgcgagggaacaacacaagggaaaagccaaaatttttaatgcctttttcatgtttttcctccttaaattacaaagtaatttttctgatccgccatatcgcccttaacggttccgttctgcttgaagccgttgtttgcaagggcgggagtgtattccatcaacagcgccgtcatttccgtttccgcgccgacgtcaaatccgatctcgatatattcgatttcaatcgaaagctgccaatacccgtcgttctccgtatacacgggcgcgtggatcgtcttatccgttccatggaattgattttcggaattttcgaagaaaccgatctttcccgtctgatagtacgcggcgcctttatagatcgtgaagctgacgtcggatttcgaaagcgcccatcccgcattgtcgacagggtcggtatggacgatcattcttacgaagtcgctgtcgtcaaacgtgtggaacgagagcatattcagcgtcagcgaagtggcgtttctttcgacgcgggcataaatgtgatccgctccgattgaaaattcgatgtcgtaatccttaatcaactccgcgtcgggaatttcctcttcaaaaccctgaatcggcagataggaactttgatccgcgggatctccgctggaaagcccgtcgatgagcattccgttaagatagttgacgccgtcgtaaatatctccgttttcaaattccattgcgaagagagatacgtttttatccgccgaataatcgggaatctccgcaaacgccaccttgaactgcaaggtaaaatagccttcgtattccgtgtaaacgggcgcgtttgccgcgcgggtttcggtggaggcgttaaaattgacgtaatcccaaaacgccgtcagacccgtgcggtaagccgcttttgtacggccgaccaggaaggaaacgtcgctcgcttgaatcttccagcccgttccgtttaccgcggacgtatgcacgaccagctttatgtactcgctctcggtaaattcattaaatcctatcatggagatgaggaatccgtcgctctctgtttccgacttcacgtagatatcgtccgcaatctcccccttgcgattcaactcgggaatgctgatatgcaggcggtagccctccgtcaaagcttcgcggtccacgggatcttttatgtcgtcgggatagacgttttgggcgcaggcaaagcaaagattgactttgtctgtgcggatatactcggcaggcgttctcacgtcgatcgttttcgcgccgtccaatgccatcatttccgcgctttcatcctctttgtccgagtacattctcatcgcgacgcccacgatggcgtccgcattgcagttcagcatagcgaagggaacggcaaaatctatctccgtgccgccgtccgccgtctttttgacggcatgagtcaccgtgtgggaagaaatatttttattcccgtaattactcttcgtgaactcgcccgttccgtccaaagttatcttacagacgttttcgtcgcgatccgccgcgaccttgtttgcggaaagataaagttcgagtttgcttccccgcccttcttcttcgaatacgccgttgggagattccgcttttaacagcaaggcattcgcatccctcgtgaccgaaagagaaaacgcctcgtattcctgccaagtcttgttttcaagggaggaaaccaccgcgtaatttctcaggaggataatgcttccgagatccgtttcctgatcctttttgttgtcgtatttgctcaggtccacggaatacgtttgaaatccgtccaaactcagttccaaaacgttcgtttcgtcaagttcgagatccgttatacgaaaacttccgtcctgtcccgatacggcggcgctgtttccgtttacattaaccgcgacgttattcaacgggttttggaatgcgtccgtaactttcgcctgcacggaaaagcgacgctcctgagcctcgcttccgccggactgactgctgtcggaagactggctgccgttagaagattgatccgaatcggaagtctgacttccgctcgatggttcgcttccgctcgacgattcgtttccgccggcacagccgacggaaaagcatacgatgagagcgaaaagcagggtaaagctgaaaaacttttttaaaaatccgtttttcctcttcatgtttatttctcctccctttcttgtttataaattgctataaatattgtaacatagaaaatttcaacggtcaataacgattagaaaaattgtaaaaaaagtgtttttagttatatgaaacttgttgaaatcgttttttggaaatttattctttctcagatcgctaaaaatatgtgtcgtccccatggtgtcagagatcctattccctgttagatttttcctttaaaatatggtctgcgctctacacggaaaaataagaacaacggactcggctttttggactgaccgaataaaaaagcacgccgaagaatccgaatgattccccgcgggctttttataaatgttcagtgcttttatacttttttatccatattcgaattttatttcttcgcaataatgataaaaaataaggctttgcgaatattcttgcaaaaccttatatattttggagctgctaaccggatttgaactgatgacctcgtccttatcaaggatagttcctactttttgctaaggaactgccctatatacaaaaggatcgctaaaagcacagtatgttgtgtttttgacggccttttttcgtttaagtcacaagaaaaagctatttgcagacttttttgaatgccaatcgtctgcaaatgtaccgttttagaatgttttaggcagagttagatagacactcttttggctttccaaaagcagaaacccgacgaaaactaaaaccgggaaacatcctcctgcctttataagggtacgattttttgtgttccttatggctatattacgaggggcttttctaaaaaccgtataaaatgcgaaaaaagttttgtaaaattttccgcaaacaaggcaaaatccccccgaaaaagataggctctcagtccttatatattggagtggtatagtttcttactaaattattgatatttcattatccgtcaacgtaagaaatagctattgggaaagtagttttttataagtcaggtcagtcaggaaagccccgagcggagcggttatcaaaatggcgagcacagccgccgttaaaatcgtctgtccgcaggcaaaccccatggcaagaggaacagcgcctattgccgcttgcaccgtcgctttgggcgtataggcgatcatacaaaacaatcgctctttttgaagcaatttggatttgattacgcaaagataaacgcccgccattcggaaaagcaacgcaagtaagatcacgcaaataatcatccccgcgttttgcaacgcataggagatgttgacttccgcaccgacaaggacaaacagcaatatctccgctaatatccacaatttggaaaatttttgcgataacctttccgcacaaactgtatgctttgcaaataccaccgctccgaatgcgattacagagagcaaacccgaatacggcaccgtttcaatagcgttttcgagagctatgaacagaaatgccaaacttaaaattagtattacttttatgctgtcgcggatatgaacttttttaataaacagaacaaagaaaactcctacgccaacgcctacgccaattccgagcgcaatggatacgggtatttgccacacgatattgaaagagaaagtgccgccgctcgccatagccgtaaacgcagtaaaaagaacgatgacgaacacgtcgtccgccgatgcccccgccataatcatatcgggaatgcccttgttcgttccgtatccgttttctttgagtttcagcatacgaggcacgaccacagcgggcgataccgctgccattacgcaccccaacaccgccgcgtcgataatgtttaagtataatagcaacgttccgaaaaggatataggcgcatatctctacggaggcagggacaaagcacagcaaaattgccgagaggccgttctttttcaaatctttcagatttaaattaagccccgcccgcgtaaggatgatgataagagcaagctgccgcaagtcgggggatattgcaagtattgaaggcgcaatcaggtcaagtacatatggtcccaacacgatgccgatgatcaacatccccaaaagcggcggcaattttattttagcgcagaccgagccgagccacaaggcgcacagacaaattactgccaaagaagttaaaaaatccataacagttctcctttcgggacaaacaaaaaagccgatgtcccgcgataatatcgcagaagtcatcagcttttgaaagcggtttaagagtttaatctcttggggagaacttcattcccaacaattctattttagcatatagtatttgaaatgtcaaattattataacagtttagggatgagaaaatttgcagatggactaaaaagggaggtgccctacctataagaaaaaaggaacgtctgcaattagggcattttttagggcgttttgggcagaattagaacgacggcgattagggaggaggtcaacattactaatcgccgtattttttactcaaaatcgtctgcaattcgtctgcaatagcacttttccattttttcttagtttttgataaaaccccatatctagtatctatataataaaaaaccaccatatctggtggttttctttggagctgctaaccggatttgaaccggtgacctcgtccttaccaaagacaaaccctaaattcgataaggaaatgccctactctccatcaaccgtagaaatatacaaaatattgtgtttttctataccatattatatatgctcattatataatatttagacctgctcattttgacacataatattttaatttgttttttaatgtaaaaaggaacactgtttaatgttcctcattcttcgcctttgggcttatttaacaatttaatagcaacgctcccatcttgtacatttatcaaatagcgtcgataacattgtttgcacttataaatcatatcaataaccgcaacggcttgaaacatatccgtatcgcacttggggcaacgaacatgacttttttctgtactatttacatttgcttctgtgcttcttgggttatccatagtaagttcctttaaataagtatattaactgttaaacagtatcttgatatagtgtgatttcatagcatttttctttaatatagacatttcaaagcctgacatatttattgcgttaggacaatactgcggctctaagcaaaagcctgcgtgtttatagtatttgccactcttgccgttacagccgttaagttgcccacccgtataaaactgtatgcacggcatatccgtgaacacgtccattttaatgcccgtaactttactttcggcgtgcgcggcgtgttcccctttcaatataaagttatggtcgtagccgtttgttgctttaagttcttccttgccgaaatccgcacctatttgcttaattatattaaaatcaaacggcgtattcttaacggctcttttatctccagtgggaataagaccgctatccacgggagtatagtaatctgcgtttagttgcatcatatttccgcggcaagcaccctttccctctccgtccagattgaaatatacgtggtttgtggggcaccacaaagtatccttgtcgctcaccgcttcaaagtctataacgagcgaattatccgcaaccgtaaaggtcaccgtaaacacaagattgccggggtagttctcctcaccgtcggggctttcatacttcattgcaaccgaattttcggtatggtttaaaattttaaacagttttttatcaaagccctcgttgccgccgtgaagatgatttttaccgttgttggtgttgagttgatattccctgccattcagcgtaaatcttccgtttgcaattctgttagcaaccctgcctatcgtagcgcctgcgtaacatccgctttttatgtaatcttctaccgaattaaagccgagaactatatcaatgccgtttattctcaatgcgtttatccttgccccgacttcgcaaatatcaacttcgatatccccgtccttaagagtataaagataaatatctttaccgcctatattgtcgtaaagttttttcatttattatacccatgcggattttcgctgtgccatttccaagcggatgagattatatcttccatagtcttttcgggtgtccaaccgagtatttctcttgcctttttattcgaagccgtaagcactgcgggatctcccgctctgcgttcgctgtaaactacttttatatccttttgggttatcttcttcgccgcatcaattacttctttaacggttgagcctatttccgttcccaaattgaagatgtcgctctttccaccgtctatcaaatacttaaccgccgcaacgtgcgcttttgcaaggtcgtaaacgtggatataatctctcacgcaagtgccgtcgcgcgtgggataatccgtgccgtaaacgctgatactttctctcacgcctgccgccgcttgcaatatgataggaatcaaatgcgtttcgggattgtgagcttcgcctataagtccgctttcgtgcgcgccgcatgcgttgaaataacggagagaaacgtatctgagtccgtgtgcgttagccgtccatttgaacatcttttccattgacaattttgtttcgccgtaggtgttcgttggattagtttcgtccgtttcgagtatgggaacgctcttcggttcaccgtaggtcgccgccgtggacgagaatactattttatctaccttttccgcaaccatagcttccaaaagctgttttgtgccgtaaagattattttcgtaatatttaagcggatttaccatactttcgccgactaacgaatatgccgcaaaatgaattattgcatctatcttctcgtcacttaacactttccgaacattctctatatctcttatgtcaaccttgtataaaggtatttcttttccggttatttttcttaaattaacaacgctttgttcgcaagacgttgaaaggttatccaaaataacaacctcgtacccatccgtgcagagctgtgcaaccgtatgcgaacctatatagccctcgccgcctgttactaatatcttcatatattactcctttatatctattttacttatttttctgcacatagcagtcttgcacggaattacttccgcgcaagacttaagtaggagaaaaaaataaaaacctgtaatcaaattaacttttctattgtgattccgtctgctatgtctgtattataaaattctgccttgtagcccgtagcctgtaaatagctgttgtacacgaattctttgaactcatctatgctgcccgttttgacgagagatatcgtgcagccaccgaagccgccaccaattaagcgtgaacccaaacaacaactttgtgcctgagccgcttctaccaaagcatccggttccctgcctgttacttcgtaattatcacgaagcgaagcgtgggacctgttcaaaagcccgccgagcatatccatattgcccgcttttaacgcaagcgtggctatccttacacgctcgcactcgctgacgataatgtcttaattacggtgggacttattgcgttatggactccgtctttatcctctgctattattccaagcgcaggattggaataagactcccaagcctcgcgcagtctgtcggaaatatccaccacttcgttgcgtttgccgctctttattcttataacagttccgggccaatccagtataccaacagtaacgtaaggatattttttgtcctttatttttgtttttatctttgctttatgtaacggtaaaatttcgccaccgccctgataatggtcgtgcgctaaaacgcttccgcctatcctttccaaaggcgcattacagcctataaaataatgcggaaatttatcaacgaagtctactaaattttcaagcgtctgcctatctatgtgcatcggcgtatgctcgcagtttaccgctattccgtgttcgtggaaatatccgtacggcgaatactgccaaaaccacggcttgccaccgagcgttatggatacagttcttaggtttcgtttgtttctcggcgcaaagccctcgttctctctgcaaataacacactttgcgaaaccgccgtccacactgttacctgcttttgctttcttcggatcgcggaattcgggcttagctttgtttatggttatcgttaaaccgttttccgtatcaaagcgcgggtttttatccagcacgtcctttttgacgtacttattgcatacgcagtaattatacagccattcggttgcagctttgcttccactatctttcataatggtcgaaaaacgttcgtccgtttcggacggcatcaaactgagttcgccgtatacggcgtcctccaactctgcgccttccaaaccgcttgccacaagctctaataggcggtttgctttatattgcatatttcgcgcattattaagttcaaaaacctatttacaaactggatgcagtactttgccgtgggtattaaccagattgtgtttccgttgttcgtgctggggattttatatcttttaaatgtagataaagaactgatgctttgtatgtacataatgtgcgcctgccccatcgcttcggtagtgcagaactacgctgaaattttaggcgaaggtcaggcgactgccgctaatatggtactgctcggctcaatgtgttcgattgtaactttaccgcttctggcgttattgatataattgttttaatgttattcgcgctaatttttcattttgataatgctaattcattttaaaagaaaacagggcttgcaaaaatgcaagccctgttatgctaaaaaaaatttaatttattaaatcttctaccgcatttgttttatcttgatctgtttaaagtgctacggtttttcccgcttccaccaaaagatctttgccatagttgtctatgtacacgtcgatatcggtgggattgtaaattagcttaccgtctgccgatgaaataagactgccgaacgcttttacatagttgtatacatcggtgtttgtagcatagtaaatatcgccacgcttgcccgtcttttttgcgaacttctctattatatcccaattgtcgttgtcgttatactcgtagctgtgtccccaaaggtagaaaagtttgggcggatttgaccaaaaataagggcgacgctcgtccgacaagaacttatcggtaagctcgtcgagtcgcgggtcgttgtggtggcaagttgcaggcattaataaccaattttgcggaatgtcaaacttgcccgtggaaacaatggttcgtgcgtatttaatcccgcaccgagatattatgtttgcagtgcgctcgtcgcaacttccgttggcatacgccataccgattattatcttgccaaaaagcttttcaaggtactctctgtcggcaagaatttcgcgcgtagcaacggcgtccgaaacctcggcaagcgataaatgctttacgccgtgcacggcaacctcgtgcgctccgcccgaatacagttcgagcgcttccttttgcgtgagctttctttcgcccgacttttcagcaaatagccccgaattaatattgaacgtacatttaagcccgtactcgtccaaaatctctaccaaacgcttatcgtatactacgccgtcgtcgtagctgagcgttaacgctttggtcttaaactcgggaaactttaaaaacctgtaattcataatatactccctattttatttacgttaggattttaacataaacgtctccgggctgtcaacttgtttcgtaatgcggtataatatagccttctgagcaaaacaatatcaaaccaaaatattaaatttgcccgatattttatacgatacaacctttacttgaaacgctataaaagtttaaacaaaataaaaaaattctatttatccataagaatacagtataatgacttatatatttttatagaaaacagggtttgctttttttgcaagccctgttctgctataaaaatttaattcgttgaaccttgtaccgcatttgtcttatcttttaaatccgttgcaagattccacttttcaaaatttgtttcctttaaattaagccctttctgttccgtcttgcaattcgggcatattttatttacaagcaaattgacctccgtatttcagcacgaactattataaaatacaggtcattttaagtcaagaaatttatgcctgaacttctctactcttcgtgcttgattagtatttttaccgctctaaatgtatctaaaccgttctaaaactatatatttgcagacatttgcagacgatttagattaaatttgttctgcaattattttattttagttaaaaaacataaaaaaatcacctaaaaccactatatattgtggttttaggtaatcttttgggggtagagtgcatctcttatatattacagggattttccttggtaaagtcaaagtaattttaatattaaaaataccataaaataggcgtctgcaattcgtctgcaaatattttaaatgcaaaaattgggtaagttgcacacgacttaaatagggagtagccctacctatgcgaattttagagtcaatttctttcgtctgcaaatgtctgcaattgggacagaaatagggcgttttaggcagttttagagagtaaacgggcaaggagtagccctacctataaaacagccttattttttacctaaaaatgtctgcaattcgtctgcaaatttactttaactataccattacaatttgacatatcctatatatagtggtaaaatacaagaaaaaaccaccaaatatggtggttttcttggagctgctgagcggatttgaaccgccgacctcatccttaccaaggatgtgctctacctgctgagccacagcagcatgctctaaaaatatgaagttttttgtcaagtgttcagtggcagatattagccttgttactccttaccaaggacgtgctctacctactgagccatagcagcaaattcagttgtatcgacaatacgcacgacgttttaagttactacgctattatagttaaaaatctcgccgttgtcaagtcgaaaaagggtattttgtgaaattttccataaaaaatttttctgtcattttccagacttcccacttcttctttttataaaaaaaattcggcctttcttcccgtttttttaattccaacccccttcaactgctcaaaagaaaaaacctttttcccccttaaaagggcttcaaaaagaaccattttattcttatcgaaaaccgccctcccctatcggggaaagcggtttttttatatttctttattttatttcgaactcaatgagcagcgaagcgaaatcggaatcgggcagactcggaaagaatcctttatacatcaattcgtccccgtaatatctatttccgtttcgcagatcggtatagagcgcatcctcttttaaatctcgcaggcgaacgatcgtccacggggcgtttgcctccgccaaagtgcgcaccagcagcaccgccgcttttttcttatccttggaagtcacctgccaagccgttacgttgccctcgccaaaggcggacgaaagcaccgcaaaatccccttcccgaattagagattccaaacggtggtaacgttctatctgcgcctttacttccgccttttcctccctggacaaaagagcgacgttgagttcgtacccgaaagtgccgaaagtggcgacgtttgcacgggtggaaaaaggagtcgttcgccccacctgatgattgggacacatggtgacgtgggagccgatggtgctcaggggatagcagattgccgttccttcctgtatgcgcagcctttcgatggcgtccgaatcgtcgcttgcccagatttgcggatggtagcagagcattcccgcatcgaaacgcccgccgccacccgaacagccttcaaagagtacgtcgggatatttttccgtgatatagcgaagcacgtcgtaaagtccgagataatatttatgcacgaacgcaggctccgtcacttcattgagcggacgattcatatcccacttgatataggatatatttcccgaagagagcagttcgtcgagaaaatttttgataaaggcgatcacttcggggttcgtcagatccagcacctgttgattgcgggaaagcgaagttttgcgcccggggcaggcgacggcaaatcccggcttctttttcgccagctcgctgacgggactgatcatttcaggctctacccagataccgaatttcagcccgagccgattgaccttctccgcgagtccctttacgccgtcgggaagtttctccaaattgggatgccaatctccgagcgaagtcgtgtcgtcgttgcgttttccgaaccagccgtcgtcgaggacgaacaattcgacgcccgcttccttcgcgtgtccggcgatttccaggatcttcgcctcgtcaaaattgaaatatgtgctttcccagctgttgacgagtacgggacgcggcgcctgcataaagcgccgaggcagaatatgggcattgaaaaaatcgtgatagccgcggctcatgccgtcgattccctgcgcagagaagcacagcagacattcgggcgtctggaaggattctcccgccggaagcgtccattcgaaaccgctgtcgtgaatgccgcacatcacccggatattgtcataggcgtccacgtttacctgaaagcgatgattgccgctgtatacgagcatcacgcccagcgagtcccctttctcgttcgtcgtatccttatcgcagagcgcgatgaacggattgaggtagtgactgctttcccccgtcgtgctgccgatttcggaaatgccttgaaagagcggctttctttgaagattccgttcctttgcccacgcgccgcgcaaagaaatcatctccgtcttcgccgcggactttccctctatatccaaagagcaggaaaacgccttatgaagcgtcagcgcgttttttcccgcattgacgattctcgcgctgcgcgcgatgacgtcgctgtcgtcgaaaacagtataggaaagctccgcttcgacgccgtacgcttcgtccgcaagggtgacggtgagagtctggcacgcgccgccgttcgccttcgaggaaggcagacctttcaaagccggttttccgtcgcaaatttcatgttttttatatttgaacgaaaacaccgccgtctttcctgcgacggaggcttccatagcgggcagctttaaatcgacatagccgaaagtgggatactcctgcttttcgccttcgagaaagacgcggtcgggcgcgtaggcgtaaaaggaacggtgcggcgcgggaacggtgacgtactcgttggcatggatcttttttccgtaataatgatgcagaagatacccttccttatggatgcgaaggatataggacacgctttttccctgtaagtgcagatactcgccttgactgatgatcatacgacaatattctcctctcttttctattttgtgcaaataaagcgctttaagcctctttaaacgcaaaatcccctttccgaaaaaaccgttctgcggcattcccggaaagggaaaacttttactcgttctcgttttggaacccgtacttatttggcatattccacacttctgaattcacggatcacgtttaccttgatctgtcccgggtattcgagttccgtttcaatctttttcgcaatatctttggcgaggaagagcgcctgcgcgtcgtccacctgctccggtttgacgatgacgcggatttctctgcccgcctggatggcatagctcttgtccactcccgtaaagctcgaagcgatctcctctaatttttcgagccgcttcacatagtttgtccccgtttcccgccttgcgccgggacgagcgcccgagattgcgtccgccgcctgaatgagcaccgcctcgatcgtcttgggttccacgtcgccgtggtgcgccatgatggcgttgacgatattggcgttttcctt

SEQ ID NO: 2514 - DNA, 2314 bp, Unknown
  16S sequences of unknown bacteria
ttgtgtttgcctaggtaaagaaaagccccccttgtgcaaagggggggacagcccgccgcaggcggtcaggggggattgtgaagctaggtgaatgattcagcttggttgcatgaccgggtgcggcagcatcgcttggatgcagcgtcacgctgccaatccctcagtcggcgttcgccgccagctccctttgcacaagggaggtccggtggccggacggccatactgtctttgccttggctcgttgtgcttgcctgggaaaagagagtatgacagcccaggcactgggcttgcccggcgcgggagtgcagtatgaccgcccaggcactgggcccgaaataacacgccgccaatagcaaaagaaacaggccccagagaaccaagttctcatggggcctgtttctttgctggccttcgccgcagcgaaggctctggctcttagaacaggcggctgatttcgtccaggggatggacgcccaccatgcgctcggtaggctggccgttttcaaaaagaatcagagtggggatgctcatcacccggaacttccgggcggcttccgggttctgatccacatcgatcttcacgatctcacagttttccggcagcttctccgaaagctcttccagcatgggggccagcatcttgcaggggccgcaccaggtggcgaaaaagtccaccagcaccttcttgccctgctgattggtcacttcatcaaactgatcctgagtaatgtgcttgactgccataatgaatatcctcctttttcgttcggggctgttaattttaaagttcacaaaattcatctacatttctactgtaacaatcatactaccagttagcccctttgtcaatagtttccccggaaaagggtgaaaaattttccttggggccagagcggatttatgatacaatagcggtaaccttcctgggaagcgggaggaaaacggtgggggaatgcccccaaggaggaactgttacggaactatttttccctgaactgtcaaaagaagaactgctgcgcctgagcagtctggctctggcccatgtaggagacggggtctatgagctgatggcccgcacctatgtggtggggcagaagggagggcttgcccggcagatgcaccagcggacggtggaactggtgcgggcccagacccaggcccgggccataagagggcttttgcgggaggaagtgctcaccgaggaagaaaagcaagtttttctccggggccgcaactgccattcccacgccgcccccaaaagcgcctcgccggaggattatgcccatgccaccggcctggaggccctgttcggctggctctatctcaccgggcaaaaagagcgggtctgcctgctgtttgagcagattcttgccatgaaaccctggaaaaaggaggaataaaaatcatgcgaaagactctggaaaatcccaaagccggtctgatactggattatctgctcattgtgctgggctcctgcatttttgcctcgggcatcgccattttcatcaaacctgccatgatctccatggggggcgtggccggtattgccctgatcggcaactacctcaccggcctgcctttgggcgtggccagcattgtgctcaatgtgcccctgttcatcttcggctacaaactgctgggccgggaatttttcttcaaaaccattgtgtcctcggtgtcctattcggtgtttatcgatgtggtggggccctttttgcccctgttcgaaggggaccggctgctggcggctttgtacggcggcatcatcctgggggccggtatcggcatggtgttcaaatggggcggcacctccggtggcaccgatatcctggccaagtatctgaatgtgaagttcgatatcagcatcggcaatgcaaacctggtgatgaacggcatcgtcatcctggcctgctccctgatctataagagcgtggaaagcgccctgtatgccattatcgtccagtatctcaccggcgtgatcattaacgccatggtggacggctccgaccggcagaaggaagggctgattatcacaaacaagccggaggagatggctcaggtgatcctggagaacctccagcggggctgcaccggcttcggcggcaagggaatgtacaccggcgaggaaaagaccgtgctgatggtggtggtgcgccgccacgagatctcggccctgaaaaagctggtgcatcaggtggacccggagtgctttatgctcatctctgaggtgagcgaagtctttggtacccatttcaaaacctacgacaaataaagccagagccttcgctgcggcgaaggccagcaaaaaaacagg

SEQ ID NO: 2515 - DNA, 2341 bp, Unknown
  16S sequences of unknown bacteria
gcggccgggaaatgcagcaggggtcggcggcctgcacccgcggggatattgaggcgttttttgcgccgcggctgggggaataacagccgcagggggaaggaatgggaatcaaaacggccgcgccgtggaatttatccacagcgcggctgtttttagcagtcctgaaaaaaggtgcaggctcagccttccagaatgtcgcccaaaaggacgtccgccatgatcaggctgcgcggcacatggaaaggccctttgaacgtgctgcctttgcacggcggctcggtgggcttgccgtcccggcgcagataaccgtaccattcgccgcagacgtcgtccgcaaaacaggttttgcagtactccgccgttttgaaaaaccattccaggtacttttcgtcctttgtatcccggtaagccatcaggctggcgatcaggatctcgttgtggggccaccacagcttcatgtcgtgctcatacgcctccggcggcaggcccttgcagtcgatgaagtacagcaggccgccgtattccttgtcccagcccgcttcgatggcaaagttgaacacgtcttcggcttttttgtgcagcgccgcgtcgcccgttcggttggcctcctccatcaggaaccagctgcattcgatgtcatgcccggggttcaccacacgtccggcggtgaagtcgccctggaactcgccattcacgcccacactctccagcgtgcatttcatctccggcttgtggtgatacgcaaagatgtcgtggacgcactcggccgcataccggtcgtacagcgcggcctgttccgggtctacgcggcgcatcacgctggtcatattcaaaaagatcatcgggtccgccagtgcgcggcccgtgcgcgtctccgcaatggttttggggcccattcccgtggggtccggcatgccgtggttcaggtcgtacaccagctgatacgctttgcgcgcgcgctccagatgttcccgctcgcccgtctggccgtaatactccgcgttgccgatggcgtaaaagccttctgagaagcagtaccggcgctggcgcagcggtttgccgtccgccgttaccgtgaagtacagcctgtcccccgccgtgcggttgatgcagtgctcctccagaaagtccaggcaggactttgcggcgtccagccattcctgctttttgccgtacacgcggcacaggtacgagaacgtccacgcacagcgcccctgcatccacacgcttttgtctgtggaaaacaccttgccgtcacgcgtcaggcaggtgtaaacgccgccgtgctctttgtccatgccgtgctccagccagaacgagacgcagctctccagctccgcgcggacccagtcccgccatgcctgcagtttttccctctccatttgaaaaaccttctttcctttattccggcagctgtcgcttgccgggaatgtcaaaccgtgcggcccgagcgcggcggatgccagccgctgccgatgttcgccgcaagataccccgcccccatcagcccggcgttgtttcccagtgccgcgggcacgacccggcatccgcggaagctgggcttgaccatcggtgcggccatccgttcgagctgactgaggatatacggctcccccatgatgccgccgcccagcaccaccagagccgggtcaaaagcgtggatcaaggatatgataccacaggcgacctcgcgaatccatgcatctacttccttttttattgtcggatcgttcaaatgtgcaaaaatatcccgtcccgtggtgagcgccgggtaaagcgccgttacgcgggccaccagcgcagaggtgctggcgtagcgctcgtagctccccgtgccctgccgcgccgggtccacggcctcaggatgcgtgacgagccccccgaactcccccgcgctgcccgcgcggccacggtacagccggccgccgatatacaccgcaccgcccacgcccgtgccgtagctcaccatcaggaaatcctgttcgtcccgcgccgccccgaaggcgaattctcccgccgccgcggcgttcacgtcgttttccacagccaccggcaggcccagctccccctccaggatctgccgcgggttcagccccgtgtagccggggatattgtcgctcaggcggataacgcccgtccgggcgtccacctcgccggcggtggagacgcccacacgctccacgcccggcgtctgccgcacaagctgcgccacgcgggacagcatcgcccgcgccccgccgcctccgtccgtcggcgtttcctctacgtctgtcagcacgccgtcctccagcacgcccgacttgatgtatgtccctccgatgtcgatacatgagattttcat

SEQ ID NO: 2516 - DNA, 16290 bp, Unknown
  16S sequences of unknown bacteria
accaaggacgccggcaccatcgccggcctgaacgtcctgcgtatcatcaacgagccgaccgcagccgcactggcttacggccttgaaaagggcaaggaagacgagcgcatcctggtcttcgatctcggtggcggcaccttcgatgtgtccctgctggaaatcggcaaggacgacgacggcttctccaccatccaggtgcaggccaccaacggcgacaaccacctgggcggcgacgactgggaccagcgcgtcatcgactggctggctgacaagttcaaggccgaccagggcgttgacctgcgcaccgacaagatggcgctgcagcgcctgaaggaagccgcggagaaggccaagatggagctctccggcacccagcaggcccagatcaacctcccgttcatcacggccgtcgacggcaaccccgtccacctcgactacacgctcacccgcgcggagttcgagcgcatcacgtctgatctgctcgaccgctgcaagaccccggtcgacaaggctatgcgcgacgcaggcctttccaacggcgacatcgacgaggtcatccttgtcggcggctccacccgtatgcccgccgtccaggaagaggtcaagaagctcacgggcaagaccccgaacatgggcgtcaaccccgatgaggtcgtcgcagtcggcgcatccatccaaggtggcgtcctcggtggcgacgtcgagggcatcctccttctggacgtcaccccgctttcgctgggcgtcgagaccatgggcggcgtgatgaccaagatgatcgaccgcaacacgacgatcccgactcgcaagaccgaggtctactccacggcggcagataaccagacgtccgtcgagattcatgtcctgcagggcgagcgcgagttcgcgaaggataacaagacgctcggccgcttccagctgaccggcatcccggcggcaccgcgtggcgttccgcagatcgaggtcaccttcgatatcgacgcgaacggcatcgtcaacgtctctgctaaggaccttggcaccggccaggagcagaagattacgatttccggctccacggctctgtccgacgaggaagtcgaccgcatggtcgccgatgcgaaggaccacgctgccgaggacgagaagcgcaaggccgaggtcgagacccgcaaccaggctgattcgttggtgtacgccaccgagaagtccctcaaggacctcggcgacaaggtcccggcagacaccaagtccgacgtcgaggccaagatcgcttcgctgaaggaggctttgaacggcgataacgtcgatgacatcaaggccaagaccgaggagctgcagcaggcaagctacaagttggcagagattgcgtacggcaacgctcagcagcaggctggcgctcagcagcccggcaacacggcgagcggtgactacaacaccaacgccggcggcaacgatgacgtcgtcgacgccgactatgaggtcgtcgatgacgacaacaaggacaagaactaatggctgccgaggacaagcagcctaacgtaggcgaggaggcggccgagcaggccgcccccgcggctgggcaccgaggccgatgcccccgaagcagccgaggctgttgaggccgaagtcatcgaggacgcgcccgaagaagacggcgacgcagcggcagattctggcgactcggagtctgcggcgggcgatcagcccgacatcttcacggcgatcaagcaggaggtcacggacctgcgcgacaagtacgcccgcttgcaggccgagtgggacaactaccgcaagcgcacggcgacggagcgcgattccgagcgcaagcgcgcagcggagaagctggtcacggacttgctgccggttctcgacgaccttgagcgcgccatcaagcacgcgaaggagtcgggcgagggcggcaacctcaccgagggcgtcgaggctatccagagcaagttcctgcagattctgggcaagtactacgtccagcagatcaaggcagaaggcgagccgttcgatgccatgaagcatcaggcggtcggtacgcaggaagacacgagcgtccccgaagagacagtcgtgcaggtgtatcagcagggctatgagatgggcgacagggtcatccggcctgcaatggtcgtcacaagcgtcggagggccggcgcggccggctgggccagatggcgacgaacaggacaaatagaatttttcgggaatgcgttcttcggagcgcattccttatctgataagggtaggtgagcgctatgccgaaaaagagctattacgacattctcggcgtgaagaagagcgcttctgccgacgagatcaagaaggcgtttcgcaggctcgcgaggaagcatcatccggatgccggcggcgacgaggaaacgttcaaggaaattaacgaggcgtacgaagtactctcagaccccgagaagaaaaagcaatacgacacgtttggcacagtcggaaacttcgcccagcagccaggcggctggcagggaggtgcctggccaggcggtggacggcgcacgtacacgtacacgtcgacgggcagttcgggctcgggatttgactggagcgatatcttcagcaatatccgcagcggcgacggcgcgtttgggtcggattgggatttcaacgtcaaccgcacgcaaaacgggcgcgatctgcagacgagcatcgagctgacgttcgacgaggcgttcaagggcacgaccaaacaggtctcggtgcgcattccgagcacgggggagaccgagagcatcaaggtgaaggtgcctgcgggcgctgtcgatggcggcaagctgcgcttccgtcagcggggcgaatacgggtccggcggcgggaagcgcggcgatctgattatcgtcacgaagatcaaggagcaccctgtctatcggcgcgaccatgcggacgttctgatggacttgcccgtcagcgtcgaagaggcgatactcggcacgcgtattgtcgtgccaacgccggacgggtcgcttgtgaagctgcgcatcccggcgggtacgcaggatgggcgcgtactgcgcgtgaagggcaagggagcgcatgacgtgaagggttctggcaatggagacctgaaggtgaagatcaaggtggccatcccgagaagcctcaacaccgagcagcgcgctgccatcgagaagttcagggacgcatcgcccgacccggctcagctcaggacgaacatcgacgcgcaggtagcgcgcgtgaaggcataaggataggaagtagcaggcatgtcgaagacagataggaacaggccgctttacatgattagcgtggcagctgacttggcaggcctgcatccccagacgctgcgcatctacgagtccaaagggctcgtgacgccgcagcgtactaagggcaacacgcgcatgtactcgcaggccgatatcgagcggctcgagctcatcagccagcttaccgacgagggcatcaacctcgcgggggtcatgcgcatcatcgaccagcacaagcagatggacaagctcgaagcgcagatcgagtcgctgcgcaaggagctcaaggtcacgcgggaccgtcttcacgagatggagatgcgcgcgacgatcacgtcgctcacgaagcgccccgaccattccaagctgctcaacgaagtgaacgagatcgaaagctggggcgacgagctccacgactgatcgagcgtgagctgcaggccggcagcgccgatagccagggagaaccgaccccgtcgccaatagccagggagaaccgacccccgccgcctgctcgcgactcggggtcggtcctcgttggtcatagggttgcttgcaatctccatcggtcgcatcccaccagtctcatcaatcggggtcggttctccctggtcgttccctggctgcggaccacagcgttacgcataggttacagaatcaaaacctaacaatgaaacacatagattttctaagcgtaacagtgtttactagtctcatacaaaactcaccacaattgaatatcgaaaggaaggggcaacatgagagtcgataaactggcaatcacggccgcggaggctctgcagaattcggtcacgattgctgccgatgcgcaagctgccgccgtcgagcccgagcatttgctcaaggccctcctcgattcccacgagggaaatctcactgccatcatcgagcgcatcggggcagaccccgcagcaatcgatgcggcaatcacaaaagacatcgaaaaccagccaaaggtccagggcgcgcaggtcgggcaggccagccagcgcacgcagcgcgtcgtcgacggcgcggtaaaagctgctgagaagatgggcgacagctacgcgaccaccgagcacctgctcattgccctgtccgaggacaagggcgatgccggcaaggagctcaacatcgccggtgtcacgcgcaaacgcgtggagcaggtctacgacgagctacgcggtgacacgcgcgtaaccgatcagaactcgaagacgcagttcgaagcgctcgagcagtacggcgagaacctcacggcgaaggcgcgcgagggcaagctcgacccggtcatcggccgtaacgacgaaattcgccacacgatccagatcctgagccgccgcaccaagaacaaccccgtgctcatcggcgagccgggcgtcggcaagaccgccatcgtcgaaggtcttgcccagcgcatcgtctccggcgatgtcccgagctcactcaaagaccacgagctcgtcgcgctcgatctgggtgcgatgatcgcgggcgcaaagtaccgcggtgaattcgaggaccgcttgaaggcagtgttgcgcgaagtcgagcagagcaacggaaacatcatcctgttcatcgacgagctgcacacgattgtcggggcgggcgccggtgacggcagcctggacgcgagcaacatgctcaagccggcgctggcacgcggcgagctgcacgccatcggcgcgacgactctcgacgagtatcgcaagtacatcgaaaaggactccgcactaacgcgtcgtttccagccggtcatggtcgacgagccgacggtcgaggacacgatttcgattctgcgtggcatcaaggagaagtacgagattcatcacggcgtccgcatccaggacgcggcgattgtcgcggcggcgcagctgtcgaatcgctacatcaccgaccgcttcctgcccgacaaggccattgacctcgtagacgaggcgggcgcgcgcatgcgcatggagattgactcgaagcccgaggagctcgacctgctcgaccgccagctcacccagatgcagatcgaggaacaggcgctgatgaaggaagaagacgagctctccaagcagcgcctcgaggagctgcgcgtgcagatggcagagcagcagcaagagctcgaccgtcgcaacgccgagtgggcaaacgagaaagacgccatcaatcgcgtacaggagctgaaggcgcagatcgaccaggcgaaggccgatgaagagattgcgacgcgcgagggcaatctgtcgcgtgcatccgagattcgctatggccagattccgaagctaacgcaggagctgcaagacgcgacccgcgcgctggaagacaaccagagcaaagaggaaggcctgctcaaggaggaagtcacgcccgaggacatcgccgacgtcgtgagcagctggaccggcgtgccggtgagcaagatgatggaaggcgagatggcgaagctcgcggggctcgaagacacgcttcacaagcgcatcatcgggcaggacgaggcagtccatgcggtcgccggagcggtgcggcgcagccgtgcggggctgtctgaccccaacaagccgctcggcagcttcctgttcctcggcccgacgggcgtcggcaagaccgagctcacgaaggcgctggctgaggcgctgttcgatgacgagaagatgatggtgcgcatcgacatgtccgagtacatggagaagttcagcgtgcagcgtctgatcggtgcgcctccgggatacgtcggctatgacgaaggcggtcagctgaccgaggctgttcgtcgtcatccgtacagcgtgattttgcttgacgagatcgagaaggcgcatcctgatgtgttcaacatcttgctgcaggtgctcgacgacgggcgcctgacggatgggcaggggcgtgtcgtgtccttcaagaacgcgatcgtcatcatgacgagcaacgtcgggagccagttcatccaggagtttatggagacgggcgataaggacaagatgaaccatgcggtccaagaggcgctgcgcgcgacgttcaggccggagttcctgaaccgtatcgacgagattatcacgttccagagtctggatgtcgagaacctcgagaagattgtcgacctccagctcgacagggtgcgcgagcgtctggccgatcgccgtattgcgctcgaggtcacgccgagcgtgatggagcgtctgagcttggatgggttcgatccgctgtttggcgcgcggccactcaagcgcctgattcagcacgaggttaccgaccgcgtggcaaacgagattatctcgggcaatctgcgcgaaggcgacacggtgcgcatcgaccttgacgaatccggcgactacaaggcggatgttattccgaccctggagccgacagtgctctaaggccgattgacacaagtgcttctggcagccagcgaggccgactaactggggtcggttctcgctggctgctttttatgtcccggacgttcggatgtccgggaccgacgttcggggtctgtgttcggggtcggttctcgctggccacaccgtctgaccccgttgtcgtaaagtctgaaagaatgctgaaaagacgggaatttgttccatctcgcacggtgcgcgcaaggatggctatacaatcaaccggggtgagcgggcactgcgtaacgctggtgcgaacaggtgatggaaatgccaaggtcaccagagcgattggactagccatgactcgcaagccacgaaagcaaagccccgccaatatctatcatgtcaccaaccgcggcgtaagccgccagattatcttcgaggacgatgcggatcgtgaacggtttctcgttactctgcgtcgcttcatggcagaatttgacggcgagctatatgcttggtgtctcatgagcaatcattttcacctgctatttcacatgaacctcgaggacatctcgctgctcatgaagaaggtaggagtaagttacgctgcgtatttcaatcggaaatacgatcgcgtcgggactttgtttcaggatagattcaaaagcgagccgattgacacggattcgtatctcatgacggtcgtgcgctacattcaccaaaatcctgtcaaagctgggatatcccgaacgtgcgagtatcgctggagcagctatcgagaatatgcgcataacaatcgaaaactatgcagcactgcattcgtgatttccgtgttcggaggtacttcctggttgattctctatcataacgagattgctgatgctgataaatgtatggcccccgaggtgaggtggaggatgagcgacggtgaggtggcacgccttgttcggcgcgcttttcggaggtttgggttgccagatgcatcgggggcagtgaaggcaaagcgagatgcggtgattcgcaagctgctagcggatggtgttcccgtgaaccagctcgctcgcgttctcggcgtggggagagcggttgtcagatatgcataggtgcgctgactgatgatgacggctgaatcagccttcagtgtgaaacggcaacctggcagctgtcgtagccaccgagaaccgaccccgtttggggcttaccaacctggaatgcgtgtgaatcccgatagccactgagaaccgaccccgaagactgccgacctcgaggactgcctcccgtttgggggctgacccagaccaccgcaattcagccacgcgctctcgggtctccgtgtaggtttgtgtgccccgtatgtggaatagtccgaatgaccactgagaaccgaccccgcgcgccaccttgcggctatcatgcaacatcatgagcaaacaggcggcggcaacacacaggacagcagcgcgcacgacggcggatatacgcggtctgaccagtgctgaggtggctcagcgtgtctccgaaggcaaggtcaacgagaacgccgatgtcaagacgcgcaccataccgcgcatcttccgcgacaacatctgcacgctgttcaatctcgtcaacgtcattttggcggtcgcgattttctggaccggttcgtaccgcaatctggttttcctcgcgattatcctctgcaacgtcgtcatcggcatcttccaagaggttcgcagcaaactcaccatcgaccgcttgagcgttatcacatcgacgaaagcgcatgtcattcgcgatggcgagctgcaagacattccgctgggcgaaatcgtcctcgacgacgtcgtcgagctcggccgcggagaccaggttccatctgactgcgaggtcgtctcgggaaggtgcagcgcaaacgaaagcctgctcaccggcgagtcggacctcgtcgcgaagaaggcgggcgacagactcatgtcgggcagcttcgtgagtgccggaagctgccgtgcgcgcgtgacggcggtcggcgcagacaattatgcgacgaagatcaacaatgccgcgaaggtgtttcgccgagcacgctccgacatcatggattcgctcaacaaaatcatccgcatcgtcaccgtgctgctctttcccatcggcgcgctgctggtcgcaaaagagatgaccctcgggggaggcacgctccagaccgcaatcttgcacacctccgcagcgcttgtcggcatgattccgcagggtcttatcttgctcacctcggcggtcctcgcggtcagcgtcatccgcctcgcgcagcacaaagtcctggtccaggagctgtactgcgtcgagacgctcgcgcgcgtcgatgtcgtctgcctcgacaagaccggcacgatcacgacgggggagatggatgtcgacgaggtcatcccgttcaagggggtgagctatgacgacgccctgcatgcgctcatcgcactcgatgaggcgaccgatgacgagaacgagaccgccaaagcgctgcatgcatatgtgaaggacctcgaggagccgtcgggcgtccctgctgccatcatcggcacggcgcggatcgtgccgttttcctccgagcacaagtattcgggcgtctgctttggcagtgaggcgggcaactacgcgatcggtgcggcggagttcgtcttgaaaggcagctccgcgctcgccgaggcgcaagatacgatcagccgtctcgccggcgtgaggcgcgtgctggtgctcgcgcaagtcgaggacttcgatgaggaggacgcgataatcggcgaggtcacgccgctggcattcgtgttcatcaaggaccggattcgcagcacggccaagcagacgctgaagtactttcacgagcagggcgtgcgcatcaacatcatcagcggcgatgcggtcgagacggtgtccaacatcgcgcagtccgtgggggtccccgatgcggaccgatgcgttgacatgagcacggtttgcgacgaggatatcgagcgcgtggcgcgggaatgccgcgtgttcgggcgtgtgtcgccggcgcagaagcgcaagctggtcgaggcgctccagaatcaggggcatacggtcgccatgacgggcgacggggtgaacgacgtgctcgcgctgcacacggccgactgttccgttgccatgggcagcggatctgatgcggcgaggtcggtggcgaatctcgtactgctcgacgacgacttcgcctcgatgccgaaggtcgtcgccgagggacggcgctccatcaacaacttgcagcgttccggctcgctttttctggtgaagacgatattcagcgcggtgatgtcggtgctgttcatcgcgattgtggcgtacaactacccgtttatgacgattcagctgacgcttatcgactgtttcacaatcggattgccgtcgtttgttctggcgctcgagccgaatcacgacctcgtgcgcggcgagtttttgcacaacgtcgtgaacaaggcggtgcccggcgcaatctgcattgtggcggcggtgctgatttctgtggtgtacagcttcgtgatggggttgagtcaggaacagttctcgacgctttgcgtgattttgacctgcgtttcgggcgtgaacctggtgatcagactgtcgattccgttcaatccgattcgcgttgggctgcttgtcgtgatactcgcgggcctgattttgggtgtcttcgtattcggcccggtcttcttgcttaccccattctctttcgagatggtcatcgtgacgataattctcggggtgatgattacgattctcttcaatttgctgttcaacggggcgattcgccgggaaaagcgctatctcgcgagtctcggcaagtagcggcctctggctgtggggcctgcttgtggggtcggttctcagtggctcgacgacggcagcgagtggccagcgtgtagccagcgagaaccgacccccgcaaccaacggacccccgcaaccagcgagaaccgaccccgtaaccagaccccgcgaccacttcgaccgcgcatgctataatccctgcattatgctgccgcgattccacctggccgatatctcgaccgtgctacattttctcggcgtgctcgtcttgatcacgggcgcgctgatgttcgttcctcttctcgtcgcgctcgttgccggcgagacagcgcaggcggtagcattcgtcttcggcatcggcgtgagcctgttctccggcgcgctgctgtacctcttccgcgcgcgcaagctcgatcgccgccgcagcctgctcctcgttggcatgggctgggttgtcgccggtctgatcgcatccgttcccatgtacatctcgggtgacttcgacaactacgtcgccgcgctcttcgatgcggtctccgcgctcaccacgaccggagcctcgctcgcaaccgacgtcgaccacgtcggctacgcgcagaccacctggcgtgccgtgctcacgctcgtcggtggccaggcggtcatcctcgtcgcgatgcacctcgggtttttcggcgagggcggcaacatcacagtcgccaacaaaaccggcgtccacgatgagcgaacctaccgtctgaaagacaccgtcaagttcatcgtcctcgtcggggcatttttcctcgtcatcggcaccgtcggcgtttgcatcatctgcctcaccttgggcatgagccttcccgattcggtcatgacgggcttctggctcatcaccaacgcgctctcgaccagcggtttcactcctcacagctcgagtcttgtctactatcactccgcagccctggatgcgtttctgctcatcttcatgctcgccggggcgctcaacttcgccatcttcggctacgccctgcgcggcaagctccgcccgatgtttcgcaactccgagacgcgcacgttcgcgatctggctgctcctcctcgtcgtcttcgtctcgtttgccctctcgcgcgaccaggtattctcaagcgcgaccgggctgttcgtcaacggaacgttcatgaccatctccgcggcgacgacgagcggtatgtgcacgatctatccccagcagttcgggatcaccatcagcgaaagcgtcatcatcatcctcgaggtcgccatgctcgtcggcgcgtgctcccactccaccggcggcggcatcaaggttttgcgcatcatgcaggtgctgcgctggatcgtctactcgatccgcgtccgcctcatgccgcgcaacgcgcatgtgcgcgtcaattaccagcacttcgggctgaagcacctgaccgcgcgcgacgcgacgttcgcgatgacgatctccatcctctacatcgcgacggcggcgctcggctccatgctcttcatcgcgcacggcggcgatgccatcaagtcggtttacgaggcggcctcgctcgtctcgaacacgggcctcacggcggggatgctgtcgtcgacctccccgatcgacctcacgctcgtcggcatcctgctcatgtgggcaggccgcctcgagttcatcgccctcatcgccgcgttcgtcggcctcatcatctcgctcgagccacccaacatcctccggggactcggcaacgacgggctgggcaaaaagaagctgcgcagccgagggggcaaggcgtggcgtcgctggaggaaccagaagcgccgtcgcagcaaggccggcaacgcggaaagggcgacgcgctgcgttggcgccgttgccgcaatcgtcctgtctgccgcgctcgtcggagcgccggcttcgtacgcggtcgacgggggcgtgcagattccctcgcaaggcgatgcgagcatcggggcgccggcatctgatgcccccgagccctcgggctccgacacgtaccgctccgtcgcgatctccgacctgctctctgcgaccgagcgcctcaacgggcgcagcgtcaagttttcgggcgaggcgatcggcgagccgattgtggccgacgacgggcacaagtgggtcaacgtcatggcggcggacaagtcgatgatcggcgtctacatgacgaacgagcaggcggcggcgatcgagcgctacggcgcgtaccgcatgacgggcgacacggtcctcgtcgagggcagctatcagattgcctgccccgaccacaacgacgagatcggcgtccacgccgacgcggtctcggtctcggccgagggcgcttcctacgaacgctcgtggtcgatgacgctgttcacgtggggcgtcgtcttgggcggggtcggctctgtcctgttcgcgatcacgacgttgcggcgcggcaagctgcgcaggcggccgcgcgcgtgattggcgctacaataactggcatgcgaaaggagagctttgaggcagaagaccacacagcaagcggcggggaagcgccggcccatcgtcgggctgttgtccgttctgggctcagtcgtcgcgtttctgctcttcctcgcactcgtgacggcgggcatccacttcgcgatgctataggcgagcgcacgtgatctaccgcctgcacatacacgactggagggtcatcgcccattacctgggcattctgatcatgctcgtcgcggtggccatggtgttttgcttcgtggtcgcgctcgcgctcggggagtacaagaccgcggtcgacttcctgctgtcgattggcatctctgccacggtcggcgccgtgctgatactgtttcgctacgagcacggctcgctcgactggcgccagtcgctgatcatcaccggtctgtgctgggtgattctctcgctattcggtgcgctgccgctttcgatgtcggggcagtacgcgaactacctcgacgcgatgttcgacacggtttcggcgttcacgaccacgggcatgtcgctcgcgctcgataccgaccacatggccctgagccttgcgctgtggcgcgcaatcatgcacctcatcggcggcatcggcgtcgtcgtcatcgcgctggcgcttggcatcttcggcacaggggcggcagccgcctcgctgtatcgcgccgaagcgcgctcggggcaggtcatgcccgagatcaggcagacgtcgcgcttcatcctgcggcttgcggccgtcatcgtcgtcgtgggaacgattgcctgcatgattccgctgtttctcaacggcttcagcgtgagaagcgcgcttgtgaatggtttcatcgtgacggcgtcggcgttttcgacgggcggcatgagcacgcactcgatggggctgatgtactaccattcctggccgctcgaggtcatcgcgctcgtgctcgcgatgctgggctgcatcaatttcgtgctctatggcgatctgtggcgggggagaacgaagaacttcttcaaggacatcgaggtgcgcacgctcgtcgtgtgggtgacagcactcgtcgtgttgattgccctcgcgatcaagggctcgtatttcgaagaccttggggcgatgctcagacgcacgctgttcgagacgctttccggtgcgttcaacctcggcttttcgacgatgtacacggggcagatcctatacgggatggggtcgggtgccctgttcgtgatcatcttgtcgatgattatttgcgggtcgtcctcgtcggcgtccggtggcatcaaggcgtttcgcgtcggaatcgtcgcacggtcgattgcgcagacgattcgcgaggtgctcgcccccgaccgggcgcgtccacgcacgttctactaccagcagggcaagaagctcgtgaccccggagctcgtgtcttcgtcgatgatcatcttgctgctctatgtggtcacgtacgtggtgggcgccattgtgggcgttgcgtgtggctacaatgcgctgcccgcgattttcgattccgtgagcgcggcatcgaacacgggtctttctttgggcgtggcgtcggcgggcatgccgcgtgtgctcgaggtcacgttcatgctcgagatgtggcttggacgtctcgagttcgtcgctattttcgcgatgattgtcgagctgttcgcgtttgtggttcccagcaagcgcatgcgctggaggacgaagaagaaatgatcccttcgatagctcatgagggcgccgcgcccgccgctcgcgtcgacaccacggggtcggttctccctggtcattggggacaccaacagccgtggcgctgccgtgcgggtcatgcggggtcggttctccctggtcatagcgcaatggcagtgctgctcgtcattttgtgcgcgcttgggctcgcatcgtgcctgcttcccgcctcggcgcatgcaatcaccatcgatacgagcgacgacgacatcgggaccctcgccgataggttcagcacgctcgatgacctctcgaactcgaagaactcggacgacgaggtcgtcgtcaacacgcgcatcgccgtgctggcatctgtcaaccgagcgctcgacaagaccgaggttcgtttcacgggggaagcggtcggcgaggtcatcgacgcaggcgccggctacaagtgggtaaacgtctgcgataacgggggcaattcgatcggcgtgtacatgaccgacgagcaggcagaacatgtcgtgaactgcggggactacaagacgaccggcacggtcctcgacatcaccggcgcgtactacatctcgtgcgacacgcatcaaggcgccctcgatgtccatgcgtcgcaggtcagccttgtggatgcgggcggtgcgacgactcatgaagtcgatttggggcggcttgtcgccggcgtcgtgctctgcgctgtcgccctcgctctggttgccgttttcgtcgtgcttagggcacgttccggaaggagagggaagagttgataccgttcgagcatctgggggcaaccgggcaggtgaaggcggcgtttcgtcgtgtgaacagaaaactcgagaagcgggggcggcgatgcgccctcgggcgtgtggtctctctcgaccgcgggtttcccctggtgcgcacagagtatgacgaggagcgtgccgagctttcggcatccatcaagaagagcaacgattcgattgtcgcggtgggcgactgggttgcggtggagcgccccgacagccacgagaaggcgataatccacgcggtgctcccccgcacgacggagcttgcccgcgtaaagcgggtgggaagagaaaagcagctgagacgccaagtgctcgccgcgaatgtggacacggtctttatctgtcagtcgctcaccggcatcggcctcgaccggaggctgttgattcggcagatggcggccgtcatggggtgcggcgcgaagccggtgttcgtgctgacgaaaagcgatcttgtctcgagggaggtcgttgacggggcgatgggcgaaatagccgccgtggctccggatattccgttgttggtgatatcgaagcacgactcagactcggtgggccgggtgcgcgagctcattgtgccggggacgacgagcctgctgttgggtgagagcggtgtcggcaaatcttcgctggtgaatgcgctgctggggagtgaggcggccgatgtcggatgcgtccgtgaatccgatgaccggggccgccacacgacggtcgcgcgacggatgctcgaggttccgggggcggggctgattatcgacgcgccggggttgagaaccctgcagatactggacatggacgcgagtctgaaacgggcgtttccggatatcgcgaatgcggcgggtgcctgcaagttcagggattgctcgcacaacgacgagccgggctgcgccgtgcgcgagggagtccccgcggcaaggctcgctgcctggcactacctgaaagagtccgactggcgctcat

SEQ ID NO: 2517 - DNA, 2812 bp, Unknown
  16S sequences of unknown bacteria
cgggcagcgtgtccacgcccagtttcatgatctttttgccgcgccccgcgggttttttatccgcttccagcgcttcgacgatctcttcgagttcttcgccgatgaacaccgaaacgatggcgggaggcgcctcgtagccgcccagacggtggtcgttgcccgcgctggcgacggaaaggcgcaaaagatcctgatattcgtccaccgccttgatgaccgccatgaaaaagagcatgaactgcccgttttcggcgggggtggaaccgggatcgagcaggttgacgcccgtatccgtcgtcatggaccagttgttatgtttgccgctgccgttgatgcccgcgaagggtttttcgtgcagcaggcagtacagattgtgtttgtgcgccaccctcttcatgatgtgcatcatcatctggttctggtcgctcgcgacgttcgttgtggtgaaaatgggcgcaagttcgtgctgggcgggcgccgcctcgttatgcttggtcttagcgagaatgcctaacttccagagttcttcgtccagatcgcgcatgaattcgctcacacggatcttgatggcgccgaaatagtggtcttccaactcctgccctttgggcgggcgggcgccgaacagcgttctgcccgcaaagcgcagatcctttcgcgcatagtacatggagcggtcgatgagaaaatattcctgctccgcgcccacggtgggcagcaccgcctttgcggtggtgttgccgaacaggcgcaatatcctgagcgcctgcttgttgagcgcgttcatgctctttaaaaggggcgtttttttatccaggacctcgccgctgtacgaacagaaagcggtgggaatgaacagcgtaccgtccttgacaaaggcaaaagaggtgggatcccacgcggtatatccgcgcgcctcgaaggtcgcgcgcatgcccccgctgggaaaggaagaggcgtccggctcgccgcgcacgagttcttttcccgaaaagtccatgatgactttgccgtccttagtgggcgtgataaaactgtcgtgcttttcggccgtgacgcccgtcatcggctggaaccaatgcgtataatgcgtcgcgcccttttccaccgcccaatctttcatggcgttggcgacgatattcgcaagactgttgtccagaggcctgccctcttcgatggtctttcttaaagacctgaagatatctttgggcagtttatcctgcatcacctgccagttaaagacgtttgaagcgaacatttcgggtatgttcataaaagattttatctccttggattcgttcggtctgtatgatagaaaaattataggttaaaaacgcaattttgtcaaataaatcgggggtgcgcagggaattcttgcgcgcataaatcggcaaatatgttgacaaatgaaagcatttgtcatataattatcttataaagcgcatgaaatattcgcgctctttgtaaaaacaaacatttaggaggatatcgaaaaatggcaaaaagcggaaaaggctatctgaatgcggggctcccctggatcgtgaatctgatcctggcgatcattccctttacaagttggttgctcggcggtgtcacccgtatcatcagaggacatctcgtcgcgggtattttacaactcatcccgcccattacgctggtattctggatccttgatatcgtcggcgtggcgaccaccaacgatctgaaattttacgcataacaaaaacgaaaacggctgcgccctcggcgcagccgtttttatttgtctttgccttcgtcgcttatgatctccccttttttcgggcgcatgagcctgccgcccttcaaatccatggtaaggctggctttatcttcgaacatgatgccccgctgcaacttttcgtagccgtatttgctgcggatcttttccactgcctgctccgcgcgggcttttttttcgtaatcgcccgagagaaaaccgaacgtgagttgttccacgcccttatcgaagcccgaaacggtgacgcccagcccgcgcaccgcccgccgcaaagcgtaatgttcgcaaaaaagcgcgtacgcttcctgcgcgatctcgccgcaaagcgcggtcggacgcacttttttctgataggaatagtcgttcagatccctgtcgcgcacccataaatgcacggtattcgccttgccgaggcccgcgtctttgagccgagaggcgacgctttcgctcagaatatacagcacccgcttgacgtcggacagattgaggatatcttcgcgccaggtggtggaattgccgatggatttgagttcctgcgcctcttcgatatgtcgcacgggcgaatcgtcctcgccgcgcgcgtaagttgaaagcgtctgtccccacttgccgagataagattgcagaaaggcgggttccgctgccgccagagcgccgatcgtgcggacgccgatcttttccagccgcgccgccatcgactttcccacgaacaagaggtctgtgacgggaagcccgtagatcttatcccgaaaattcgaacggtctacgacggaaaccgcgtcgggctttttcagatcgctggcgagtttcgcaaatactttgttgaaactcacccccaccgaaacgcttaaacccagttcttcgcgcacggccctgcggatctgttccgcgatctcgtatccgctgccgaacacgccgcttttcgtcacgtccagccagcattcgtcgataccgaaaggctcgatgtgatcggtaaaacgcccgtaaatatcgcggacttctttcgaaagtttggtatatacggaaaaacgcgcgggacggatgacgagatga

SEQ ID NO: 2518 - DNA, 32759 bp, Unknown
  16S sequences of unknown bacteria
attataagttctgtttatcagttgccgaatagagtcttgtttgacgaaagtacaaggcccagtgaaaaaaagagagaagaattaaaaaataacattaaaatcgagattgaaagattactcgcaaaccaaaattagtcttcatgaagatttctatatctatgtttgaaaattaagatgcggcgtatcaccattccattattattggaattacagccaccgtgtcacagcaaaaccgccgacgaagtagaagatttttgttttttggtttgttctgcaccgccaaaccactatatcttgtatgatatagtggtttattatttaaatcaaaggatatatattgtgttgcatgttttaatagaacaacagagcaacacggtgccgtgaatgtcttttgcggcagatttcgactattatcaggttgtaaataatatttgtatattatcatataaaaaaatctataaaatggttaccgcttttcgcaagtaaaatcaagcattaacatgatgatggttctataatgacagtagagcggttggagtgaacaaaaaatgtatgagtggcacaagcaagtccaaataatcgttgacgaaatcgacgaatgcattaagcttcataatgatgaagaccttacactgcggtttctttctcgccggctgggctattccgaattttatactacaaggaaattcaaagaaatttcggatatgccgcttagggattatctgcggcaaagacgcttggcttttgcactgaaagagttgcgagacagccagaaaagcatcttggacattgcttttgactatgggttttcatcccatgaagcgtttacaagagcctttaaagcaacatatggcatcacgccaagcatgtaccgtaaaaagcctgtacctgtcgttctacgcacaaaaattgttccttttgaccgctactttttaggaattggagagattggcatggaaaaatctgcagaggaagtcaagacctatttcgtaaccattcctgcgcacaaatttttgcatattaaaaattatgaaagcaatgggtattgggatttttggcaaaagcagaacgccattcccggacaggactgtgataccatttgcggcctgctcgacagtatcaagggcaagctggatgacaagggaagcagcgaatccaacggcggcagcggccagatcatggcgtatatccacgatccaaagggtcagcccttctgttatggcatcccccgcgccgaatgttacggcgttcggcttgcctccgattatgacggcgaagtgccgccacaaatgcttttgatggatgtgcccgaagccgaatacattgtttttgagcatgggccgttcgattatgagcaggaaaaccgcagtgtggaaaaaaaggtcgataaagcaatcgcaaatttcgatttttcaaataccggttattgctatgacacttcccccggaagagtagcttacttttttcacgacccagagcggttctggaaatatattcgaccggtacgaaaggtataattcaggactacaaccgccgcgtcacagcaaatccgccgatgaagtagaagatttttgtttttagtttgttctgatccactaataaaaaaccgctatatcttgcaggatatagcggtttttgttaaattctatatattatatcggtcaatatactgtatgtcgaataaaactaccgttttgctcaatatgccgtgaatgtcttttgcggcagatttttactattattcggtgcaagacgtagcaccaaggtaaccagaatgccgaaaactgtacagaaatatccatgctttactctattgcctcattcgggggtatcgttggtattcaccggaattgcagttttcatcctttccggagcagcgccggactgctcgaaaattattcagggcaccatagcggctgcagccgtcatcaatgaaatcattgcagtgattatggtaaagaaaggcttcgaataggcgggcgagttcaaaaagcaccgtacaacttgaactaatttacactattcgtattcctatctcaaagccccaaggaaaaagtgaacctcttaaaagtcaacaggggtgcctttgtatcactataagggcctatctccacgtcgtcgcaatccgcacatcgcctgcgacgatttttttatataacaaaaagccttgaagaatcaaggctttttgttatattcaaaaccaaattaatattcctgcatatccgcttcggcttttgttgcctgaacggttccccgcggatgatgtggaggcgcgtaaatcgtataaatcttaagcggcttacaacctgtattgacaatattatgccatgtaccggccggaacgaaaacagcacatccactgcatacgggacgctgcaattcaattcggtctcgggaaggtcccatcgtgaccattccatttccggcttcaatccggagaaactgatccgtgtctggatgaacttccagcccgatctctccgcctgccggaatacacattagtgtgagctgcaaatagcctcccgtccacaatgctgtccggtaatttgtgttttgcatagcggctcgagcgatattggtaacaaacggattcggtccataatctttttgcggtgtcaaaaaacagttgttcctgttatcgcaatacatacaaccactcctttcaataaatagtatatgagccggcaagtattttgtgaaagagtaatccaagtaaacgacgatcggccgtttttcgtttggaaaggcgtttcaacgggaccgttatttcaatggtcccgttgaaacgcctttccggacgctcgaacataaacgccgggaatcaccctcttgatgggggcgcttttttatggaggcacggctgcgttctgcaaattttcaataatcagctttccttcatttcatcataaatgcggttaatctcgtcttcgatttttgataatggaaactcaataacggaaacgttgtccgtatttatcataatttcggctccctccaaatcatgataaacaaacatcttctccccgctatcgtaatcttcaaaaacataggctgtctctatttcaccggccagcgaatctgaataatcaaagtcgacactggtcgtcacggcatcaccatggacgtagtgaatggtcatgctgttgatgacatcgtaaacaatgtcttcgtcccaattcattttttcagtaatttgtttcatcgccgccataaactttggtgaaatcttttccggatccggctcgttttcaaagtctgaataataaaagtaatcttccagcgattcatacacaacctgcggaatttcgccgcaattaacgttgctgtcccaattggtaaaaccgggttgatcgcaagcttcgtccaacaatacgatactgttcacgttccgcatattgagatacagaagtttgttatccatgcaaggaacaatcatgcgctccttatcctgcatatggtagaccaaactgcgtgtattcgtcgatatgggataccaaagatattcttttgagtgaacaggcaggattccgatatgtccccaaaatccgctgatctgagccccgcccgcccctttcggaaggtgaatgatatccgccagcacggcaacctgcggttcaaaaatgctttcgcccagcaaactgtttacacccacccccaaacagaacgcaatatcgcggagttccgccatcgaagcttccgcaccgctttcgatttccagaaaccgttctgaagaaatcccggtggcgcggcatatttcactcatcttgatacgcaaagcgctgcgaagggatttcgccttaatgtagggattttggatgtttcccataaacatatccggcgtcatcgataagcaatggaataccttctccatgtgattgctgaaattcaccttgtttgtaatgttgccggtcagcagtttgtccagcgtgggccgtgaaattcctgcatcggcacaaaatcttgcttttgtgattccctgtttgtgcaatagttcttctaacctggagcctacaatcgatcgcttttcaaagagatcatcgataccgtacatccgacgcaccttcctttcaaagcgagtataccatgctttgtttgatttgtaaatatattttttactattttacaaaatatttttatcatccgcttatgctgcttctgccatactcttattcaggaaggatatggtcccctcccgtccagttttatattataaccctacgttaagcgatgaggctttatctttcatcctcctgattgatatccaatatggactgtactcttaacatttctttgaaattcttcaaaaaaagaaaaataccccttgatttttccggatggattcattataatagtctagcgtcctgagagcacgttatgcgaaccagcataaaccagcataaataaacatagggagaagtcgcctagtccggtcgagggcgcacgattggaaatcgtgtaggcgttaaacgcgcctcgagggttcgaatccctccttctccgccagatgaatgtcgaaagaagtcgattgccttaacaacaatcgacttctttcgatttatgtgatatagtaataaatattttaatgaaaggaaatcggtatgaatattatttataatgatacgaaaaaggatttaccctctgaacagctatataaattatttgtggctgtaggttggtcgggaacctcagacactccagatatgataaaaaattataatataccgtttattaactcaacccttgtaatttcagcgtgggaaaacgagcttttagttggagctatacgggtattaagtgataaaatgttcaggtcagttatttatgatttactagtaatgcccgaatttcaaaatatggggattggtaaggaactattaaaacgctgtatagcgcattttccaacatcagaatggttggttcaaacaaaagcaaacatatctggttattatgaaaaaaatggatttaaacccataaatgatgtgtttttgaccattccatgcaaactgttttcaaacacctaacgacagtattttatggaagttcaagtcttatgggcaaattattctacccgatctttttgtgccgcctttacacgtcaccgcaagcgatatatcgcttgcggtgactttttataaaaatcactggcgcgctcatcccactgcgtctcccctttcgcaaaaagtcacgcgacggctcgcaagagcgtcttgttctctgtgctttgtcctcacgaaacaaggaagccgcgtcctctcaggcgccacgcatccggcggcggaaaatccagaccgctaggccgtaaaacaccactgcgtaaccagccacccacacgagatggaggggcatggcgctatactccccgttcatggccgcctttaccgcttccaccgcatgggcaaagggcaggagattgcagagggtccggaaaacacctccgatcatatccaggctgaaccaagtaccgctcagccacgccgcgaggttgaccaggatagaggcagccccgcccacctgcgtcgcggtgaagagactgccgagcaggagcccgagcgcgatgaacagcatggccgggaccagcagcacggcaaggccgggcagcagattcacgctgacaggaagcccgaagaacagcgccgtaacatagcagactactccctgcagaagggccaggggcaacatgggcaaggaatagccgaggatgtagtccgcccccgtcatggggcaggcaaacaagcgcatgagaaaggcgctggagcggtcattcgcgatcagcatgccgaggaacagggacaggaaggagagcccgaacacggccatccccggcgtgaaggccgcaatgccaaacatctcggccggcatctccgggacgctgcgcttcatcatcgagatcagtaggatcaatacgaccggaaatccaatgccgaacagggcgctcaggggatcccgtacgatctcccgtgcgtttcgggcggcaaacgccatcgtcctcatgccggcacctcctcgtctgtcagggttaaaaacgcatcctccagcgtggcggcgccggtttcccgtttaatttcctctaccgtccccaccacctgcatccggccacggctcatgatcccgatccgatcggccagtgcttccgcctcctccagatagtgggtggtcaggatgacggtaatccgccctttcagcctttcgatctgtgcccacaaatcccgcctggcccgcacatccagtccgagggtgggttcatccaggaagaggacctgcggctccgaaaccagcgccatggcaatgctcagccgcctctgcataccgcctgaaagggattttgcccggtcctttgcgcgttctgtcagtcggaattcctgcagcagcgtctccaccctgttggccccttgccgcctgttcttgccatagaggcgggccatcagctcgaggttttcccggaccgacagcttcggcgcgaccgcggtttcctgtggagagacgttgaggagctgcttggctgccagggattcctcgcccacatcatggcccatgatccgggccgcaccgccggacggaggcaacagccccgacagcatccggagggtggtggtttttccagcgccattctggccgagcagggcaaaagtctctccccgcaaaaccgacaggttcaacgcgtccaccgccgtccgggagccgaacgtcttcgtcagtcccacgatttcgatggcattcatttggactcctccttggggtcctgcgcgtcgaagatcgcctgcgcgaattgcatgaacgcgtcatttttcaccagcgcgagtccccgctcgatatcgcccagcaccaaaagggtgtccccgggccggatgccgaacacttcccgggcctctttcgggatgacaatctgccctttttctcccactttcgccgtccaagcgtatttgcccatcggtttgtccatgagaatccctccgtatgaaaagtatgatttgtataatttgtgttttatatcatactcctttggcgctcaattgtcaagccgtaccgaggagtgaagggctcactttccgcccgcgcatacggcgctttgacgccctataatttaccgttttgttatgcgcttatgccataaagcacatgccgcgcgggcacctcctttctttccgcaaaagggctgggcagaacgcggataaaaccgtgtgcagtctgccccggccccccgcaaaagctgccgcatttgcccccgtttatttaaataggggaagggggaaagaagcgtcggggagagaagctccctgaacccttaactcaaattcttagggccattgtggaaccccacaatgacggtaagcggccccagggcttggatttgctgtcttttttcaaccccgcgccctgccgatccccggaggcctcgggcccccttgttgtatggacgtcggttcagaagatatcgtacccaccgattttctgggggtccggggggaacccccggtggcgtttttgcttcctttttccgccgtggaaaaaaggaagtggcccgcaggccaaacccattcaataagctatgattttctatgcgctcatgccataaagcccattttgacaccccctttcttatcaaaatgggccggggatggggccggtttttgcagggaggcgaatcaccgaatcccgaaaattggatggatacacaagaagggagccgcccggccccgagagggtgcggacggctccctatacatatcggattcagctccggcgcctgcgcatcctgcgcagcaggtaaacgatgagaagtgcctccacgccgatccccaggacacatccccccatcaggaggatctgacccggacgaagttcgctcccggcccgggaatcgccgggacgagcgtcggcttttaccaacgcctcggcgtcgggatgccgttccacctgtccgaccggcatcttgaacgccagcgggtaatacccaccgctgttcgtcaggttggcgtcctggttccggttgaaaaaggcgtaggatacctccgccacgctctgaccctctgccggaatcgaaacggcgtaggccccgccgatggcggccttcgtctcggtgccgtccaaacggaaacccaggagttcctcccctgcggctatcttcagcccttcccccgcattgccgaacacgacctcgacggttttgccgtcgaaggtggccgatatgggccgggggccgctgtacagctcctttttgccatagaccaggccgagcgaggcatccagcaacttggcggcaaccggttccttgtgagggggatggatgtcgttcagatccacttccacatcataaatcggaacggaaagggctttgccataggccctgttaatctcctcgaccccctgattcatgaggaaattgccgttgggcacggccgtcccgttgagaccgccggtatagccggtcccctgaaggtaatcgttccgataactgaaggaggcgatctgcaccgacaggaagggcaggaggttctctccgtctccgaaaacggtgctccagtcccttaccaacaaaggtatcccccgccgcagcacgtccccgtttccgcgctcgatatcggtttctccctgataccacaggattccagccgcttgataacccctcatgggatggatacgggaattgtagaagcggtgcagagcgtcccaggtaccatcgtcggccctgggttggatctgcgccgtgacgtagtcggcaaaatccgggttggccgccgtcgtgtcctgaccgatccaagtacagaaccggctgccgccctgagctgtgtttacaatcccgaccggaatccccagtgtatcgctgagattgtacgcaaacatgtacccgatggccgagcagagctgtgcggcgtcccagctgacggcggtgagccagtatccggccgcatcgtcctggggcgtatcgctgccggaatcgacggatacgaaaaaccgcaccttgccggtatgctcctttttcgcccagtccgccgcctcggccgccttggccagggtccattccatgttcgattggccgcccgctatccagacttcgccgaacaccaggttttccaccgtccggaccacgctgccggccttggcttctaggctgtattcgtcgaatgaaccgctctgggcgggcagcgccgcgttccaccggccgccgctgacggcagctgtctgggacgccacggcttcatcgccctttttgagcgtcaccgtcaccgtgtcgccgtcccggccgaaaccgaaaacctgtacaggacggccctgctgcagaaccatgccgtcaccgaaaatcgacgcaaagctcaagccggcatcggcaccggccgacaggggaagggaagccgtcatcaggaacaccaccgttaccagggccaggatacgcttcatatccaccatcccttattgatcggctccatcgtcaggcccgccatcctgcggcgccctgcccttgagccatttgaccaggaagaccacgccgaccgcaactgctccggcgcccaggacgcagagaaggacgatcagagccagcggcaggccaccctgttcctcttcgcccccctgaccgttggagacgtcgggggaggaggcgggtacggtcgtaccgtccacatcggctgtgccgtcggtcgtaccggacggattgccggaagtggacgcgtcggaggatccgtcggacgaaccggacgaattacctgccgtggtagtcactgcgggaggcgccgtggtggtgggatccggagtctgtgccgtggtggtcggatccgtctccccgattttggccgtcacgcccgagacacggatatcccggatatagatatcggcgccttccatgtagaagccgacaccgaaaatatccttgtagtggccggcgatggtcttgtctttcagatggttggaacggcagttcatctgggagaggtcaaagcccacccatccctcatagcccgaagggatgagcatatgcttccaggtatcctcggtggtggtcttctccacaaacgcaccgttttcctgcagcaggtattttgccccgacgatctcgctgtcgaaatatccctgcacctgcccggaatcttcgttgtccgtcgccagggctacgttgagatagacatcccccgtggctttggcataaaaccagatggtggtcgcgccggtccaattggtcacggccttctttttagccttggcgcggatcagatccagatagatgccgccgttccagttggtggttttccggtgatagagcagccattcctcgccgccctccttcactttggacaccacgaggtccttggacgtgaccatctgcgtacccaaaacaccgccgagatcattggccagggtgagctcctgcccctccggcagataggagaaatcgaccaccggcgtcgcggtttccggcttatcgccggcggccagggacgcgggggccagtgccgacaccatcataaccaaagccgacaggacggcgccgaaacgaaacgcttttttcattgacaacaccccaaatatgttttatttaggtcattttttcacgaaccgaccagggtgggcccgcttcagcgggcgcccgccttggatttgcgaaggaacaccatcccggctcccgccgccagaaccagcatcgccggaagcacagcgaacgggacacccgtttggggagcgtcggagcctgtgccagaacccgtgctgccggtcccaccgctgccggagccgtcggtaccggaaccggtgctgctgttaccgccgccctggccctgttcgagcccccgggcaatgccgtcggcgcggaaatcggtcaccgcgagaggcccgccttccatatagaacccgatgccgtaaacgtcgcccagatgggccgtgaaatcctgctccgtcagatgcccggaacggcagaccatctgggacaggtcgaagccgacccagccgtcatatcccgcgggaaggaagatatgcttccaggtatcctcggtcgtggccttctccacaaacgcgccgtcttcctccacgtagtacttaagcccggccgcctcgctgttgaagtagccctgaacctccccggaatactcgttgtcgaccgccgccgcaacgttgatataggtgtccgcctcggtctgggcatagaaccagaagatttccgcaccggtccaatcggtgacggccttccctttggccgcagcattcagcagatccacataaatgccgccgttccagttggtgttgttccgctcgtagttcagccaggctttgccgtccgccatgctcatggatacggccaaatcccccgacgtaaccatactgtcgcccaacacaccgccgatgccgtccgcgagagtaagcacccggttttcgggcagataggagaaatccgccaccggcttggcgtcctcgggcgacacgtccgctgggacgaccggctcgttcaggtcttccaggcccttggccacgccggtcacccggatatcgcgcaccaaaaacgtcttctccgcatagaagccgacgcctgtgacgttgcccagatagctgctgaggttctgatcggtcaaatggccggaaccgcaggcaaaattcgccagctccacgccgacccagccttcatagccttcggccagggaaatatggccccagtcattgttgtcgtcggccagggtcacggggacattgccgtgctcgtcctgatagtagtatttcacgcccgcgttcttgctggagaagaacccggtgtcctcgcctttgacggcccgcagctgcaggtccagtgtggccccgttttcggcatccacataaaaccagaccatcgtggcgcccgtccaatcggtaacgcctttggcggggtcttgccctttcgcggtattcaaatccacgagcaagccgttgaaccaggcgccatactcgtatttgagccagtccttcccgtccacggtgacgcaggacagcttgagtttactgttgtcgaaggcctgatcctgatataccgcggccccggcggaaccgtccagggcctggtcttttgtcaggtaagagagatccagcaccgatttggcatcctccggatcggcttccccagcagccagggcggacatcccgcccaccatcagcatagccgtcagaaacaccgccgtcaggatcagagacaacccttttttcattacttgacacctcatttcaaaatcgtgagatccacaccatacatccacggatacgccatgcacggcactcgccggtcatcgtccgtcaaccccaaacaacacctcctgttcccatgtcaaggctttcccatcatttacaactgaaacacaaaggtggtcaccgactctgccggcagcacatacccgttgtccgccagcatgatccctctggcagtctcgcaggtgcgctgcatggaggtttcgtacacctcgccccggcttcccgccgggaggcccgccaacgccacggttttgtccgcggccgtatcattgacggcgacaaacaccagctctttaccgtcgggggcgagatacgccgagcccatgacgccttccggcagcccggccccctccacctccacacgggtatagcccttgataaacttcgaatagttcccgatcgcccagaagtgccgggtgagcgcgtaatactccggccggttgtcgttgaccacgatcagggcatcggcgccccgggcgaccgccgcgaaataatcccaggaggatacgttcatcagggtcagatcctcgtgcagggcccgcgccgtcatggtcagcctctccgcggccgacagattcgtatctgccttccaggcggcatactccgactgatacaccgacagggccgttttccccagccggctggcagcggaacgggtccaggcgtacagatcagagcggatctgcgcgtccgcggaatagccgtgcaccgcgaaatggtcgatatagggatagatcgtgctgtccgacagcagggattcgtaaaactgataggtatagcggttatcccggtattcagcggattcgttgacgctgattttgaccggcagcctccgcctgttcagctccgcgacgaccagacgggtcagccgcagggcctcctccggtgcgtaatggcagccctcctgccagccgtcgttccactgccactggggctcgttgatcgggctgatgtaccggacagggatgccggcctccagatacgccttggtcacgtcggcgcaataggccgcgtattggttatagcattcgggacggaggttgctgcctgaggcggggttataggtcctgccgttcacggtcatcccggccggcgggctgttcatgaacaggacgacctcctccaccgtccccaaggccatgatcttttgcagcaccatccagcccttcgcgtccgccgtgatatcgatgctcccgtcggccttcagcgggcaggggaccgcgcgccagggatccgggccggtgccgctgtcattcagggggccttcggcccggccgccgccgatgttctggcggtaagtgttcagcgcgataccgcgatcggtaaagagcagggccaggatctcgtccatcgtggagcggtcaccgataccggtagaccaccaggcgcccgacacgccgaagctccgcacggtttggtgtttgacccctgtcctggcccgcaggaccgcgccgccggtcccaacaccgttgttgaggatttccagtgtgatttgcgaggcgggattatccggtaaaggggtactcgacgccggatcgtctgacgaggggatcccggaggacgggtttcccgaagacggccctccaggagaggaaccgtccggaagccggctttcagacgggctgctccccgccgcggaatcgtccgggacgcttccgcccgacgcttcccctcccggagaggcgtccccggtggagctatcttccggccgggattcacccgaaagggaggtttccagggacgcatccgccgggttctccccttgccggcatccgccggccgcccacaggacggctgccgccgtcagcagggccaacagccgcctggttatgctgctgataccgcattcctccttccgtctttcataatggattccgttcatgcgcgggttatgccagctggaaaacaaaggtggtgaccgactgggccggcagagcatacccgttatccgccttcataaagcctctcgatgtgctgcagtcacgctccatcgaggtctcatacacctcgctccaggcgccctccggcacacctgccagggtcacggtctggctggccgtgtcctcattgaccgctacgaaaaccagtttcttgccgtccggggcgaggtaggccgaccccatgaccccttcgggcaggccggtctcctcgacctccacacgggtgtagcccttgatgaatttcgaataattcccgatggcccacatatgcttcatcggccaatatttgctggcatcgctgtcgttgaccatgaccaacgagtcggggccgcgggaaagggccgcaaaatagtcccaggaatcgacattcagaagggtcaggtcctcatacagggcccggcctgtcatggtaatccgtttctccgccgtcagagcctcgttgtccggggcccaggcggcgaattcggtctgatagaccggaagcgcctgtttccccaggtcaccggcgaccttctgggtccagttgtacagcgcggcccggatcttatcggtcgcgaaatatgcgtgggccgcgaaatggtcgatataaggatagatcgtatcgtccgagagcagggttttatagaagtcatggacatactcccggttgccgtactgggcggactcgttgacgctgatcttgacgggcaggttccgccggttcagctcggcgatgacgagccgggtcagtttcaggatctcgtccgtcgtgtagtggcagccctcctgccagccggcatcccattgggactggggctcgttgaccgggctgatgtatttgaccgggatcccggcgttcagatacgcctcggccacgtcagcgcagaaggccgcataagcttcatagcactcgggacggaggttgctgcccgtggaatcgttatacgttttgccattgaccgtcatgctttccggagggctgttcatgaacaggatgacggtgtccaccgtgcctaaggcatcgatcttctgcagcaccgtccaggcattggcgtcggcagcgatgtcgatactgccgtcggccttcagcgggcagggaaccgcgcgccaggaatcagggccggacttgtcatcagccagcggaccgccttcccggccgccgccgatattatggcggtaggcgttcagcgcgatgcccttgtcggtgaagagcagggccaggatttcatccatcgtggcccggtcaccgataccagtggaccaccaggcacctgaaacgccgaaatttttgacaatctggtgtttgatctcggtgttggccctcaggacagcctcggttttagcgacatcgccgttgaggtattccgtcggctccttcacggcgggctcgcccggcttgcaggcggagagagcgcacaggacagccaccgccgcggctgccgataggattcgtctgcgtttcatgaaccagcatccttcctttacgtgtctatattcggattctctgtcttctcggggtttccttcccgcctcacaccagccggaaaacaaaggtggtgaccgactgggcgggcaggatgtagccgttgtccacactcatacagcccttggcggttccgcaggtgcgctccatcgaggtttcgtacacctcaccgaggctgccctccgggatccccgccagggtcacggcctgatcttctcccgtttcgttgactgtgacaaacaccagttttccgccgtctggagcgagatacgccgagcccacgaccccttcgggcaggcaggcctcctcgacctccacccgggtgtagcctttgataaatttcgagtaattcccgacggcccagaagtggcgggtcagccggtattccccgggccggccgtcagcgacgacgatcagggcatcatctcccctggcaaccgccgcaaaatattcccaggtgtcggtgtacaggccggtaaagtcgtcgtacagggaccgtcccgtcatggtcagccgcctggcctcggtgagctgttccgtttgatgccaggccgcccattcggtctggttgatgggaagcatcggcttgccgagggcggcggcggtatcccgcgcgaaccggtaaaaggccttcttctgttccagggacgcgtgatagccgtgagccgcgaaatgatcgaggcgggaacagagggcgtcgtccgccaacaggtcccggtaaaaatcgtaaacatactcccggttcagcatttcggccgattcgttgacgctcagcctgacgggaagcccgcgtttgtccagttccccgatcagcaggcggcaaagacggaagatctgttccggggaaaaatagcagccttcctgccagccggcctcccattgggactggggctcgttgactgggctgagatatttgaccgcaatgcccgcgtcgagataggccttggtcacgtcggcacagaaggccgcataggcttcaaagcaatcctcccgcagattgctgccggacggagagccgtaggtcctgccattgaccgtcatgctttcgggcgggctgttcatgaagatggtgatatcgtccaccgtgcccagggcgttgacctgccgaagcacccgccaggcgttggcatcggcgccgatatcgatacggccgtcggctttcagcgggcagggaaccgcgcgccaggaatcagggccggacttgtcatcggccaaagggccgccctcccggccgccgccgacgttatgacggtagttattcagcgcgatgccctggtcggtgtacagatacgccaggatctcgtccatgcatgccgaatccccgatgccggtggcccaccaggcgcccgaagcgccgaaggtacggattgtctgatggcggacggccggatcggcgcgcaggactgcctttgccggttccacctgtctgttgagacacgtcatctcttctccccctcattttccaatggtgttatccgacgatgccgctctgctcgaaattttccaccagccgacgctgtgcaatgaagaaaaataacagaatcggcaggatatacaacagcccggcggcatacttgatggcgtcaaaggtgaacacggtcgtataggggatcccgtaccagcggctgatattctccagcatccgcgggatgtcggcgctgaaaaacacccgggacagctgactcgcgatataagggccgccgggatggaaatagccggtataataggtatccccgtagttccacacgaacgcgagggagagcgcggtgaccagcgccggcatggcattgggcagggagatgcggaaaaaggtcctgtaaaagccgcagccatcgatgaacgccgcctcctccagctcaatgggcaggcccttgaaaaactggcggaagatgaagatgaaaatcccctgcttgatgccaaaaccggtcgccgccagcagatagagggtatagggctggttgagcaggttgagcggctccccggtgagcagggtaaaaatcccgaagatgtcgaatttctggaaccgcaggtattgtgggatcagcagggtctggggcggcacgacgatagtcaccaccaccagcaccataaagaggctccgcatcgggaagcggacccggcccagcgaatagccggccagggcgctggagaagatctggattcccgccacaaccgcgctgtacagcagggaaagcagcaccgccgtcccgttgccgaagccgatgcggatggcggctgtgaagctcaaaaccgagagcttccgcgggatccataccacattggggtcgtccaacgtagcaaaatcgccaaaaaccgccggcaggaccttgatgagcggatacagcatagtgaacgacaggccgaaaatcagggtgtacagaaaaacccggaacacgattttctgcacggcacgcttaccgtaggcccggtcgagcccgcccttcagcagcatattccgccgcagcttggataccgtccgattgcccattacgcgcgcctcctccctcttccggaaagcagtttcaaaatccccagcatcagcaacaggtcgagcagtacattcaccataaagagggcggagagggcggcgcccatcccgatgttcgcccgcatgaaggcgtagttgtaaatttcgctcgcgatactggaggccaggaacagatccacgaagctgtataccaccacgaaggtggtgacgttgcccagcatggggaaagtcaccttccagaaggtctcgtacgacgtggccccttcaatctgcgccacctcatacaggctgcggttgatggactggagaccggccaggaagatcaggatctgcacgccgcagcccgaggcaacctgaaaaataccggaaaccgcgccgcccacatactccgtcaccgcctcggggaaaaaggagctttcccgcagcgcatccatcaggaacccgctcgagaagaaggtatcgatggagaaatccgccatactggtgccgctggtgaccgcgaggagcttctgcacgatatcgagaccggtgacgatcggcagaaagaagatcacccgcaccacgctgcggcccttgaactcggcgttgagaaggatggccgcaaacagggaaaacaccagcatgacaggtgcgctgaccaggatgcgggcattctcctcgacaaacacccgcaggaattgctgtccctgcgagctcagctcggtccggaacagcgcaatgtagttatcgaggccgttgaacgccagattcatcccgccttggtcggccactgtcaccttggaaaaggaatattccaccgtgtgaaaaaccggcaaggcgaaaaacaggagaaatccgatcatccacggcagcaaaaagacgaatgcgtggaccttccgcatggtctgaaagttcagacgggagcgtcccgcgcgaagagcatttacaggcttttttctgttccccatactcatgactcaccctttcgcacccttggggtcggctgtttgaaacggggctcctcccgttttctccggtttacggcatggcccccgcggggaggatcgcatacccgtacggctccacttccctggatcccacggtcacgccgtaggcattgtagttgaccagcacccgtaccccgccgcggtaggtcgtcatatggacgcccggggcaaaagtctcgtggccggcgatctccttggtcccgatctctgcaaaggcctgccgataggtttcgtagagctcccggatggcgggactgaccgtgtcgtaattcgacgcggtatacgcggagatacgcgcttccatcaggatatccggcttctcggcaaaaacggagaatttcgggatggagcccagctccagcgcctggaggaggaaggtttccggggaggaccagccgccgttgacatccagcgtggtatactcggtcaggccattcatcaccagctggcggaagggaaccgacgtgtaggatacgccatagtcgctggattcccgtgagacgttcagggaataagctgcatacgccagcttatcggcgttcggattatccagcgccagtgtcttgcggctggccagtttttcgagattggggagcacaacgccgcgattggcccggacggggtccaccacgtcgccgtcccgatagttgccgtaaaactggttcccgaaatccgtcaaggcgatattgggatacgcctccgcgtccttcagaaagccgtccacgacggcggagagatagcgcggatggatcaggtagtacagggaatattcgtaaggggtatagaaggagccgtccggactccacatgtcgttgaatgcgctgcgccagtccgacgcgcccccgaatccggtgagataaaagcgtttgtcgttgaacagggtccctttgcggtatacccgcatcaggctcgcttccatgaacacctcgtttccgggcgaggagcgcgcgagcagctcctcgagatccgctctggagccgttggccgccaccagatccgctttgttgccgacggtgttcatccggcccccgttgaggccgtattggtaattggccaccagcgggatgccctgcaggtcattcaggatctccagcgcctgccggtaggtggtcatggaaacggtggcatcataggggatccccatgaatttatcccagacggtgaaggcccccgccatctggaggaacagcttgggccggtcatcgtacgacacgtcgagcccataagcgtcgatgagctgctgccgatagtcccgggcaaacgcataatagctggcgtcctgcgtgtaaaaccgatagcgcacggtgaagtcgaaatcgatcgggccggtggtttcaagatggctggccttgtcctcggcataggggccgtagaggttcaccatggagtactgcatagtgtcggcggaggcgtagacggcattgtaaaggccgcctgatccgtccccggcgccgcttttgaggctgacggagatatcggccagctcagccccgctgtcgatgaccgccaggaacccggacgagcggccctgttcatccaggccgtagaggccgaagaccggcatggtgacgggctcctcaaaatcggatttctgaaatttggtctcaaagaggtcgttgccgtaaaccgcgcggctgtatgccggataggcgccgttgaaggaatccatggcaatcagcatacccgccccgtccgggacaaagatataaccgtcgttctcctcctccgcccggcagtcaaatgcgggaaagacgctgatccgctggagggtataaaaatcgttgccgtttttctgttcatataccgggatattgacggccagctcgccgttttggaaggtgatctccatgtataccgtgaaggcggccggttccttgaactcggtggcaatgccgtacatgtcgttgtcctccaccagctcctcggaggtataatggatcgctttggtgaattccaccagcgatttgacgaccgaggcgggaggcaggccggaggatttgctgtaatagtagccctttgtggcgtctttggcgtaaaacgctttgagcgcccggctgtacagtgcggactgttccgcagtgacggctccttgttcggtcagggccgccagccggccggcgaaaatctcttcataccggtcgaccgagatatagcgggggatgtattcatacaagcgataaatgtccgtctcctgaaagtcaaactggatccgcacgccgtttttgatccgtttgagggaataccactggttggagatggagttggtataggcatcccattcataggaggtctgatccttgctcaaaaaccggattgtcagcggcgatttggcggcggccggcgccgcagggtcggtatacagggaatggaaggtgcgccccgccgcctcgtccgtgatctgtacgtccagggtctgcgtgtcaatcgccacccggtacccgccctcccgtgcgatctccaccagtccgtcctcgagtccgatgtccccggtttcgggagacagggacctaagggagggggaagcgatggtttccgcccggacacaggcacgcacgatgtggatcgtcacgggataaatcagcaggatcaccgccagcgccgccgccaccttgacgaccgacacccgccgcagccttttccgcatactcatgatcattcctttccatcatgctgcaggaccgcgcccgccggccgtccggggccggagtgcccatcctgccgttgggagaggccctctcttcccaaccgttacctcctgttcagcaattccaacgccacggtggaaaagaatccgaccagcttgcccatgatctgcagatacagcatgccgataaacaggattaccaacgcggcggcggccgtggccagaatggtcaggacgtttttcgccggcagatattcatgcacgacacagaggccgcagaatgtcaggaagcagaacagcaccataccgaagccgccgatgacgtttaggatcgcgagttcctctttgacgacgacattggacagggccgtgtacaggacgtcggtaatcagcttgggaaacagtgcgtaggccagcaccattaggacgtcgcccattttcccgttgccgtcgaacagggtggtcacgctccaattggagagcgaaaaaagcaaaaacgggaacagggaaaatgcgaacaccaccagattgttggtgccgtaaggatcggcgcccaccagcatgccggaatagtaagttttgaggatctgcaccacgccgtacagcagatacagcaggccgatcagcacccagtttttccggcgatggaagcgaagctcataaaacccattgaacgggtggaacagggtgtagaacaggtagcgggtatcctcccaaagcgctttcaccccactccccccttccgtctggcatagcggatctcggtgtagatgaaaacggccgccaagaggaggaaggccgcgacaaaccagccgaagtaccgctgaatcaccgtctctcgatagccctggaaggcctgggaatacccttcgtcgtccttagccagcttgtagtaatacaccgcctgggaaaaatcacgttccatcagataattgcggccgatcccggaatagccggcatagaagttggcattgtgggaaagcgccgtctggtaaagctcggtcgcccgatcccattcccctttgttgtagctctccaccgccatgagcgccgagcgcccgaaatcggtggccatatacaccatcaccatgccccgttcccggtcgcccaccagcaggtcatacccgttccaggccagcgacgacgcttcggccagatcccctttcatatagccgagccctgagaagatggtgatgagatacccgtcgaaatcatagacgaacacccggccattctgcctgtccagcacggcataggcgccgaaatccgtcgtcgccacatcggtgaacacgctgctcgtctcactgttctcgaaatactgtggcacatcgccgaccaatttgtcgtagccctccgcccggataacgttatcgcctttggcattgaagcggaacaccttttcctcggacgaggtgtcaccggtgacggcgaaaacaaagccgtccccatccagatcgaccccgccgaaggagggcgcatacgccttggccatctgctttttctgctcgtcggtggctagggagcgccagaaatactcgatcaggttgattttgggcttgttcagccccaggtaacgtgaaaacccgccgtcgggattgagctccacgatcccctcatgggaattctgcaccacgatgtacaggcggccgatcgtatccaccgcgattcgatagggtgcgaactgggtatcgccggtcatgttctccggtcttcccaggctgcgcttgagcgcgtaggtctccccgtcgaggacgaacaccttttgtgccgcgggatccgcgatgtagagctcgcccagcgtctcgctgaagcagacccccttcgggccggccagcgggcagccgcccgcttcctcgctcccgctttggatcgtaacgacgtgggtaaaggtctccgaatcgaaaacgtggatctgggcgcccagggcgtccgccacgtacagcctgccgccgccgaccaccaggtcgtccaccgaccgcaggacggtcccctccggcaggtcgccggaatcaagcgtccgggccaggtcgaagcccgggacgctcgcgacgatgccgtttgggccgtaggtgtaattgtattggtccgtcttatcggccaaggccgtcaagggcgacagtgccgccaggaccaacgcggccaacgccgccaaccacttttttgtcataccccacccactcttctcctgaagtcggccggatgccgtttctctgccctcacttgatgccggcgttggccatcgtttccacgaccttgctctgagagaccacaaacaccagcaccgggaccgtcaacatgatcagggagaccgctcccgccatgccggtgcggaccacgcccgccgtcacgatctgggagatggcgtaggacaccggcttgagcttttcggtatagatgtacatcccgcccgattccgcccagaaggtctggaaggagaggataatcagcgtgatccacgccggcttggacatcggcatgatgatccgcgcgaagatgctcagttcccccgctccgtcgattttcgcggcttccaggatggaatcggggatctggcccatgaagttccgcatcaggaacaccccgaaggtggagccgatggcggggatggtcacggcgagataggtgtcgaccatgtgcagcttggacatggtcaggtaattgaccaggcccgcggccgtggcattgaacatcagggaatacacgatcacaccggacatgaatttggagcccggaaaacggtattttgccagcggaaaagccgcgagggagccgatgagcacagtcccggaggttcccaagaccgtgatgaaaaaggtattgaaaatatagcgggagatcggcacccaggaatccgccaggaccagggacagatcccggaaattgttgagcgtcggattttggacgaacagccggggaggaaaaagaaacacctcgttgaggggcttgaaagcgttgttggcgatgaacaccatcggatagatgctgaataccgcaaacagccccaaaaacagggcaagcaggatatccatgcccagactgcggttttttcggcggaatttgatgtgccggtatgcggcggctaggctcggcaattcattcgcccacccttctcagcagcttttgtacagcgaggttgcagaacaccataaggacaaacaggatcgtggcgatggcggaggcgtagcccatctccatacgggtcacgccgtagtcctgcatgtgggtaatcagggtatggcccgcatattccacgctggggaatcccgccaattccatggagatcgcccccaccgaaaaggagctggtgatctgcatgaccgaacccagcatgagctgtggcttcatggccggcagggtgatatgccacagctcctgccaccggttggagaccccatcgatggccccggcttcgtagagcgaggtatccaccgtctggaaaccggcgatgaaggtcagaaagcttatcccgagactcagccagagctgcacgacgatgaggataggcatgacatactccttggtcgcaaaccaaaggaccggctcgtcgatcagcccgaggttcatcaggaccgcgttggcgtagccgcgggagtcggaggagaagatcaatttccagatcatataggcgttgccggatatcgacggcgcatagaagaccagggtcaggaaagcgcggaccttcggggaaaaattgttgatgatccaggcgaagccgaaacacatcagatagctaaccggccccgtcaccaccgcgaaaaacagggtgtttttcagggcaatgaggaagacctcgtcatgcaagaacaggtcgacatagtttttgaagaacacgagctctggccattccaccatattgaaggaggtcaggctcagcaccacgctggccaggaccggaaacacggtaaaaatcaaaaaaataatggtaaaaggggtcagcatcaggtatttggccttgtgttcatgccatgttctgcgcaaggtcattgggacgccgcctcctctgccgtcgataagtggtattcctctctcttccgtgtgagctcctggtcgatcgcataaatattggtgtacagggcctgccgggggctcatggcactggaatccgttaccaccgcgttgaacgcgtaggtcagcattcgctccgtcatataggccccagggacctccgggattccaaacgtattctcatactgcgccagcagcgcatccagcgctttcttcggataaggcagccgggccagcacctctttgttggcgggggcataccggccggagacgccgaagaccgcctcaagctgcatggcgtagtcgtactgcacatcggtggactgccaccaacggacaaaatcccaggcggcgtccttatcggcacagttggccatgatgacggtgtagttggtctgggcgatattttggttgtccacgccgccgttcccatccggaacgcccgggatgccgtgcatcgaccagaggccgcggatctcgggggcgagcagttccagcgtgttgtacatggaggaggcatagatgccaagcggcatctcccctgtgcggaaccggttggggaaatccgcctggaccggaaccttgtaggccgtgaaaaatttggtgtaatccacaaaggtcttcatggccgcctcggaatacaggccgctccggataccgtagtccgccccctgccccttataaaggactccgccgttctggtatagcatcgccgtatacaccgacgtgcctaccgggacataggcgtcataattgtgcatattcagttcggtcacggcccgggtgaactcctcccaggtccgcgggatttcgatgccgagctcggcgaggatgtcatcccgcacgaacatcatgtccacccattgctgctccggcatgccgtacacccggtcgagataggtgcccgcctggatggcagagggatagtagcgctccagcatgtccggatagtccgggaatccgctgacgtcgacgagggcgttccgcatggcgaagttgaccaggtttttgcccgtcatgttgagcaccacatcgggtccggttcccgccagggtggccggcaggatcacatccgccgggatgagcaggacattgaccggcgtatcgtgctgggaggcgaagctgtcgtccaccatatttttgacgatccgcgcctggtccagcccgatgggtgcccatacttcgagggcatccttctgaacctcctcgtcccccacctggttctcgtccacaaagaaggtggcgaagaagcgcaggatcccgttccagagcttgacaaaaaagctggacgtggggggatcataggccgtcccgggggcatacagcgtcaggctgtcgacgtacagggagccttcggatatcgtgatgagccagttgcccagggcggtgatgttgcttttgaaggaatcgagctccaccacgacccgttccgggtcttccgcaaatttcgataattgcagcgccagggtctccagaagggctgtctggtcgttcttttcccccgagaggcggaccagctcctccaccacctggtaaagctggccggacagctcaccgaaattctctgccgcgcccggaatcttttccgcgatgtcgtaatcgatatacttatacggggtggtaccggtgatctgcgtgatcgcccgatacagctcattgagcacgttcatgcaaccttccacgacaccgtagcaggcggcatactcgccgagcacgttttccagggtgatccggttagggccttctttcaggtagatataggtgccattttcggacaaatcgtattgtttgtagtcccctgagaaggcgaacccgatgctctgcgcttcctggaagggggtctggcctcctatgtacagcctccggtaggaagtcacaccccgggtgacgttgcgggcgcggaaggagagggcgtacagcccttcctccggtacctcgatctcccacgtgatgctctgcccggcgtagcgccagctggatccgccgatgacgttgagccgccggtaatacgggtggaacggtaccgtatcgggagaagactggtccacctcattgcggatggactgggcggatttcagtacggccttcgtgccgccgtcgatccgctcagcctgataggtgagcggatctcccgtataccgtggtttctcgtcaagacccgtctccgcgtagggctggatttccggcgccgccttcagttcgacagcgaatatctgcatggattccttgaccggctccagcgtcagcgtatggctgccttgggacagatacagcacatacggagtggcgctgcgttttttggaatcactcagatacaccccgctgcgctcaaaaacctcggtggcgcgcggacggatttcctcgttgcccttcatcgggatttcctcgcccgacgtgttgtcgaaggagcgctggaataccaactgctccatgcccttgtacggggattcgccgtccagcagcaggctgcgttcgatggcctcgcccgtccccggcagcgggatatattccacatagacgttgtagaaacccgcctcttcgcattcaaaggtccaggacaccggctgctccagatcggaggtaaccccctcctcggcaaccagcagcgaaatggtccggccggagagggtgccgtcgaaagcgtgcgcggccagataggcggccagggagtcctctacatattcctccgcctgcaagaccgccgccgcagagggctgtgtatccggtaccgtcaccgaagccccggaggcgaacagggacaaaagcaccgccgacaccgacaggcaggccaccatcttactcgctttcatacattgtctcccctctgcacacgggccccgcggttcaggcggaccgaaaactgcccgcctgaaccagccggatcccgtcaggaaatcgcatcggccgccgcttcgatcttaccgatggcctcgttcaaagcgccgatgttttccgcgatgctgacctcaaaggaagaacccccctcgtaaatggaacggcccgcgatctcggtaaagccgtacatctggctgagcatcatggaataatcgttgaactccatggggcagtaatttttgaagatatccaggatatccgcgccgattttctcgtggaagatatccagattcttttccagggcttccttttcggcattttcatcggagaagaaatccatggacttggaaccaccggatttggcggcataataggtctggtaataaattttgtacgcttccagcgccagccgggactgctcctccgatacgcccttaagcagaatgaaggaatcgttgggggtggacacctgctggtagcgggggtcgtcggcggccatgtcgtcgggacggggccacggaaccaggcccatgctcaggccgagcgcggccagctgcgagccgcatccctgcgccgtccactgtctcgaatcgaggaagaccgcttcgccattggcaaagttattatccgcccaggtaaagccaggataaatgctgttttccagctcgctgaccagcagtttcttgtccacaagctccttgatgaaattgaccgacttgatcgcctcgggcgacgtgcatttttcaaagccgttttccccataaatcgggacgccggaggccagcatggctgcccggatggagaatcggtaatccgactcgaaagcgttgatcatcttgtcgggccggatgggggccggcttgtcggcgaaatatgctttgatcttggtcagataatcctggaataccgaccaggtccatttgccttgtttatagaggtcagtgggatagaccgtctggccgttttccttcagggcgtccacctgttcgatataactgatgttgaacagcagcggaccggtgcggagaaacgtcagctcaaagttcaagaacagccgttttccgaaaacaggatccatcagcatccaggcagcgtcctcgtcgctggtgaagatgtcggcgtagggctccaggctctggatgatgccctgttcgatcaggccgccctggctggcgttggagaccatcgccacgtcgcagatcggtttaccggacaggacgctcggcagcaggtcctcgcccacgccgtgttcccattgcacccacttgatggtgacgcccagctgatccttgacggctttggtcgccgcctcgatgacttccatctgttccggcgaaaccgcgatatccccggtcaccggatcgacataggtcggatcccatgtggggatgtagtgggagccgaagataacctccttggagccggagctgccgcccgtgccggagctcggagccgtcccggaagcaggggttttctccccgggtttacaggcgcccaggccgcacagcagaagggcggccgacagacatgacaagatgcggagtttgctctttcccatagatatacctcccaaagttcagtgtgtgtgggcccactttcagggttcaggccgggtaaaggccgagccaacccggacatgccgattggttcaacgctcacccaaggtttccgccgtgatgccgtagaggagaagcgcatactcctcaagaagaggctggatccggacacaccggaccggccggtttcccgggatctccacccggagggtattcaggtagtagacctcccaattgaggtcataggacacggccagagtacgtgtcgcccgtctcgcccgcggatcgatgcgggacgggcccgccaggccaaaggccgaggcgaattcgatgccgttgcgcagcggcacgctctgaacgccgccgtcttcgaacacgatgtcgtagcgggccgcttcggcccccttttccccacagagggggtatccctccagaatgctggcctggccgataaaatacagggcgttggccgcaaatcccaccgggatctcccattctcccgcagcgccctgtatcaccagcggccggccctggcgcagatcagcgggcagggtcccgattgagcggcagtcctccggcagtgccggaccatgggtcagccggcgggcctttttatgacaacggccgagcagggactccgcacgctccagcaggctctgccacaccgcatcatcgtcctcggcgggcagcggcaccgtccggtaatctgccccttcccgggccgcacaagcgttcaggacttccagccgtccggacgggcgggcacaggtcatgccgcgttccgcgatctttctcgtgaagacatccagattggcccgcgggttccggtccacatccaccagcccttcgttcaggatgccgtcgcggcaggcgggcagcccccggttggtctcatacatgtccgcccatgaccagtaggccatgcccgcgagggtttttcccttctccccgtttcggcccgcctcgaacatcgcgtccatgaagcggccgaacagggtgggattgcccataaccggccagcctccccattcggtgaagaccagcggcttgtcatccagtacctcgaagaccgtccggagggataccgggcccgtctcggcatccacccccgccgtaaccgacgtcgtctgatccccatagggatggaaggtgtagaaatcgatctgctgctcggtgaacagctccttggtccgtttcaggttcatgaaattggccccggaaaccatccgggtgtcgagccggcggcagaccgcggccgcgtcggccaggaactccggcgtgaagcggcactcgttgaaggccagccagaaggcgaccgacacacggttacggtcccgcctgactgtccgttcgagcacctccagggcggcggcggtgacggcgggatcggtcagatcggaatcccacagccccggctcctcgctcaccaaaaggccgagctcgtcagccaattcgacgatccgccggttatggggataatgcaccaggcgcacgtaattggccccggtgttcttgatcatctgcatgtcccgccgcatctgctcctcggtcagtgtgtgcccgccgtcgtggccccaggtgtcgtggcggcagacaccgatgaggaagtacggttccccattgagcaggaaacgattgccctctttccgcagctccttgaagcccacccgctcgcgcaggacgtccaccgtctgtccgccgtgcagcagctggatttccagcgtgtagagatggggtgagtccggagaccagaggcaggggttctccactgtccattccagcaggaagtcctcggcggccccggtctcggcgacgcaggcgccgccatcaaacagccgggctttcacggcatagccggcgagatcctttccgtccgggaaaacctccagatggcactgcgcccgccggaaatccccggacaacacagggcgccaacagtaatcctttatataaacgtctggtatatattggagatagacatcccggataatgccgctgtagttctcccagccttccgccggaccgaaggggagccccatatcccgcagggagaccgtcagggtattgccggcctgggacaaaagccctgtaacatcgaaatcgtaggtgcaatagggacgcatttccccgagaaaacggccgttgagttcaatctcagccgcatatgtaatcccctccagacagagcaaaacccgcccaggaggcccatccggagccgaaaagtccagccggcactccgactcccccacgcaaagggccgaaaacggcacttttttttgctccgccggaccgccgttgacacggtactcccaccaggtagacaaagatcgccggatacggccgtcttccagggggctgttttcctctttcagctccatcctcctgctcccttccgcctgtttgcgccgttcttttgttgtcaattatatcatcagtttacatattactacaagttgccataaacgtcaaggccttttatcgatatttttgctatttttctccactgtttatcctgcggagcttgccggtcaggccatacagcccgaagcagtaggcgtaccggtccaaggaggccttgattttgctggcgacataggcatccgcggtgatcccgaggctggccagattgcggcgcaggacatcca

SEQ ID NO: 2519 - DNA, 5903 bp, Unknown
  16S sequences of unknown bacteria
ggcggcatctggtacacgccgcaaagcggcatctggcagacggtctggatcgaggcggtccccgaactccatgtacgggccctcgaggtcacggctgacctcgacgccgagcttctgacgctgctcatctccgtgaacgagaccggcggcaagattgccgcgcatgtgatagacgcagcgggaaggagcgtagccttccagtctgtcaacgtcacgcccgaccgtctggacaccgtcgagctcaggctccacgtgccctcgcctcacccctggacgccggatgatccgtacctgtactccatcgagctctcgtacgatgcggacgacgtcaacagctactgcgccttcaggaccaccacgatcgagccagacgagaagggcgtgcagcgcttctgcctgaaccacgagccgctcttcctgcgtggcgtgctcgatcagggatactggcccgacggcctcatgacggctccctcggacgaggcccttcgtttcgacatagaggcgatggcatcgctcgggttcaacatgatccgcaagcacatcaaggtggagagcgagcgctggtactacctgtgcgaccgtatgggcatgctcgtgtggcaggacatggtgagcggtggggaggacccgcacgtatggattgcgagccgcatccccacgaccttcaagtggttctggtcccactaccgtgacgataccgagaagcaccaaaggcacctctcgtcggacaacgcgctgtaccgcaacgagtggcaggctcttgccggttcgacggtgcggcgcctgaagagtcacccctgcatcatcacctggtccctgttcaacgagggatgggggcagttcgacgccgccaaggcgaccgagtccgtcaagtccatcgacacgacgcgccccgtcgactccacgagcgggtggttcgaccaaggctgcagcgactacaacagcgtgcacaactacttccgcgacaacgagatgttcgacgatcccttcagcttggggcgcccgctcgtcgtgaccgagttcggcgggctgtcgtttcatatccccgagcacagcagttggaacacctcgtttggctacgcgagcttcgatgcggtcgagcagtggaggaaggccgtgtggggactgctcgaccagatggattcgctggagcgcaagggcctttcaggctacgtctacacccagctctgcgatgtcgagcaggagaccaacggcatcctcacctacgaccgccgcgtgaacaagctcgagaccgttcgactcgaggaccttcacaccgacgacgaggccgatgaagcgcgtgcggttgaagaggaagacgatgacggggtttcggatggggagacttcggagagcacggagcaggccccgatcgaggagctcgaactggggcgcgcggatgagaaatccgacggttccccagcccagactgaggatgatcctgctgagaatggcgcggttagtcttgagacgtctgttgaagatacgacagatgttaataactcaacagatgaattagaatcctcgacatctgatcaggatcaggatgccgacgataaaccttccgatgacgacgagccaaaagccgacggtgccgagacctcggaggataccgagcaagcggtggaatccgatgcctgcgaggactccgaagcagcgggggatcaagaagcgctcccatcgaatgaggaagcagattcatctggcaataaagcccgctcctgagcttgcgcatacgtaaacggcgagtcctcggccatttctggccggaggctcgccgttttgatgcttcgggggttgggccctcacgtgcttgccatgagggcatttgcgtcacgcagaaggtggcgcaaaacgcagccgctacttgtggtagaaggtcccacgctcgaatttgggctcgcagcagacgttgatgccgaggtttcggtacgtgcgctcgtctgcggcggagatgatcacgctgaagtacgcatcgcagcccttgagctggtagctcgcctcaatgaccttttccgcttcggggttcgtggcggagctgatggacagcgcgatgagcgtctcgttgctgtgcaggcgcgggttcttgctgtgcagatgctcggtcttgaggtgcccgataggctcgagcgcctggtcgctcacgacgtaggtctccttgtcgacgcccgcgacgcgcttgagcgcgttgagcagcagcgacgatgcggcgccgagcagctcggaggtcttgccggtcacgacggatccgtcgggcagcaccatcgcgcctgccggcttgcccgtcacctcctccttgagcatggccgcagcatgggcggggttgaagtctttgtcgatgccgacctcgttcatgaggagctcgatctttgcaaggtcagactcgccgctgcccgtgcgtttgatctgctcggccgtgcggtagtagcggcggacgatctcgtttagggatgcctcgcggcagacgtcgtcatcgctgatgcagtagcccaccatgttgacgcccatgtccgtgggggactggtaggggctttctcccatgatgtgctccatcatcgccttgagcacggggaaggtctcgacgtcgcggttgtagttgaccgtgacctggttgtaggcctccagatggaacgggtcgatgatgttgttgtcgtcgaggtcggcggtggcagcctcgtaggcgatgttgaccgggtgcttgagcggcaggttccagatggggaaggtctcgaacttggcgtagccggccttcacgccgcgcttgttctcgtggtagagctgcgacaggcaggtcgcgagcttgcccgagccggggccgggggcggtcacgacgacgagcgggcggctcgtctcgacgaactggttcttgccaaagccctcgtcgctcacgacgtgcgcgatgtcggtggggtagtgctcgatgatgtagtggcggtacgacttgatgcccatgtgctgcaggccttgggctggccggtgaagtgcgtgatgcagacgctgccaacgtatagcccgaggctctggaacgcgtccatgagcctgagcgcgtcctcgtcgtaggtgatgccgatgtcgctgcggcgcttgccgttctcgatgtcctcggcgttgatcgcgatgatgatctcgacgtcgtcggccaggctcttgagcatgcgcaccttcgtgtcaggctcgaagccggggaggacgcgcgaggcgtggtagtcgtcgaacagcttgccgccgaactcgaggtagagcttgccgccaaactggtcgatgcgctcgcggatgcgcgaagcctgcatctcgatgtacttttcgttgtcaaagccgattttcataggtggttccttcggtgcgcgaagagatgaatacaacccctgaattatcacacatgcggctcgtattgtttcgattgtgttacacaatcacgccagaattccaaatgcgcagctctcgggctcgaacctgactataggcgggctgcctgttcgtctatcatgagtcgcaggtgatttctgcggcagctggtatctggctgccgctcgtatacgacggagaagacacgatgaacataaccgtttactgcgggtcgatgaccggcaatgccccggtgtacgtcgagaccgcgcaggcgctcggcacctggatgggccaaaacgggcacacgctcgtctttggcggcgggggagttggcctcatgggggcgctttccgatgccgtgctcgcggccggtggaaaagcgcacggggtcatgccctcgtttctcgtggagcgggaggcgtcgcgctccggcctgacggcgctcgaggtcaccgacagcatgcccgagcgcaagaaccgcatgatcgagctgggcgatgccttcgtcgcgctgccgggaggtccgggcacgatcgaggagatttcggagatcatgtcgctcaagaagctcgggcgcgtctcggggccctgcgtcctgttcagcgttgacgggtactacgacgagctcgcagctggctacgacaagatggtggcgtgtgggttcgcgaccccggccgagcgcgcaaagctctccgtggtctcgacgcttcccgagctcgtggaggtcctcacacggggagaggacgcctgagaccatgatgacggcggagcaatacgagcgctggagtgcctggtggcgtgcgcacgagggtgcgctcaaggcgctgctcgctgtgaacagggggctcaggtacctcggctatctcatgtacccgctgctgctcgtgctcgtcgccattttcgacctgccgtcgctccccaagctcgtcgtcgtgccattgctcggctttctcgtggtaagcgggtttcgcaccgcctttgacgccccgcgtccctacgagctcctcgatatcgacccgctcatcaagaagacaacggtcggccagtccatgcccagccgtcacctgttctcgatgacgatgatcgccatgtgctggctgtactggtgcgccccggtcggggcggccttgctgctgctctgcgtcgttatgggctacatacgtgtggtgggcggcgtgcactttccgcgcgatgtctttgccggggccttgggcggcgtcatcctcggcctgtcgttctggattatctgagccgcgctactgcagggcgtcgatgaagcggttgagtgcctgacgaccctcgacatcccacttgaagacgccgcaatcttcgagcaccttcgaaaacacgatgccgacctcctccttgaggatgtcctcggcgttttccggggcgagctcgtggtggcgcgcgagcacgtcgcgggcccagggcgcatgcggtgccgtgagctcgtcgtcctcgaaatcctcgcccgcgagcatcttctcgccgacgcttgccagctcgcgctgcaggcgcggcggcagtatggccatgcccatgacctcaatgaggccgatgttctccttcttgatgtgctggagcgcaggtgcggggtgaaagatgccgagtggccgctcttcggtggtgcggttgttcctgagggccaggtcgagctcgtagttgccgctgcgcgtgcgcgcgatgggcgtgatcgtgttgtgctgcccctcctcgtcgcgggcgacgattcccacgctcgtgtcggaataggcgcgccatacctcgagcacgtggtcggctgccgcgacgagggaagcggcgtcgtcgctctgcaggcggatgacggtcaccggccacttgatgatgccgcaggtcaccttgggatgccccgccatctcgaagccgatggcggtgcgcgcctgctgcatggggaacacgtagtgcccgccctggaagtggtcgtgcgagagtatcgagcctcccacgatggggaggtccgcattcgagccgatgaagtaatgcgggaacagcttaatgaagtcgagcaggcgcacgaaggtgccgtggtcgacgtgcatggggcgatgctcctcgctcatcgcgatgcaatgctcgttgaagtaggcgtagggggagtactgcaggccccactgctcgccgcccaagatgagcgggacgatcctgaggttgcgcctggcggggtgcgcgcccaaggggcctgtggccggacgtcccgggtagccctcgttttccatgcagagctggcagcgcgggtacgtatctcccgagacgtcatgcgcggcgcgtgcgatgtcgcgggggtccttctcgggtttggagaggttgatcgtgatctcgagctctccccactgggtgggggtgcgccacttgatgtcgttggcgatggccttgcggtgcacgtagtcgacgtctccgcacagccggtagaaccatgacgtcgcctgctgcgggtccttcgcgtgcagggacgcgaaggtgcgggcgacctcgtgggggcgaggcatgagcaggctcatgatccacccgcggataccgtcgtctccgtcgcc

SEQ ID NO: 2520 - DNA, 32759 bp, Unknown
  16S sequences of unknown bacteria
cccgcatagcgggtggttttttgtttcgcttcgctcaactgcctaaaggcatgaagagaaagcggcgcggaaggaaatgccttccgcgccgctccttttttgccttttttgccttagatgatttccagctcgtcctgacccggcaggggcgttaggttcgccgccggcttgtccaggtagaagtaggccacggcggagatgtcgtcctgcaggggcaggtagcggccgccgctgcgccagcccagggcctgaatcgtcacgcggatgtcctgggagaaggcgatggggtccgggatgtgccagcggtagaggccaaagcgcgtctgcgagcggtagacgccgtccgggcgcaggacctggcacaggcccgtatagggcgtggtgaaggtctggtactcgtgcgtcttctggttctcaaagttgtaggagccgcagaagtagtcctccgtgccggtgccgcagatggtggggaattcctcgtccccgtcgaggaagaacttgatctcgccctcgccccaccagccgctgttgtggacgccccaggccatgtaggtgccggcgtacaggccgcggccctggatcttgtccaggatcgggaactcctgcttatagggcagggggttggcgcggtggaactgcgcgtggaagtaggcgcggtcctcctccacgggctcgagggtataggtgatctggtagtagacggtgcagcgctccgcgccgcggttctccagcgtgacgcgggcacggcggcggaagggcatctcccaataggagttgaaggcggagccggggtttacgcacaccgcgagcgacgaaacctgcgcatactcgccccagccgcaggcgaagaagtcgcccagggggcactccacggccggcacgtcgctgtcgtcccagtagaagcgcaggatctggctgcgccaggcgcccgtgggcgtgagccagatgtggcggatgacgccgctgccctggatgtcggccagggtcagcgtctcccccgcctccaggtgcagataggggttgaccttccagccggcgcccagatcccgcgccgcgttgcgggccgtgcccgcctccaggggcgtgcgcgcgccgccggctctttcgccggtgcggttttcggggctgatggagcgcgtttcaaactgcggcaagcgcgaaaggctcttgagatcgaacatggttttccctccttggaagagaatggagttttttgcgggaactgccttcatggtactgcgccgggccgcgcctgtcaacgcctgcgcaaactttttcttttggggcggcgctgggcgcttgactttttccggcgtttcccctacgatagacataaccaagggcttaccgaaaatttacacagatgtacataggagggacgacaatgcaggcatttcacagaaacgatccggcgtttcagctgcgcggcgatctgcccaaggtgggcatccgcccgacgatcgacggccggcgcaagggcatccgcgaggggctggaggcccagaccatgggcatggccaaggccgtggccgcgctgatcgaatccgagctcaagcacccgtgcggtctgccggtggagtgcgtgatcgcggatacgaccatcggcggcgttgcggaggctgcggagtgcgaggcgaagttttcgcgggaaaacgtggggctcaccgtgacggttacgccctgctggtgctacggctcggagacgctggacatggatcccctgcgcccgaaggcgatctggggtttcaacggcacggagcggccgggcgcggtgtacctggcctcggcgctggccgggcacaaccagaaggggctccccgccttctccctctacagccatgacgtgcaggacgcgggcgacggctccatccccgaggacgtgcaggagaagctgctgcgctttgtgcgggcgggccttgcggtggcgacgatgcgcggcaagagctacctcggcatgggcggcatgtccatgggcatcgcgggctccatcatgaacgcgcccttcctggaaaagtacctcggcatgcgcatggagcaggtggacatggtcgagttcgtccgccgctgggaggaaggcatctacgaccacgaggagttcgagctggccaagtcctgggtggacgaatacatccgcatcggctgggacaagaacccggaggaggtctgccacagcccggagaagcagcgcgaggtgctggagacctgcatcctgatgaccatgatcgcccgggacctgatgatcggcaacgagaagctggccgccatgggctatgtcgaggagagctgcgggcacaacgccatcgccgcgggcttccagggccagcgccagtggaccgaccacttccccaacggggacatgatggaggcgctgctcaactcctcctttgactggaacggcatccgcgagcccatgatcgtggccacggagaacgaccacctcaacggcctggccatgctctttggcaagctcatgacgggccgggcgcagggctttgcggacgtgcgcacctactggagccccgcctccatcgagcgcgtatccggctggaagcccgagggctacgcggcaaacggcatgatccacctaatcaactccggctccgtgacgctggaggccaccggcgcctgccaggtcgacggccagcccgccatcaagccctggtggacgatcaccccggaggaggccaaggcctgcctggacgagacgcagttctgctacggcgacttgttctacttccgcgggggcggatactcggcgcacctggtcagccgcggcggcatgcccgtgaccctcagccgcctgaacctggtggacggcctgggcccggtgctccagatcgccgagggctggacctgcgacgtgcccaaggccgcgcacgacatcctcgacaagcggaccgacccgacctggccgacgacctggttcgccccgcgcctcacgggcgagggcgcattcacggacgtctactccgtcatggcgcactggggggcgaaccacggcgccttcagctacggccacatcggcgcggacctgatcaccctggcctcgatgctgcgcatcccggtgtgcatgcacaacgtgcccagggaaaagatctaccgcccgagcatgtgggacgccttcgggacgatggacctcgagggtgcggatttccgcgcctgcgcggcgctgggcccgatctacggccgcgcataagacgtactcccccccaaacgcaaggaagccgcatcctccaaagacggagggtgcggcttcttttttctcaagcacgctcgttcagggcgagcaggcggcccgattcgtcgaaggagaagtcgcagacgggcaggggcgcaccctctccccgctccccctgcgcgtcgagcagcgctctgggcgcgtcataggcctgcatcgtcccgtccgcagcgcgcagggtcgcggtgaagccgtcggccagggcaaaggcgtaggggatctccttgctgtaggtatagctcgtcccgtccgcggcgaacgcggcggcgctgacggtcgcgaccacgtcctgcccgcgcgcctgcacatcgagcagcaccagcgcgtcggcgtcctcgggcaggtcggccggcccttgcaggggtgcggcgcaccctgcgcacagaagcagaagcgcggcgagcaggcaaaggcagattcgctgcatggttcttcctccttctaaaaaagccagcccggcaagggattgccgggctgccgttcgagatgtcttaggggcggttgagggtgccgtcggggcggcggcagttggtccaggtgggcagcttctcggagcaggggaacttcttggcgagttcctcgtcgatgtcgatgcccaggccgggcttgtcgttggggtagacatagcccttcttgagctcggggcagccggggaagacgtccagggacgcctgcttgaagcccgcccactcctggatgccgaagttccagctggagacgtccagatggatgtccgcagcgtggccgacgggggaggtgtctcccgggccgtgccaggccgtgcgcacggagaaggcctcgcagaagttggccagcttcttggcgggggtgatgccgccgatctggctgacgtggcagcggatgaagtcgatgagcttgttcgcaatcagcggcgtgaactcgcgcgggttgttgaacagctcgcccatggcgatgggggtgtgcgtctgcttgcgcatgatctcgaaccactcgacctgctcgggcgcgagggaatcctcgtagaagaacaggcggtagggctccagctccttggccaggcgcacggcctcgatgggatcgaggtgctcgtggacgtcgtggcagagctcgacgttgaagccaaagcggttgcggatgtagtcaaagagcttggtcaccgagagctgatagcccagcggatcgtagtacgcgccctcgcacgcaccctcggggcgcatggactccagcgcctgctggtaggcgtttccgccgtagccgccgtgctggatgcgcacgacctgcacgccgtcctcgatgaaggcctgcacgcggtcgccgacctcctccagggtgcggccgtcggcatggcggtagacgcgggccgcctcgcggaccttgccgccgagcaggtcgtacacgggcatgccggccatcttgcccttgatgtcccagagggcctcgtccacgccggagatggcgttgttgagcacggggccgttgcgccaataggcgctgaccatgctcatctgccagatgtcctcgatgcgggtgacgtccttgccgacgagcaggggcttcatgtaattcgtcaccgcgtgggcaacggtcatccacctctgggtgtaggtggcgcagccgatgccgtacaggccgggctccgaggtgaccaccttgacgataacgaggggaatcccttccggtgcggtgcaaatcgggtaaatgtccttgatcgttaccattgtttttcctccttgcggatgtgttctgtgtccccactacagattcagtatacacatcgattttaccattttcaatatcaatttccaatgcggggggcgaaattcttttttgttgtttcatgatatgaaacccccttgcgtgcggggcggcgatgcggtatagtgaaagtaaatcgatcacaggaggacgccaatggcacaactctggggcattttgcgcaggaagaaccgcatctggcgcgacgccgtcgtcgaggcggagggcgacagcgcttctgcggcgcaggaggcgctgagcgacctctgctacaagctggacatcgcccggccgatctggctggacaagcacgaacaggaggtcgcgcgctttggccggacggcctttacgcaggagcacttcctcgaaccgatcgcctttgacaagttcgagatcgagtttctgcggccgcacggtcggtcgaccgacccgcgaaacgactttggcacgaacgcataattcgcgccccgatgcagatgctattcccgaaaccgtttacgaggagggaattggcatgatggaccgcatttcgctgatacttgtgattgtcggcgcgctgaactggctccttgtggggctgttccagtttgacctggtctcgtggatcttcggcgggcaggcgaacgccttcgcgcgcatcctctacgcgctggtcggcattgcggggctgtggagcatctcgcttctgttccgccgccgcgagccggcggtgcagcactagtctgcccgccgcggcgcaaaaccgaaacacaaaggaggagttttcccaatgaaagaagtcaagctctacgacgtcgcgcccgacgtgctcgaccgcatggcgcacggcggcgtattcttcaccgtgcaggacaagtccgggcgctgcaacacgatgaacatcggctggggcagcctgtcctgctactggaacgggccggtcttcatcgcgcccatccgccacaaccgctacacctacgagctgctgcagaacgcggacagcttcacggtctccgtgccgctggacgacggcatgaaggaggcgcttacgctggtgggcacgcgccacggcaacgaggtggacaagtacgcgctggcgtacctgacgccgctggacgcgctgtcggtcaacggcaaggtcatcggccagtgcgcgctgcacatcgagtgccgcatcgcgctgacgctgcccatggaccccgaggcgatggacccggccgtccgcgagcgctggtacggcgacggcgatttccacaccctgtactttggccaggtcgtcgcctgctaccgcacggacatcgacgactgatccggaacgcaaaaaggacccgctcggcgggtcctttttgtgtgccgttggcgcggggggaggcgatcagtcctcctcttcctcctcgggcaggttggcgttgtggtagacctcggagacgtcgtccaggtcgttgagcatgtcgaggatcttctgcaggcgctccaggtcctcgcccgcgggatcggtggtgttctgcgggacgagggtggattcggcagagctgatggtgtacttgccctcgagcttttcgcggacggactcgacctcgttggggtcggtctcgatctcggcatagccctcgtcaaaggcgacgtcgttggcgccggcgtcgatggcgtccatcatgacctcgtcctcgtccaggttctcgccctcgagcacgatgaggcccttgcggtcgaacatccaggccacgcagccggtcgcgcccagggagccgccgtgcttctcaaagcaatggcgcacgtccgaggcggtgcggttgaggttgtcggtgatgcagtcgacgatgatggcggtgcctgcgggaccgtagccctcgtaggtgacctccttgtagttttcgccctggccctcgcccgaggccttcttgatggagcggttgatgttgtcgttgggcatgttgttgtacttcgccttggcgatgacgtcgcgcagcttggcgttgagcgccgggtccggtccgccggccttgacggcgatggcgatctcgcggccgatcttggtgaagatcttgccgcgggcggcatccgtcttgcccttcttcatctgaatgttatgccacttggaatgtccggacatacggtaaatccctcccgagaatgctgtgaaatgcttacccgtcattataccacaccttttcgcctcccgtaaagggaaacggagggctttcggcgctcgttttaggtaatggcaaggttaattctcgcctcaggagccggacatatcgggcagaaggttgagcatatcctccgtggagtccacgttgacgtaggattgcggcacctggcccacgatcacggtctcggccacgggaacctgggcgacgacctcgacctcgcgggcgccggtggggatgacgatgcgcatgttggcccggatgcggatgtagaccttgtggcgcgtctgattgatgccggcggtgcggaactccgtgacaaactccgaggagaccgagcccacgggcacgaccttgacgagcatctcgggtccgcggccggccagcagcgggctgccggtcgccgagccgatggagatgcggatggactggtccgcgatgtcggcgatgtactgctgcgcggtcagcgccgtctgcgtcgagatgcggttcatgttgacggtgttggcctgcaggagcgtcacgcggccctgcccgtccgtatcgacgcggatcaggtcctcgtaggtgatggcgctcaggttccgcgcgatggcggaattcacggcgtccagggcgatggcgcgcacgcgggattcggcggtgttgaggatgatgggccgcaggttgacctcggtgacgacggcgatggcggcccccagcgcgagcacgacccccagcgccagaaggagcaggccctttttcccctttctcaaggaacacccccctcttcttgcaggaaaatcccggcgccccggcgaaatatactatgtttctgcgcatccgctttatgcgcacccaacttcccaggaggaacccgcatgctgaagaagaacaaggacaattccgaaaccccggagggccgcaaggcgcgccgcccttccttctccccgttcaagcccagggacaagcagccaaacttcatcctctcggtgctgtgccacacggtctgcatcctgctggtggtggtgctggtcttcggggtcggcggcttcggcgcgctgatgggcgtggccaaggggtattacgagacgacgccggacctggacgtggacaagatcgagacgcagaacctcacctccttcatctacgactgcaacggcgagctcatcaccgcctacaagggaacggagaaccgcgtctgggcctattacgacgagatcccggagaatttggtctacgcctttgtggccgtggaggacgcgcgcttcttcacccacaacggcatcgacatcaagcgcatcatcggcgcctttgtctccaacctgcagaacgagagcacgcagggcggctccaccatcacccagcaactcgtcaagaccacgctgctgtccaccgagcagagctacaagcgcaagctgcaggaggcgtacctggccatcgagctggagagcgaatactccaaggagcagattctggagtggtacctcaacatcatccccttgggcgagagcaactacggcgtcaaggccgcggccaaggactactacgacaaggacctgtcggagctgacgctgcgcgagtgcgcgtcccttgcggccatcacccgcaaccccagccgctacaacccgcgccgcaactactacggcacgggcgagccgagcatcatcgacgaccgcacggactatgtgctggagtgcatgtacgacaatgggttcatctccaaggcagagtacgacgcggcgctcgcggattcgctcaccgtggtggaggaatcgacggtaaacgacctgtacgacatgccctcggccgtagagacggtgctagatgatgcggtgacagagctcatcgccgaccgcggcctggaggacacggacgagaaccgcaccgccgtgcggcgcgagatccaggcgggcggctatcacatctactccaccatcgatccggagatccagtccatcgtcgaggacgtgctctacaactgggaggactacccggagcttgccgacccctcggacgagtacgccgacagcacgcaggccatacagccgcaggccgcctgcgtgatctacgactaccacagcggcgagatccgcgccgtggtcggcagccgcacgccgcagacgcagttcctggtgctcaaccgcgcaaccgacgccaacatgcccgtgggctcctcgatcaagcccctggcggtctacggcccggcgctggacaaggggtactcgcccggctccgtctcctccaacctgccggtgcccatcgagggctggggcacggccaagggctatccctccaacttcacctccggcacctaccgcgggatggtgacgctgcgcgcgggcatgcgcgcctcgctgaacacggttgcggccaacacgctcatgagcatggtcggcatctccgacagcgtggaatatctggaggccatgggcatcgacccagatcacatcaacgccgacggctccggccttgcgctgggctcctccggcatcacggtgcgcgagatggcgcaggcctttggcaccatcgccaactccggcacctaccaaaagcccctgaccttcaccaagatcacggacgcggacggcaacgtcatcctggacatgaaggccaagcaggccgagagccagcgccaggtcttccgcgagggcacggcctacatgctcgtggacatgctcgtggacgccgtgcagagcggcagcggccgctccgcgcgcatcgacggcatgaccgtcgccggcaagaccggcacgcactcggactacaagagcgtgttcttcgcggggttcacgccctatctctccggcgcggtctgggtcgggcacgacgagttcaagtcgctctacagcggcgcgaccggcggcaaggaggcggcgcccatctggaaggcggtcatggagcgcatcatcgaggccaagggccaggaggacaaggagatcatcgaggacgatcccgagagcctgggcctgacccgcgtgaccctctgctccctcaccggcaagctcgccaccgacgcctgccgcgcggacgacgacttcccgcccacgacggattggtgccacgcggacagcgtgcccacggagacctgcgacctgcacgttctgctccccacggacgccacgaccggccagatcgcgcgcgcgggctgcccgaacaccacggaggtcgcctaccaggtcgtgccctcctcctggggcgcggacaacatggatgacgacgacttctacgtctacttcccgcacggcatccgcggctacaactccgcgacggagctgctggccgccgcaaacgcgggcgccctgccgcagaacctctactgctccgcgcacggcgactacggcctgcccggcatccccgacgagggaggcggcgacagctggtcggacagcaacgtctacccctcctacgacgacgaaatctccatcccggacgaggacggcgccgtgggctgatcttaaaggaagaacaagaacccccgtgcaggctgcacgggggttcctttgttgcgcgtcaatcgatggtggggaccagctcatcctgcgcgtggtcggtcaggtccgtcaggctcagctggtaggtgatgggatagaacaggccgtcgcgatcctggtagtacatcagcaggatcgagtcctgcgtgcgcccggggaagatcgagttgctcgccagggccccgaggtccgtggtccggccgtcgaccgtgctgtagcgcatcaggcgcacggggtagtccgcggcgtcctcggcgtcgcggttgctgaccaggtagaagagcacgcggctgtcctccgaccaggcgtagtccgagagcgcggcctgcgcggcgatctgcatccgcgtgccgctcgccaggtcgcacaggtacatcgtggccagggacccgttttcgccgtcctcgtagacgatctggagcatgcggctgccgtcgggcgagagcaggaagccgtcggcgatctcgaagagctcgcgcgtgccggtggcggtatccacggcgtagacgttgccgtattcgtcgttgaagtagacgattccgcccgcttcgccgacgttgccgtagccgccctcgcgctcctccacggcgtgcaggggctcctgccccatctcggccatggcggggtcataggccatcagctgcatggtgtcgctgccgctcatggcgtagaggacgccgtcctgcccccaggcaaagtcggaggtgtagtcgccgaatccctcggccgagaggaagagcaggccgccgtccctccggtcgtagaggtagagcaggcgcgcgccgctgctctgctccagcagcgcgatatagcgggtgtccggcgaataggcggccttctgcacggaggaaaaggccgtgtccagcagcggctcccgcgtgccgtcgagctggtagagccagacctcctcataggtcgaggtcgtgccgtcgcccgtggtctcgacctggggccgggccatgaccatgccgccctccgggtcccagcagaggaagcgcgcgtcggtggccacgagcgtgccgtccacgacgccgctgtcggtcttgagcgcgcccatcatcgtgagctcggagcgggagacgggctcggtatacgccggcgccgcgccggagttcaggtagatgacctcggccgtctcgtcgctgccggcggcctccagggcgtcgttcagcgtgcggcagagggcgtcggcctcctcgatcgtggcaaagccggcgctcaggtcgtagatgtgctcgccgtccgcgcacagggcgggctgcaggccgctctccgccgtgacggcgaggttggcctcgttataggggaccttgacgtggtactggtcgatgctctgggcgtcgtccgcgcgcacgcgcaggacgagcgcgccctcctcctcgctgatcttgtaggcgatctggcccaggaactggaagtagaggtccgtcccctcctccgtgccgcgggcaaagaggccgaggaattcgccgacggactccaggtccgtctgcgcgtccgcggcaaggtccgcctgcacgcgcacggcgatgcgcgccggggccgtgatcgactcgacctcgtaggccgggacgcgggcgctctcgctctcgccctggcggaaggtcatggtcaggaccacttcctcctgctggcgctcgacggcgacggcggaaagggccgcctcccgaaggtttgcgccgccggtcatcgtctggccctgcccgtaatacccgggcacagaggacgagggcgtcggcgcgggcgcggaacaccccgccgcaaacagcagcaatgccgcgagaatgatgcaacaagctcttttcatgcttcctcccaaagagcgcggaaatgcgcgcgtcggtttcctcctcagtatacaataaaatccccgccgaggcaatcgccgcagcggggaaagcgcgtccttagacgagctggatgcacttcctggggcacttctgcgcgcagaggccgcagcccacgcacttctgcgcgtccacgcggtgcttctccttgagcgcgccggttatggcgtcgaacttgcactgcttggcgcacaggccgcagcccacgcacgcgccctcgtcgatgacggcgtgcttgcgggtggaaaggtcgcccgtcatggcgccggtggggcagttgcgcacgcactccaggcacccgacgcacttgtccatgtccacgatgggcaggttgttttccatggtgatggcgccgaacttacagctcttttcgcacttgccgcagccgatgcagccctttgtgcaggcctcgcgcacggcgcggcccttctccaccgcgcggcagcgcaggatggagcgctggccgtagggctccaggcgcaggacggacttggggcagacctggatgcacttgccgcagcccttgcacttgtccggatcgatgtggacgaggcggttttccaccgtgatggcgccaaagtcgcagaccttggcgcaggagccgaggccgaggcaggagtacttgcaggccttgtccccgccggaggcgaggaagagcgcgcggcactcggtcagcccctcgtaggggaacttgatcttgcaggtatccgcgtcgccctggcagaggacggtggcgaccatgcgggtggaggaccccgcctccacgcccatgatggcggcgatttccctggcgaccttttcgccgccgacggggcagcggttgacgggcgcgccctcgttgacgaccgcggcggcgtaggcgtcgcagccggcgtagccgcagccgccgcagcccgcgccgggcagggcctcgcgcacctgggcgacgcgctcgtcgaccttgacggcgagcttctggctggcgaaggcgaggcccgcgccaaagagcacgcccatgctcccgaggatgcccgcgggcaggaggatatccgatagcatcatgtcacacgcccccttaaatcagtccctggaagccgaggaaggccaccgccatcagccccgccccgatgagcgtggaggggaagcccttgaagcacgcggggatgttgctgttctccaggcgctcgcgcacgcccgcaaacaggacgatcgccagcgtaaagcccagcgccgagcccacgccgttgacgacggacccgagcagggaatagctctcggtgatgttgaggatggtcacgcccagcaccgcgcagttcgtggtgatgagcggcaggtacacgcccagggccttgtagagcgagggcgaggtcttgttgatgaccatctcgaccagctgcaccagcaccgcgatgaccaggatgaaggcgatggtctgcaggtacgttagctccagcgggacgaggatgtagtactgcacaaggtaggtcacaaggctggccacgcccatgacgaacgtcaccgcgacgcccatgcccagggccgtggagacctgcttggacacgcccaggaacggacaggtgccgtagaacctggacatgacgaagttgttgaccaggatgctgccgaccaggatgagccaaaggttttcctgcatttaggccacgctcccttccgcggcggcgcggcggcggccgtcgatcttcttcatgacggcgttaaaggccaccatcacaaggccgagggtgatgtatccgcccggggccaggatgaagagcagcacgccggggtagttgctgcccagcaccgggaagcccaggagcgtgccggagccgatgagctcgcgcacggcggagatgatggacagcgagatcgtaaagcccagccccatgcccaggccgtccgccatggaggccagcggcgggttcttggaggcgaaggactccgcccgcgcaaagataatgcagttgaccacgatcagcgggatgaagagccccaggctctgcgacagcgagggcaggaacgcctccaggagcagctgcacgatggtcacgaacgtcgcgatgaccacgatataggcgggaatgcgcaccttggagggcacgaagttgcggatgagcgagatgacgaagttcgaacagaccaggacgaacgtggtggccaggcccatgcccaggccgttgagcacgctggtggtgatcgccagcgtcgggcacatgccgagaaccaggcggaaggtcgggttctcggtgacaatgccgttgaggaagatcttcttgagatcctgctttgccatggtttcccccctcctccttattccaggcttccggccagggccaccgcctcgttgaccgcgctggtcacagcgcgggaggtgatggtcgcggcggtgatggcgctgatttccgagtcgttctgcgcgccgttcttgttgacggtgagctcgccgcccttgcccgtgaactgggaaaggaagctgtcgtccgcggccttggcgccaaggcccggggtctccgagtgcgtgccgatgcgcacgcccgtgaccacgccgtcggagacgccgacggtcatggcgatgtccccgccaaagcccgacgcggtgaccgagagcgcatagccgcagggctccccgctctccgaaaggccgcggaagcaggccgtgaccgcgcccgtgggctcgatggcgacctcctcaaaggtggcggcctcgggcaggaccgcgcggcggtccgcctcctgctggaggagctcctgctgggcgatggggtccttggtcacggtatacgtcgcgcccaggcacagcccggccaggatcatgatgaggaagagccgaaaggccacctttgcaatctcacgcacggcgcttcacctccccgtacttgcgcggccgcgtcgcgcgctccaggagcggggacgcgatgttcatcaggagtatggcgtacgtcacgccctcgggataggcgccccactgccggatggcgaagttgatcgcgccgatgccgatgccgtagagcaccttgccccaggcgggcacgggagaggtgacgtagtccgtggccatgaagaaggcgccaaggaccgtgccgcccagcagcacgctgtcgagcacgggctcgccaaaggccaggttcagcacggccagggtccccaggtagctcaccggcacgcgccagtcgatcacgcggcgcacgagcaggtaggccgcgcccgccagcagcgcgagcttggagacctcgccgatggagccgccgatgcggccgaggaacgcctgcgcgtagtccacggtccccgcaaactcgctcgaaaggggcgtcgccgaggagaccgcgtccgccacggcggggaaggtcgtcatcgccaccgggaaggacgccagcaggaacgcgcgcccggccagcgccgggttgacgaagttatcgcccaggccgccgaagacctgcttggcgatcacgatggcaaaggccgcgcccaggaccggcacgtaccagggcacgcccgccggcagcgtcagcgccagcagcaggcccgtgaccgcggccgagccgtcgtccacggtgatgggccggcgcagcgccttctgcatcagggcctccgagccgatggccgccgccatggagagaagaatcgtcacaaggaccgaaaagccgaaccagtacaccgcaaagaccaccgccgggatcagcgcgatgagcacatcgagcatgatgcggcgcgtcgagctctgcgcgcgcacgtggggcgacagggataccgtaaggttgctcatctggatctctccccccttctactgcttcttgcgcagggcttggacctggcgcttgcagacgcggatggacgaggtgatgctgcgcttcgcgggacagacgtaggtgcaggacccgcactcgatgcagtccagggcgttgtgcttgtccgcggcagcccagtccccgcgctcaaagtcgttgcacagctcatagggcagcaggtggatggggcagccccgcacgcagcgcccgcagcggatgcagttggtgagcttgcccggggcggtctgctcccgggtgagggcgagcaggccgctggtgcccttgaccaccgggaccgtcaggtcgtagagcgcgacgcccatcatcggcccgccggaaaccacgcggtccgcctccggcttgaggcccccgcacaggtcgatcagctcctgcgccggcgtgccgatgcgcacgcgcaggttcttcggcgtctggaccgcgccggtgacggtgagcacgcgctcggtcacggggcggccctttgcgaccgcgtccgcaatggccgcggcggaagagacgttgaccaccacgcacccggcgtccatgggcaggccgccggagggcaccttgcggcccgtcagcgcggagatgagctgcttttccgagccctgcgggtacttgacgcgcaggacctggacctcgatgcccaggggcgcggccaaggcacgcagcgcctcggcggcgtcgcgcttgttggcctcgatccccacgatcacgcggggcgagcccagcgcgcgggcgacgtaccgggcgccctccaagatccttgcgccctcctccagcatcaggcggtggtccgccgagaggtagggctcgcactccgcgccgttgagcaggaggaagtcgatcttcttatccccgggcggggagagcttgacgcgcgcgggaaacgccgcgccgcccatgcccacgacgcccgcctcgccgatgcgcgcgaggatgtcctgcgggctcaggctgtccacggacccttccggcgggcggcagtccgggtcccactcgtccttgccgtcgttttcgatgacgacgcaggggaccatggccccgccgatggtcaggtgcggcgcgatttcgaccaccgtgccggataccgaagcgtgcaccggcgcgctgacaaagccccgcacctggcccacagcctggccgcggagcacgcgatcccccaccgcgacgcacggcacgcagggcgcgccgatgtgctgggccatgggcaggaccacgcgcgccggcgcaggcgcctctgcgatggggagattcgcagtcaggccctttccgctgccgatggcgtgcagcggatggatgccgccgcgaaaggatttgacgctgctcataccagagagttcccctttcttgggcgattcgataaaacggaaaatgcccctgtattcactccatccattatagtataacaatcataaaaaaaatacaatgattttgtcaaaagataaaaccggaacgatacggagctttgccgtggacgcgccaatatgataaatttatcacaatttcctgctcggacgcagaaagccccttttgcgctgttttttggcgcaaaaggggctttgcggcgcctggctaggcctcgtctcccgcgcggcgcaggaagtccgcgacctcgagcgaggcgcggtagacggcgttccggctctggccgggcagggcggagacctcgcgcacggcgtccttcatcgtcgcgccgtccagcaggcggtccagcagcagcgcgcggggcgacgcggcggggccggcgctctcctcctcgtccctgcggtccgggagcgccaccacgcagacgtactcgcccttttccgcgttggggttggcctccagcgcggcgaggacctcgcccgcccggccgcgcagcgtcttttcgtgcagcttggtcaggtcgcagctcagcgagagcatcgggtcctggagcgcctcctgcaggtcggcgacgaggcgcttgacgcggtgcgggctctcgtagagcacggccagggccgtcgggcaggcggcaaggcgggcaaaggcctcctcccgctcgcggccctgccgcggcaggaatccgaaaaacgcgtagctatccgcggaaaacccgctgacggagatcgcgtccaccacggccgaggggccggagatgggctgcacggggattccggcggcccaggcggcctcgaccacgcggtagccggggtccgagatgcagggcgtgcccgcgtccgtgaccaggcagacggtgaggtcctcctccgccatgcggcccacgatctcctccgcgcgcgcggcctcgttgtgctgaaagcaggagaccaggcgcttgccggggatctgcagggcgctcaggagctttcgggtcacgcgcgtgtcctccgcgaggaccaggccgcagtcccggagcgcctccagcgcccggggggagagctcgccgaggttgccgatcggcgtgcccaccacatagagcagggccatcgcttcacgcctcctccccgcgcagggcgcagcggaagaagcgcctgccggtttcggtgacgaagtgcttttcgtagacgatgtccggtttgtacttgtccgcggactccacgaggttgaccagccagtccgcctcaaagaggatctgcaaatcgcgctggccgcggatgccgaaggagtggtggtgccccacgaggtagccgatgcgctcgagcaccgccgggctggagacatagggcgcggcaaggcgcatggcgatcggcgcgcccaggcgctcctgcacggggccggcggcggtgccctccctggccaggccctccgggatgcccacgtcgtggaagagcgcggcgtactccagggcctccagctcctcgccggagaggttctcgcccgcggcgatgccctgcgcgtagccgaagaccttgagcgtgtgggccacccagggctcgttgtggtagtaggagatcatgtcggagatggcgcgtttgttcatggcggtcgcttccttcctttgttgagagtgggtcttgggatcactcgacggtgacggacttggccaggttgcggggcttatccgggtcgtatccgcgctggatggcgcagtaataggcgaagagctgcgcggggatgacggccagcgccggggcgagcaggtcgtccgtgcgcgggatggtgaggcggtattcggtcagctccttctccgcgtcgctgtcctcgtagccgatggtgagcaccaccgcgccgcgggtgagcacctcgcggatgttggagcggagcttttcgatcgtgctgccctgcgtgcagagcgcgacgaccaggcgccccggctcgatcagggcgatggtgccgtgcttgagctcgccggcggccatggcctcggagtggatgtaggagatctccttgagcttgagggaggcctccatgcacagggcgctgtccaggccgcgcccgatgaagaacatgtcctcctgggagaagaagcgcgcggcgtaccgctgcaccggggtgacgtcggagaggatctcctccgccttgtccggcaggcgctgcagctccttcaggagcccgtcatagcgggccggctccagcgtgcccttgcagagcgccatgtgcagggcgatcatggtgagcatgagcacctgcgtggtgtaggccttggtggaggccacggcgatctccggtccggcccaggtgtacaggacgctgtccgcctcccgggcgatggtggagccgacgacgttggtgatggccagcaccttgcagccgcgcgcatgcgccaggcgcagggcggccagggtatccgccgtctcgcccgactggctgacgacgacgaacaggtcctccggggcaaggacggggtcgcggtagcggaactcggaggcgacatcgatctccacgggcacgcggcagagcttttcgatcagcacgcggccgacctggccggcgtaggaggccgtgccgcaggcggtgatgaccacgcggcggacgccgcggagcatctcgtccgtgaggttcgcctcgctcaggtcgatgcggccgtccttgatgcgggggcggatcgtgtcgcgcatggcgcggccctggtcgtagatctccttgagcatgaagtgcgcgtagccgccgcgctcggccgcgtccacggaccaggtgacctcgaagacctccttgcggacgggctcgccctccatgtcgtagatctcgacgcggtcggcaaagacctgggccatctccccctcctcgagcaggtagacgcgccgcgtgtagggcagcacggccgggatgtcggaggcgatgtagttgcagccctcgcccaggccgatgatgagggggctgtccttgcgggcggcgaggatgcggtccgggaagcgcgtgcagagcacgcccagggcataggcgccctcgagctggcgcaccgtggcgcgcacggcgcccaggatgtcccgctcggtcttgagcgtctcctccagcaggtgggcaaagacctcggtgtccgtctcgctctggaagcgatagcccttggcggtgagcttttcgcgcaggggggcgtagttttcgatgatgccgttgtggacgaccgcgacctccccggactgggacaaatgcgggtggctgttctcgtccgagggttcgccgtgggtggcccagcgcgtgtggccgatgcccacgctgccggaaagcggcgtgctctccagcttccggcgcaggcagtcgagcttgccgcgggccttgacgacgtcgatctcgccgccgcggagcaccgcgacgccggccgagtcgtagccgcggtattccaggcgctttaggccctccatcaggatgcccacggcctgatcctttccaatatatccgacgatgccgcacatgtgcgcaaaacctccttgcgtttttttggttgaaattcccccgaggggtatgttaaaatcctattattgagcgaagcacttcatacggaaaggcggttgcaattccatgaaataccctcccatcatgcggcaggtgccgcacatcgtccacggcggcgactacaaccccgaccagtggctccgggaaaaggacgtcatctggaaggaggacatgcgcctggccaagctggcgggcctcaactcgctctcggtggggatcttttcctgggcggcgctggagcccgaagagggcgtctacgacttcacctggctggacgagatcctggacaggatggccgacaacggcctgacggcggtgctggccacgccctcgggcgcgcggccggcctggctgagccagaagtacccggaggtgctgcgcgtcaacgagcggcgggagaagatgctccacggcggccggcacaaccattgcctatccagtcaagtataccgcagaaaggtacaggaaatcaatacgctcctggccgagcgctataaggaccacccggcgctgggcgcctggcacatctccaacgagttcggcggcgagtgccactgccccgcctgccaggagaacttccgcctctggctgcgggaaaagtacgacacgctggacaacctcaaccacgcctggtggacggccttctggagccacacctacacggactggagccagatcgagtccccctcccccatcggcgagcagtccgtccacgcgcagaaactcgactggaagcgctttaccaccgatcagttccgcaagtggtaccgcatcgaggtcgagcccctgaagcgcatcacgccggacgtgccctgcacgacgaacctgatgggcatctacccgggcatcaactactttgacctggcaaaggacctggacttcgtctgctgggacagctatccccagtgggagagcacggagaacgacatcgccaccgcgcagttcttttccttcgagcacgacctgacgcgcgggctcaagggcgggaagcccttcttcctgatggagagctgcccctcagccacgaactggcggccctatgcgcggctgcaccgccccggcgtgcacgcgctgcagtccatgcaggccgtcggccacggcgcggactccgtgcagtacttccagttccgcaagagccgcggctcctccgagaagttccacggcgcggtggtggaccactgcgggcacgagcacacgcgcgtgtttgccgagatcgcggacctgggcaagctccttgcgcagatggacgacatcgtcggcaccacggtgcccgcgcgcgtcgccctggtctacgactgggagaaccgctgggcgctggaggacgcgcagggcctgtgcaacgtcaacaagaagtacgtcgagaccgtcatggaccactacagcgcgctctggcgccgcggcgtgagcgtggacatcgtggaccaggcgagcgactttgccggccacgacgtgctgatcgcgcccttctcctacatgctgcggggggacttcgccctgcgcgtggacgagttcgtgcaggcgggcgggacgtttgtcacgacctacggcacgggatacgtcgacgacagcgacctctgcttcctcggaggatttcccgggccgctgaagaagacgctgggcctctgggccgaggagatcgacgtcctcatgccgggcatggagaaccacgcgcagctggacggcgcgcgctatgcgctgaccgactacgcggagctcgtccaccccgagggcgccaaggtccttgcggcctacgaggaggacttctacgcggggatgccggcgctgacggtcaacgagcgcggccgcggcaaggcctactacgtcgcggggcgctttgaggatgcgttcctggacgccctgtacggaaagatccttgcggatgcgggcgtgccggcgcacgcgctgcccgcaggggtcacggtcgccacccgcacggacggcgagacgaactacgccttcgccctgaactttgcgcccgaggcgcgcgaggtcgagcttgcgggcacggacttcttcacgggcgaggcggtagagcgcttcaccctgcccgcgcacggattccggatcgtaaagaccccggtttagcccggttttccgccaaaaaaacaggccggcctccgccagggcgcgcgggggccggaaaacgggcgcaaaaaagcgcgggcaaaaattttcgaaaagttcaaatttggcccgtttgatgattgaaattctattccagttgtgttatgatatctgtaacaattttgtaatcgcactcgtccgtcctgcatcccctacgtcatgatagacgagcgtcggtgccggattgtttcgtccaaatcagcgcaatgtgtatttggtcactcaaatcttttgcaaggagcgattcgtcatgaaaaagtccctgatcaaatccctgctgcccgttctcatcgtggttctcgccctgtccatgatctccatcacggtcgtggccgacaactacaccggttacgtctacgatcccgagaatccctgcgagaccatcgaccagatcaagtacgacggcctgaaccgcgtcaagaccgccctccccgacgaggaaaagcccggcaagtacgacggcctggacgaagagaagtacgccctggaggacgaggagaagcccggcaagtatgacggcctggacgaggagaagtatgccctggaggacgaggagaagcccggcaagtacgatggtctggacgaggaaaagtgcgcgctggagcccgctgaggacaacggcaagtacgacggcctggacgaggagaagtacgcgctggagcccgctgcggcgtctgccaagttcgacggtctcggcatctccggtcagcccctggaagcctgcgtcaccgagaagtacgacggcctgaacgaggacaagaccgctctggaagcttccgaggacaacggcaagtatgacggcctcaacggcgacaagaccgccctggagcccaccgaggacaacggcaagttcgacggcctgcgcgagcccgtcgtgtgcccgcccgtggattccgtgatcgaggacggcctggcggatgacatcgacggccttgcctaatcgatacaagactgcaaaaaggaccggatcgctccggtcctttttttgcgcctttgtttaccgctcctccgggggcagcacgccgccgaggtcgaaattcgggacgtactcctcctccgccgattccagctcctggaagaacccgttttcgatggggctgtccatcaggtattgcgcgacctcgtcgtactcctcctgggcgagcctgcggttgatctccggatagcgcacggcgtccccgcagggaatgtactgcgccatgagcgaaaagagcacgctccccttttcgaagtgctcggcgacgtagtcgatgacgtcctttgcgctgtcggtctggcccggcaggatgaggtggcggatgagcacgccctttttgagcaggccgttctcgtcgtactgcacggggccgacctggcggaacatctcgtcgatggccgccttggccacctcgaagtagttgggcgcggcggaatagcggcgcgccggcagcgagtaggtgtacttgaggtccggcaggtacacgtccacgatgccgtccatgcgctgcagcgcctccaggctgtcgtagccgtgggtgttgtacaccacggggatgcgcttgttgtagcgggaaaacgccttggcgatgaacggcacgaagtgcgtgggattgaccaggttcaggttgtgcgcgccctggtcagccagctcgtcgaagatgtcgcgcaggcggtccaggtccacggccacgcccttgcgcatgtggctgatctcccagttctgacagaaggcgcagcgcagcgagcaccccgtgaagaagatcgcgccggagccgttcgtcccgctgatgcagggctcctcccacttgtggagcatgaccttggaaagaaaggccgtctcgcccatggtgcaaaagcccgtctcgttttcggcgcggtccacgccgcagcggtggccgcaaagggtacaaatcatacggaaaacctccccaaatggcgaaaatacgcttcttccattatagcaaagcgcggggcgcggcgcaaggcgtgggcgcgtttcccgcgctttcgcgcgctgtccgtcccacggagcgctacgctcggggggtgaagggagggaggtttttttatgacaaacgcggaagtactggacaaggcgatccgctacctgcgcctgcggtgcggcgcggcctaccgcgccaaggacgacgatctcctgctcaagatcgtgcccgttctgtgcaaggccgtggagatgcagcagaagctctccggcgcggaggacgcgggctgcatggagatcgtcctgcgcggggaggaggcgctggccgccgatgcgacttgaggtcaactactcgcccacgccgcgccagcgcgccttccacgagagccgggaggacgaggtgctctacggcggggccgcgggcggcggcaagaccacggccatcgtgatggacgcctttttgcgctgcgcgcggcatcccgggaccatcgcctacctcttccgccgcacgtaccgcgagctggaggacacgctcctgcccgaggcgctgcggcgcatcccgcgcccgctctaccgctactccggccaggggcacgagatccggctgtgcaacggctcggccctgcgcttccggcactgtcagaaggatgtggaccgctttctctaccagggcgcggagatccactggctctacatcgacgagctgacgcacttttcgcaggaggtgtacgagttcctccgctcgcgcctgcgcgcgcgggcggacctgggcattcgccccgtcgtgcgcgcgacgagcaaccctggcggtccgggccacgcctgggtcaaggcgcgctttctcgaccccatgccgccggacaccgtgcgcacggagcgcgtggaggccgcgggcgtcgccggggagcgcacgctgcgctacatccccgcgcgcgtgcaggacaacccccatctggcgccgggctatgcgctggagctggccgcaaagcccccggcgctccgggacgcgctgctctacggccggtgggacgcgttcgaaggccaggtgtttaccgagtggcgggacgaccccgcggcctatggcacggggcgcttcacgcacgtggtcgcccccttccccatcccggagagctggcggcggtttcggtcgttcgacttcgggtattcgcggccgttctccgtgggctggtgggcgctggacccgcacgggacgctcgtgcgctatcgggagtggtacggctgcacgggcgtgcccaacgcgggcctgcgcctgacgccgacggccatcgcgcggggcatcgccgaggcggagcgcgcgcacgagcgtggtctcctcgtgacgggctacgcggacccctccatctgggacggctcgcgcggggagagcatcgcggaccagatgcagcgggagggcgtctacttcctccccgcggaaaacgcgcgcctggccgggctcatgcaggtgcatcggcggctggagttcgacgccgaggggcgcagcggggtgcaggtcttctccacctgtcgggattcgatccgcacgctcccggccctgagctacgacgcgcagcgctgcgaggacgtggatacgcagggcgaggaccacatctacgacgagtggcggtatctcttcatggcccatcccctgccggaagcgcccaagcccgcgccgcgccggcgctactcccccctggactgaggactcaggcgcagggggcgctgcataggaatggtgcggggcgcgtgcgcccggagaaaggagaagcatatgcaccatctgggagagagaacgcgccaggcgctccgcgcatcctgggaggaagcgctggtcctggcggggaagtatgcgctctgggcgcgcctggccggcgaagcgggcttggcgcccgtccaggaggagtttcgcgcctgcgcgcggcagacgctcacgcacgcggaggtctggctgcggtgcctggccgagggaagggcgcccgctgccgccgatgcgctcgagcaggccctgcgtgcggagcgggcgctctggtcggatgcgctgcgcgcgcgggcgcgggctgcgcggggcgaagggcacgcggacatcgcggaccttctggagcgcgcaggggaggtttcctgcgcccgggaagcgcgcttgcagatgctctatgacgaggttcgcgccggggaggtctacgaccggcgcgagcaggcggtgtgggtctgttcccactgcggttgggcgcatctctccgcccgcgcgccggaggtctgcccgctctgcgggcacggccgggacggttttcgccgcgccccgcagtgaggcgcgcagtgggtgcgcggacgccgctgggcgggcggggtggggcgcgggacgctgcgtgggcgcgcaaaaaaggccccttcgaacggctttgcagcggttcgaaggggcttttcttcgtggggaagccgagcccagggggcgggtgggcggggcccggagcgcgtcgggggaaccgccctcagcgctcctccttgtagacgtgtttccggtcaaaggcgatgtaggcgcggccgtagttgcggcgccaggcagcctggggattcccgtgcatgtcctgccagtcgtcgtacttctcgggctcctgcaggatgaggccgctcagggtgaccatgtcgtccaggagctcgacgggctggggcgtctcgaagtggccggggtacagggcgtcgaactcgcccttgcgcgcctgcaggggcagcaggtgctcgtggaaggcctcgaccgtgcacagctcgccctggccgaagaagatcagcgtgggcgtgcgcacgagggagtcgccggtgaagagcatgcggcgcttcttctccagcaggcagatgccgccgggcgtgtggccgggcgtgtggaacacctccagctcgtggccgccgcccaggtcaaagacatagcccgcctcgatcggcacgagctcgcaggggccgtccgggacgtagtcgtcgatcgtgtagccgcagccctcgggcgcgtccatgaagcggcgcctctgctccggctcgttggccgcctggcccgcttccaggtcgagcgcgtggatgtagacgcggtcaaactgcgggttgccgagcacgtggtccccgtgggaatgggtgtccacaacgagcaggggcttgtccgtgagccgctcgcagagcgccttgaggtcccccacgccaaagcccgtgtcgatgagcagcgcgcgctccgcgccctcgaccaggtagcagagcgtcgggcagccgccgggcgagagcagcgaccaaacgccgtccgccagcttttccacttccacaaacggattttcttcgtatctcacagcaatccctccagatagcggatgctctccgccattttcgcaaagtggtcgcgcgtgccctcgtgcgggccgtactccacggtgacaaagcccttgtagccggtcttctcgatcatgggcaggagctttgcaaagtccacgacgccctccccgtgctgggcgttccacatgcggcgcccgtccacgtccacgtcgcccgtggtcgcgttctcggggtactcgatgtccttgaggtgcacgtgcacaaagtcgccgaggaaccgctccgcaaaggcgacggggtcctccttgcgggcgagcgtgttgcccgtgtccagcacgagcttgaggcccggcgcgccgtccagcagcgcgcgcatctccgcggagtcgcacatgggcagcaagggcgaggggaagtcctccaccatgacggtgactccgtattccgcggcggcgctcacgatgcgcttcaggccctgcacaaggcacgcggcggcctgctcgcggctcatcctggccaggtcttcgggcacgacgttctccacgatcatgagcttgtccgtgccgtgggccagggccgtgcgcgcggcgcggcagccgctctccaccgcggcgcggaaggccgcgtcgtccggcgtcgtcaggtgcacccaatggatgtagtcggcaatctgcaggccgttttccgcgcagaggcgcagaacctcctcgcggggcgcgaattccgcgtcgctgtccgaggcgtcgtaggcgacaaagcctgcggcgcgggcgcggggaatcatttcggcaaaggtcagcttgcccctgcggacatcgtccaggatttgcagggacataaaggtccagttcatctttggctgcatggatcaaccctccctttgcctaccagtatacccctttttggcccgcctcgtcaacgctgcgcggcggcgcgcttctcctcccggagcgcatcggcgaccggggcccagttggcggcggcctccacgcacttgttggagaaggcctccgcgctctccgggctcatcaggtccgtcgagcgcgcgccggagcggtccaccatggcggtgagctttccggggttgtccagcacggggcaggggcgcaggtggttctcgttgaagggctggccctggtggtacgcctggaacagcgggccctgcagggcctccagcagggtcttctcccggatgttggagtctgaatagtggatgaaggcgcagggctccacatcgccgttggcgttgatgtgcaggtatctgcgcccgccggcgatgcagccgccgacgtagtcgccgtcgttccagaagtccatggtgaacagcggcttggtgttgcggaaggcgcgcacgctccggtacatggccttgcgctgctccgcggtcaccatcaggtcgggcacggcgtccgagcccacgggcatataggtgaagaaccaggcgaacttggcgccccactcgatcatcttgtcgaagtaggcctcgctgccgatggtctcggcgttggcgcgggtgtagcagcaggagacgccaaagggcagccggttctcgcgcaggatgcgcatggcctccatgacgcggtcgaacgtgccctggccgcggcgggcgtccgtctcctgcgcaaagccttccacggagatggcggggacgaagttcctgacgtcgagcatctccttggcaaaggcctcgtcgatgagcgtggcgttcgtaaaggccaggaacacgcagtcgtcgtgcatgcggcacaggcgcaggatgtcgtccttgcgcacgagcggctcgccgccggaatagatgtagaagtagacgcccagctccttgccctggcggatgatgccgtccagctcctccaggctgaggttgagcttgttgccgtactccgcggcccagcagcccgtgcagtgcaggttgcaggcggaggtggggtccatcaggatcgcccaggggatgttgcagttgtacttctcccgcgccttctcctgcttctcccagccgatgaagttcgcgttgagcaggaaattcgtaaagatcttcttgagcacttcggagtcaatatccgtccaaagagaacagagcaggcgattccagttgttctcgggatcgtttacgacgcggcgcacgacatcgcgctgcggagcaaaggcatcgccggcaaagcgatccaccaattccatgagcttggggaggttctgcacggggtccttttccagatagcggtaggccgtttccagcccggccgcggcaatgcggttcttgatttccatgattccggctcctttccgttttttcactggaaaaaagtatagcgaatccccggtagaacatctatagacagaaacggggaactgtgcaatttttacacagttccccgtttttgccaaaaaacaggacggtttgtcgaaagtgtcaagctttctcctccgcgaacgcgatgcgctgtgcgggcacgggcacaaagcagcgcagggcctcggcgcggacgcggtccgcatccggcggcacgggcgtttgcaggagcgcgtcgcgcagcggcaggccgtgggggcccacctccccccgggagcgcaggaccgcgacgctcgtcgcgccgccaaggccccggggttccggcacggcgtccaggtgcgccgcgtcgaagaagtcgagctgccggttcccctcctcctcatagacgatggcgggcacgcgcatgccgcgcgggcagaggcgctccatgtcctgctggagggacgcccaggcgcgcgggtcggcgtccctgggcatctcgcgctcggggttgaggtccaccagctccacgctgtggacccagaaggtccgtttctcccccgtcgcagcgtcgaggtaggtgtgggccgcgccgccgcaggggccgacgggcaggtcgaccgcgccctcgcggcaggcgtgcaggatgctgccctcccgggtgtgcagggcgcggagctcgccctccggcaggcggtcgaactcgcccgcgagctgccaggcgcacaggcgcagcagggagaagttctcctgctcgatctccgggtgcggcacgtaaccggcccggaggatctccgccagcaggaacaggtcctccgtggacgcctcctccagggaatcgaagttgccctcgtcgatctcgtacgttgcctcgcccagctccacggcggcgacgctgtcccaggcgtcgtgggcggcgctgtcgcagcgggccaggatgcgcgcgcggttggtcgcgcggcgcgggaggggcggctgcgccaggctcccctcctccacgcgctcgaccgcgcacagcacggcgcgcgtgccctgtcgcagcaaggccatggcactgaccagcgcgccgtccgcgcgcgcagatccggcgcagaggcgcagctcgtccaggtgcggcaacgcgcggcgaagctgatggaaattcataggcgctctcctttccatgcaaaggggcgccgcctcaggtggacggcgcccctgtgttcacacttcctcgacgaagtggtcggggtaggtgttccaatatccggggtaggttgggacctccgacgcaaagtcaatctgccagaggcggaaggtgacgatctggtccttgggctgcacgcgctcgacgtaggaatagcggtaggtcatgccgatcttgcgcatgacgccgccgcttgcggggttgtgcacgtcgtgcgtggcggtgacaaaggcgagacccgcgcgtcgggcctccgcaaggacggcagccgccgcctcggatgagatgccctgcccccagtgcgcgcgggcaaggccgtaccccaggtcgtaggccgggccctcggccaggctgacatagccgatgggcgcgtccccgccccgcaggcagacggcgtaatggacgcccgggccgccgatgtagcggctgcggagcatctcctcggcctcggcgagggtctgcgtcgggaaccagggcaggaaggtgttgaccacgggatcgcgcaggagcgcgtacatgggctccgcgtcgcgcagggcaaaggggcgcaggcgcaggcgcggcgtctccagctcccgggaaaggttcatcgtcactccgcggccacctcctcgaccgccttggccttcgccttctccgggtggcagatcacgctgcggcgatagcagatgaacagcaggatgctgcacaccacccagcccatgggataggccagggagacgccgaggaagctgttgtcaaacgcaacgcggttgacgagcaggtagacctggcggaagacgacaaaggagcccagcatgacgatcatcgggatgttcgcattgccgacgccgcgcagcgcaccggcgtagatctggttgaagcagctcatgatgtaaaagggcgagatgatcatgatgaagcgggtgccgtac

SEQ ID NO: 2521 - DNA, 9671 bp, Unknown
  16S sequences of unknown bacteria
tttttcaccaccaccattcattttcggggttgacttttaatagttaatctttccagcggatgtgtggctgttgattttatgatacagcagagaatgacacaaagcaacctggtttataggccatcattttacaaatcggctaagaaagcggcaaaaagctgtgttacaatatttctatacgataaaacaaaatgcagtaaaggagaaaaagccaatgatccctctttataccgcggaagaaacccggcgtctggagcagatgacctatgaacggggcatttcctatttgcagatgatggagaacgcaggaagagcttgctgtgagaccctccaggcccagtggggcgtgggagacaagcgggtgtgcgtcatctgcggcaaagggggcaacggaggcgacggctttgtgctggcccgccatcttcagctgcggggagccatgccttttgtccttttgcttcaggaacccacccatcccgatgcccaggagatgtaccggagattgggcagcatcccggtgtaccggctgcccatagaggaagcagagctggaaaagcttttgatgggcagcgatatcatcgtggatgccgtttacggcattgggatgcgggggcagctgccgcctgcggtggcccatatcttttccctgtgcgggaaaagtccggctcagaaggccgccatcgatatccccagcggtgtgcggggagacgacggcagccgggccgaaggggccttccaggcccaggtgaccatcgccctgggatgctacaaaatcggccatttctcccagccaggcagtgaaaactgcggcaaagtggtgctgcgcagctttggagaagaggaagaagaccgggaaaactgcgccacccgggcttttaccgtgacgccccggagctgcatttcccttcttccgccccgggacccggcgggaaacaagggcacctttggtaccgctctcaacatcgccggaagccggggcatgagcggcgccgccattttgtcctccaagggggcgctgcgctgcggcgtgggactgctgcgcctggccgtgcccaaaagcgttctgcccattgccgccggagcgatggccgaaccggtgatgatggggctggaggagagcccggagggccagagcatctggaatgaagatctggcccagtggagccagaaggcttcggccattttggtgggatgcggcctgggcaccgggttggaaggcggtcagctgatgcagaatctgctggcctgccgcaaagcgccgttgatcgtggatgccgacggtatcaatattctggcaaaatggcctgaactgctgggaaaagcgggagaaaatctgctgtttaccccccatccgttggagttttcccggctcaccggaaaaagcgtggaggagatccagcagaaccgggcggcggtggctttggagtttgcccaaaagaccggggcggtgctgctgctcaagggcagccgcacagtggtggcctctcccgatggccggttgtatgtgaaccggacggggaacaccggcctttccaaagggggaagcggggatgtgctggcggggatgatcctgtcctttgccgcccagggtgtgccgttgtttgaaagtgcggtattggggagctgtctccacggaacctgcgccgatatgctggccctggagcggtcggtttacggcatcctgccttccgatattccggagaacctgcctttccttttgaagcggctggaaaagctcgaggagatgcctttgggctagcagagggagctacaaagtcaaaagaacaacgggaacttgccctttttgctgaatatagaggaaaagtctgcggatgttgcgtctgctcttgacagcacccggaagagggggtaggctctttttgcggcagtgccgcagaaagagaggaaatatccatgaaattatcggaaaagcaaggcggcgtgctgctcatgctgctttcggccctgtttttttctgccatgcaggcggcggtctcttattccggcagccgtattccggtgatggaacaggttttttgccgcaatctgatcagcctggtggtggcctttgtgctcatccggaaaaacaagctgtcccttttcggagataaaaatgtgcagcctttactctttggccgatccttttttggctttgtaggggtggtttccctgttttatgcttccagtcatgcccgtcaggccgatgtgagcattctgagcaagatgtcccccttcctggttacactgcttgcctgtgtgttcctcaaggagaagctgtccaaggttcagctgcccgcccttctcctggcttttgccggtgtggtcatcgtggccggacccacttttcattcggatttcctgcctttgtccatggcctttttctcttcggttacatcagggatcgcctataccttgctccgttattccaaaggtaaaaccgacggcatgacggtgatcatgcacttttccacctttagcgctgtgtgctccattccctttatgctgggcaatttcgttgtgcccaatgccaaggagctgatggctctggtgctcatcggcctgtttggttcgctgggccagatcgccctcacctatgcctatcggctggctcctgcgggagaagtgagcatctataactattccggcatcttgttttccatggtgctgggcttcctttgcctgggagaaaccatcccggccacttcttttataggaggggccttggttattgccgcctcgctattggtgtatgtctattcccgccgacaggaaaagaaacaagcataacagaaaacgaaaagcccctctggacattccgcctttccctcagactgtcgaaaaacctatataacgaaaagggtcgtccgccctacccctatcaatccgcaaaaagccgcgacctgtgcgtggctttttgcacttctcaaggggcaagtgtgcgccaaaggcgtgcatacagccccttgcaaaaactcgaaaaagtggcctaagccactttttcgacacgctcaagcccctctggatgttccagaggggctttttgcaaaagcaaacattttgtgaagggccttgacaataggtgactactatgatagtatatcctcgtaatctcactattgcaatagtcattacacaaggagagacaaacaaatggaaggaaagctctttgattccgaacggaaagtgatggaggttttgtggaaggaaggggatatgaccgccggccagctggccaagcggctgctggaggaagcgggatggaaccggaacaccacctataccgtcatcaaaaaatgcatcgcaaagggggccatcgagcgccgggagcccaactttttctgcaaagcgctgctcacccggcagcaggcccagcgccaggagacccaggccctgatcggccgcttgtttcacggttcggcggaagaatttttcaccgcttttctccgggatgaaaagctgagccgggaggagctggcccgtctgcgccagttgatcgatgagaaggaggagcaatgacattgcagcaaatcctctcttggtccctgcggggcagcggcctgattctgttggggatgctgcttctgcggtggaaacaaaagattccggccaaagggatgcttcttctatggcaggccgccattttgcgcctttgcctgccgggacagatttctttgcccgcgccctggatggaggcaagcgtttcccggaatacagcaggcggagggcagatgtggacctggatatggctgtggggtgttttctttgcaggcatggtgacggtttttcgatggaagcgggcccggagccttctgaaaaaggcccggccctttcccgatgtcttttgccatcagtggatcgccggagggacaaaaaggaaagtggaagtactgctctgtccgggcatcaagaccccgttggccgtagggctgctgcggccccgcatccttttgccccagaatatggaccggcaggacaaagaccggctccgctgggtgctcacccacgagatggtgcacatccgcagatgggacccatggtggaaagggctggcgcttttgtgcagatgcctgcattggtttaatccgttggtctggcttttgcccgcttttctggaaggagccatggagcgatcctgtgacgaagcgtgtctggagcgtttgggctccgggcaaaagaaagggtatgccttggccctgctgtccctggcggaagagcaaagcgccttttgggaaggggcctgcggctttggaacaagtggattggaagaaaggatcggtttgattatgaattacaaaaaaatttcccgggttacagtaggtctgtgtgctttgggcgtgtgtgccgcagccggtgtgtcggcggtgggcctggtgccagaagaaagtagctgctataccatgaaaatgcaggacgatcaggtggtatttgagccggtttccggcggccagacaggggagaacctgtatctcatggaaaagacagaggaaggcttccttttgcgcatggcggacaactaaaggtttctttggcccccggcttaccgggggtcaaagtatgtctgaaaaccgatgtttcctgctttgtttcatcgaattgtctgggcctcgggcagtatgggagtccaggcactggaccgggggcttttttctgccaaaatatccccttctcttgcggcatagagcaaaaaaaggtataatcaaagcatcttattttgttcgggaggtgccccatgaggaaggacaacaaaaagctgcggcgcatggctgcaggttctttggcggccgtgatgctgctgggcagcgtttcggcagctggttttaccgataccgatggccattgggccaaaagctatattgacagtctcagtgcaaaagggatgatccagggctatgaagacggttctttccgtccggagggccaggtgacttatctggagaccctgaccttcgtctcccgcctgtacagcctggagggagtgcccaccgataccatcgtgaaaaagtggcagcctgtgatcgaggatgccatgaagggcagcgccgcctggtcttataccaacctggctctgtgcctggaagcaggggtgctgacccaggctgaattgcaggagctgacggcagaagggcagatcaatggggccgcaagcagagaggatctggcggtctatctcactcgggccatgcagctggccccggtggccgccacgctgcgcacctattccctcactttccccgatgcggccaagatctccaaggacgccatggcttcggtgtacctgctcaataagatcggcgtcatcgaaggcatggacgacggcaccttccagccacagggcaaggtgacaagagcccaggtggccaccatgctctcccgggccatcaattatatggaggccaatggcctggaggcggtattccccaactacaccacttacacctatgagggcggcaccgtgatggcctgcacccaggaagaaagtggtctgaaactgactatccagctgcctggcggggagaaccgcaccatttcggtgccctccagcgcgctactggtgcaggatgggaccaaaaccaccggacagaacatcatggccggtgcctttgcccgggtccgttataccgcagccgacaaaaagacagtgcaatcggtatggctgctttccagccccaaaaccgcagagggcacagtgcagcaggtggatgaaaactacctggtcatcaaagacagcgccggagtcagccgcacctatctgctggatcgtctgacccaggtgtgggccgggggaaaagtgggcgaccggagcctcattgattcggaggccgggtatacatacgccgactgcaccaccgatggcacaggacgcattttgtccctccacctccagggcggaggatataaagaagagggcattttgacccaggccagcgatggccagctgctgctcaccggtgtttccggcgctctttcccggtatagtttgcccgccagtgcatccattcaggtgaatggcgtttcgggtgctttgaccgaggatctggtgggccggtgggtcactctgcgcctctcctatgagaacgatcaggtgactttcgtttcggtggacggcaaaacccaatatgtgcggggccttctggaaagtactgcatcctatcagggcagtcagaccatccgcatcaccgttgtgtccaccggtgagagtgtgggctaccgtctcgtggccaactgcccggtgacctatgaaggaaaggagaccactctttccaccctgaacaagggaagcttgctcaccctgaagatggacggcagcgaagtcgcccagatccagggggcttccggcagctggacggtcaccggctccatggcccagctcacctttggcgataatatcctgctggaagtgcagccggaaaacggcccttcccagctgttttccttggaaaccaaaaaccttcccgccatttatcgggatggggagaaaagctccattgaccgcctgtccagcgccgataccctgacggtggccgtggtgggaggcaaggtgtcccgcatcgatgccaaaacccagagcgtcactgtgacgggcacagtggaccgggtgtcctttgagtcccagggcaatctgctttatctccgggcggccgatggcaccgtgcagagctatgtgctttccgccggtgttcaggtggtgcagggcagcaccaatatccagctctccgatgtggtgggtggacaggtgaccatgacggtggtcaacggcctggtaacccgggtggaactggatgattctgccgcagctgccggagaactcaccggcaaggtgctgtatgtcaacgcaggcgaccgggtgatcctgctggaaagcgacaacggccagggacgggtgtcggtttcggtgcccacttcggccaagatcatgcgggtcaccggtaccacagtcagcctgaacagcctggaagcaggagccagtctccagattttcggcagctacaagggcgaacagtttgaagccaccatggttttggtgaaataacaagggtcttccaaaaaagcgtggagaactccccgctttttggcggaagggcctgggaaagcttcaggcccggataaatgaacagctgtccggaaggatggctggaaaaaagaaagggatggatcgtaatgttggaaacaatcgccacaaaggccgtggaacaaaatgaagcggtgctcaccgatcttgccaagaagatctgggactaccccgaaacggcttttaacgaagtcaaggcctgtgagtggacagctcaggtgctgagagacgcaggcttccaggtggaagtgggctgcgccaatctgcccacagccattcgggccacttggggaaaaggccatccggtcatcggatttttgggcgagtatgacgctctgcctggcctgagccagaaggtgagcaccgaaaaagagccggtcactcctggcgccgctggccagggctgcggccataacctgctgggcgtggcctgtgtgggtgccgctctgggtatgaaagctgagctggaagccaccggcaaagagggcactgtggtcttttatggctgccctgcggaagaagtgctcaccggcaaggcctttatggccagagaaggggctttcaccgatctggatgtggctttctcctggcatggctccagcaccaacaacctgtctgtgggcaccatgaccggcctcaacagcgccattttccatttcagcggcgtcaccgcccatgccggcggcgatccccacaacggccgctccgctctggatgcctgcgaactgatgagcgtgggcgcaaactatctgcgggagcatgtgaccagcgatgtgcgcatccactatgtctataaagaagggggcactgctcccaacatcgttcctgacaaggccagcgtctggtactatgtgcgtgccatgagccgtcaggccatcgaggatacctatgcccgcctggtgaaggtggccgaaggcgccgcccacatgaccgagaccaagctggatgtggagttcctgggcggctgctacaacaccctcaatccggtgatgctgaccaatctgacccatgatgtgatggagcagattgccatgcctcagtggaccgaggaggagaaggcctttgccaagaccctcaacgaaaagagccagcagtatgaaaaagtgaaggccagcggcgtgctggagaacggtcctctgtgcacctttgtggagccggtggaaaagcgggatggctatggttccactgatgtgggcgatgtgcagcacatcgttccctgtgttcaggtgatgaccgccacctgcaacctggctgctcccggccatagctggcagattaccgcctgcgccggtatgagcatcggcatgaagggcatgctctatggcgccaaggtcatggccgccaccgccatgaagctggtggacgatcccaaactggtggagcaggccaaggaggaattccagcagagcatgaaaggccagagctataagtgccccattcccaaggaagttcccattccccagcctcagaaataacaatgtgcagccgcccggcaaaaaccgggcggctgagcgtgtcgaaaaagtggctgaaagccactttttcgagtttttgcaagggtctgcgtgcagccgattaaccgcttttagcggctaatcggccacacttgtcccttgataggtgcaaaaaaccacgcacaggtcgcggctttttgcagattcataggggtagggtagacgatcttttttcattataatataggtttttcggcagtctgagccgcccggcaaaaaccgggcggctgttttgctgccgggaagaaggggagaggaaaaagaaaaaattggcgcttttccccattgccagaaaaaagcggaccatgctataatgcttgcgaaaaaggaaaagggggcagaaagaatggatctggatactggaatctttgtgtttgaaattctaggagtcattgcctttgctttttccggggctattttagccattcgaaaatgtatggatctgttgggagtcatcgtcctggccgtgaccaccgctgtgggcgggggaatcatccgggatgtgatcctgggaatcaatcctcccatggcctttaccagcccggaacagaccgccattgcgtgtctggtgtcggtggtcattttctgtgctgtggcctattgtcagaagaaaggcatcgacagcctgtttcacaagctggacctgtatatgaccatttttgacgccgtagggctggccgcctttacggtcaccggggtttcggtggcccatggcaacagcgacgggtacaatctcttcctttatatcttcgtgggcaccctcaccggtgtgggcggcggtgtgctgcgggatgtgatggccggtgtgatgccttccatctttgtgcgtcatgtgtatgccctggcttctgttctgggagcggccgtgtgcagtctgctgtggcatgtgaactcggccttggccatggtgctgggggccggggtggtggtgctcatccgggcgctggccatccattaccactggaagctgccccgcattaaaaatccggacaaggttggcatcaaataagctgaaaaagcaaagcggagaggatgtgaagtgaccccaaaaagttagacaatatttctatcaaaaattgttcaagcag

SEQ ID NO: 2522 - DNA, 10567 bp, Unknown
  16S sequences of unknown bacteria
cagcgtcagatgtgtataagagacaggctccacatgatactgttcgatcaggggacggagctgggcgatgatattttccggcgtgtaggcgtttactgtagtggtataacctgccaacagtccggtgggatctgaaatggcgaccccggtatgggcatcgccataatcaatggccatgatgcgcatgagcggaacaccttccttttgtacctttttgtattttctgcggatgttttttgccgtagtttcttctcatactatactgaatttggagctgttttgcaatccggaatcgtttatcttttccggcaaaggcagggcgcgttccccggtgctgccttcagcggttgctcttgagggcgcggcaatgatgtgatacaattattatataattaaacagggttaggagcggaggcagaaatgaagagaggaatacagtttgcgggcattatgctgcttgtgttggcgttggcgtgtttgtatgtaggggcagagggccttcttacgatccgtccggcagcagcgtacgaagatatgggagtgcatactttttctccttatcagacttaccccacgcaggtgaaaaataccgccggcggccgccagggacggctgcatccgacgaagaccgtttatctggtatactaccgggcgacggatggatcggggtatcagtggaaggatgaagtccagtaccgaaacacggcggaaaagatggtggcggcaggagaatgtgtggaacggcgggtgctgtctatccgggaaagcggaaaatatatcacggtcgaaggtgatcagaccgcggggagttacgtattccaccagcagcggcgctacgggggaatggtcttgctttccgctgcctatctggttgtatatggctgtgtgtggtttagcttgatccgaaagcggcgggcggcggcgcgttgattccgggccggccagcggaggtcccgagaaaaaatcttgccggaaaaagaaaaaaagatttgacgctgcgcaaaagatatgatatagtgttcattacctatgaaagaagggctttctttttgcgcgcatttttcgctttttacgcgcagaggggaaagccctgtctgtagggaggcagaaggcgcccgtgataagcgggcggccaataataaggaggtgccgttagatgcgcgttaaaatcactttgagatgcaacgaatgcaagcagagaaactacaatactttcaagaacaagaagaacgatcccgatcgtctggagatgaaaaagtattgccccttctgcaagaagcacacgccccacagcgaaaccaagtaatgctggcgagcgtgtaaaagaaagggtgtgtattttttaaatggctgaagaaaaaaagcctgctcccaagaaggccgacaagaaaaaaggcggcattggtcagtggttccacgatatgaaaggcgaaatgaagaaaatcgtgtggcccacaaaggagaccacgatcaaaaatacgggtatcgtaatcggtatgtgcgccgtggtgggtgtgttcctgtgtgccttcgacggcatcgccggtacgatcgtttccacgctgttcacagtgttcggctaaggagcggggcatggcggaagcagcaaaatggtatgtggctcatacctattccggctatgaaaacgccgtgaagaccaccattgaaaaatatgtgaccaaccagcatctggaggatctgatcctcgatctgaagatccccatggaaacggtcacggaaatcacggacagcggcacgaaggagatcgaacgcaaggtattccccggctatgtcctgatcaaaatggtgatgaccgatgatacctggcatttgatccgcaatatccgcggcgttacaggttttgtcggcgctgagaacaacaaacccattcctctgacggaggaagaggtattggatctcggcattgaaaagcacgaaatcgtcgtcaagtatgctgtgggcgacaatgtgagaatcattgacggccccatgaattccttgtgcggtatcgtggaagagttggacatccccaagaaccgcgtgtcggtgaaggtgtccatgttcggcagagagatgcccgtcgagctggagcttgaccaagtcgaatctctggaggactgatccctttcgttgtaaagcgcgccgcgctttgcatacaggccggacggtcgtccggcgcaagtgggaggggcgtatggcgccccgccaaagacgcactgcccttgggcagacgtcaccacatttatcatctaaggaggtgctactaaagtggcacagaaagtaaccggttatgtgaaactgcagattcctgcaggcaaggcaacccccgcgcctcccgttggtcctgcactgggccagcatggcgtaaacattgcagcatttacgaaggaattcaatgagcggaccaaagatcagatggggatgatcatccccgttgtcattaccgtttatgctgaccgttcctttaccttcatcaccaagacccccccggctcccgtgctgatcaagaaagccgccggcatcgaaaagggctccggtgttcccaacaagaacaaggttgccagcatcagcaaggccgacgttcagaagatcgcggagaccaagatgcccgacctgaatgccgccagcctggaagcggccatgagcatgatcgccggcacggcgcgcagcatgggcgtcactgtagaagaataaacgagggacggtcatccgttccatacagtgggaggattattccgaattaaccactatgaggaggatataacattgtttagaggcaagaagtaccaaaatggtgcaaagcagatcgacaagtccactctgtacgattctgccgaagcatttgatctgatttgcaaaacggctccggccaagtttgatgaaacggtggagctgcacgtgaagctgggcgttgactcccgccatgcagaccagcaggttcgcggcgcgatcgttctgccccacggcaccggcaaggatgtccgcgtgctggtattcgccaaagcaggaaaggccgatgaggcccgcgaagccggcgccgatttcgtcggcgatatggatctggtggaaaagatccagaaggaaaactggttcgactttgacgtggtaatcgcaactcccgatatgatgggcgttgtgggccgtctcggtaaggttttgggtcccaagggcctgatgccctctcccaaggctggcactgtggccatggatgtggccaaggccgtcaaggaagtaaaagccggtaagatcgaataccgcctggacaagaccaacatcatccactgccccattggcaaggtgtctttcggtccccagaagctggaggagaactataaggcactcatgggcgccatcatcaaggcaaagcccgctgccgccaagggccagtatatcaagagctgtgttaccgcctccaccatgggccccggcgtgaaactgaacacggcaaagcttcagtaattttcttccaaaacggcgcttgacaaaccggttgtgcgccagtataatagaaaagctgaaaaaattgtattatagcggttttggccgatataataattggcgttccaaagacagcaggtggagtttactccgtaaatcctgccgaggagagtctttcatcatttttgaatgacaggcagtccttgtgtctttgcgatgcagggactgtttctttttggacgctccgaacaatccattggaggtgaaaatcaaaatgcctaatgcaaaggttctgagtgaaaagcaggcgattgtggaagcgctgagcgagaagctgaagaattcttccgctggcgttctggtcgactacaagggtatcacggttgccgaagataccgagctgcgcgctgagctgcgcaagaacaatgtcgaatacgcggtcgtgaagaatacgctgctgcgctttgcggtgaagaacgccgggatggaggagctgagcggcgtgctcagcggtaccaccgctctggcggtcagtcatgacgatcccgttgctcctgctcgcgtgatcaatgactttgccaaaaagctgaaggacaagttcggaattaagggcggctatatggatggtaaggtcatgcccctggaagaagttcaggcgctggctaacattcctgctctgcccgttctgcaggcacaggcgctgggtactatgctggcacccatcactggcttggcagttgttctgaagcagatcgcagaaaagggcggcgaagccgcacctgctgcagaggaagctgctcccgaggctgcgcccgctgaataagcggcggcgcgtcgatccctgtgcgggctttggcccgtaaccatttctattttaaaattaactttcaattaggaggtacaatacaatggcaagcgaaaaagtaactgctatgatcgaagaaatcaaggctctgaccgttctggaactgaacgatctggtgcatgctctggaagaggaattcggtgtttccgctgctgctatggctgctcctgctgccggcggcgctgctgctcccgctgaggaagctaagactgagttcaacgtggtcatgaccgctgtgggcgatcagaagatcaaggtcatcaaggttgtccgtgagatcaccggcctgggtttggctgaggctaagaagctggtcgagaccgaaaacgctgtgatcaaggaagccgctcctcaggctgaggctgacgagatcaagggcaagctggaagaagtcggcgcaaaggtcgagctgaagtaagcgatttccactggctctgcttcggcagatttatattgaaacagggaaaatcccccgggctgcaagcctgggggatttttgcgctgcgtgggaaaagatgggggatctgtagggatagaaaaagttaaggagaggggatgcttttgggcgtattaaaaatatgttttcgaatcagcaggtaatacattgtgcacacaatgatggtactggaagtggcaatcggcgttgccagagcaatgtgaaacaggtgtgcgcccgccatttggctcatgaaataggctactggcacacgcataatccatccatcccagaaagcttggaaaaagacgaaccgggtgcggcagcaaccattatagaaccccatgtaacaaaacagaatgcctacctggatacagtcaatggaaaatcctttgagatagtctgctgccgctgcaatgacatcctgattgggggtgaagatagcagccagggctgcgctgtgaaaccgcacgatgtaaaatactacaaaaccgatgccgacggcgacggcccaagcataatacaaagtcttttttgcacgttccggctgctgagcacccatattttgagcaataaaagcagacatggactgcatgaaagaaatcgggatcagcagcacaaaactgaccactttccaggcgatgccataaccggcagaaagcagcacgcccataccgttggcgatggcgttgacagccagaaaggaaaactgcgtgactaaatccttcagcgccacaggggtaccgatggaaaacaactcccggatcttttcaccgtcaaatcggatatgttttctggaaaattggaagggcagtttgattgcgcggatgataagaatggacaaaaccacactgacggcctgagcgcagactgtggcaatcgcgacaccgcgcacgcccatgtggtactgtgtcaccaatatgatatcgccgaccacattgatggcggcggcaatgaccacaaacaccagtggaaggatcgcgttgccgatcccgcggaaaatgcagctgatcaggttatatcccactaaaaacaggatgcctgcgctgcaaatcattaaataatccactgcgaacggatacgcttccggcggcatatccatcgcacggatcaggaagggagcggcgatcagcatgatcgccgtcagaagtgcgccgaacgcggcaaatacgcaaatggaagaacccatggatttggcggcgtcttcaaagtttccttcgccgatataacgtccgattgctacggttacccccatggccagaccggttactaccacctggatcatgtacataacattgccgcccgctgccacagcggcaatttccgcagcaccgcaataacggctgattacaatcaggtctacagcgctgtaaagtgcctgaagaaacatggaaagcagaataggcagggtgaaacgaataaaaggaaggagaatcggtccggaggtgaacgtattgctctgcgtcggttgtgccatggtgaacccttctttccgtcggttatagtgcacgaaaaaacgaaatgctttctgccggagagagattacgtgttcagcatagccgatcctttttttaatttggagtaaaaaatgcacagtttatcaaaataaggatggataaaattgtggattctgtgcaaaagaaacgcgattgaaaaggagaggttcatagaatgacaccccctggcggcatggattcctcacatgccgacggggggtgttttggtcatttacctgccggataactcatccattgtccaggtccagtgcgatgatctgggagagctggacgttggcgtcgctcatatggatctgctccgcttcggccgcgccgccccgggtgggggagaaggtcacgtcgctgaggactacccattgttccggctgggattcatccaccgcttccgagccgcggtatacgccctcgaaaatgccgcaggcggtgaacagccgcacaccttcgcctcgggctatctggttgtactcaatgatgttccacattcaaatttcacgcctttcgctgttttgccgtatcatagcataattttggcccgcttgcaaacagcgggcgaatttttcctgcagcgttgacaagcagggcagatggttttataataaaactgtatcgttaatcagagatgagaattcttccgggaaggccacgatgcatttgatgctgttgaaagaccgctccggagcggtcttttgtttttttcaaaaacaaaagaccagcattgtatgcttttacgaataaggtgtttccgcattgtctgcgtcgggaacatattccagcacattttctacccggcagtctaaaatttcacacagtgtgttgagcgtagtggtagagataggctttccgtgtttcatgcggtgaagcgtgctggcggttacgccctgtttgaagattaaatagtattcagttattcctttttgaaacagcgtttcataaaagggttgatagctgatcattagcatcaccacaaaaagagtagcatacttcatttgttgactatacttgataaatagagtataatgagcgcatacttggtttatcgagtatattgatagagttcccaaaagaaacaattataaaaaggagtggtaaaagaaatgaagaagaagttcctatccgtcgtgttagcgcttgccatggtgctgagcctgatgcccgcggcgtttgcggcggaaggcggcgtttccacggcagaagagctgaaaacagccattgaaaatgccccgaaagacggcagccaggtcacaatcaccctggacgcagatatcagcgatatgagcacagatcagattgtgaccatagcagaagggcagaatattctcctggacatggctgagcatagcattaaggtagccagcgcctttgcgggcaggcctatccgaaacgagggcacactgactgtcaccggcaatggcaccatcgacagttcgaactcaaataccggaggctatggtgccattgataactatggtacactgaccattgaaaacggaacatttacgggctctgttaacgcaagcggcgcctctatcaaaaacagaccggacggtgatctgacgattaaggacggcacattcaacggtgcagtaaccgcggtatacaatgccggtattgccaagatttataatggcctgtttgattgtcgctcctgctctgcctgtaataacagcagctgggggtatacgatccagagccatatggatgaagagggaaaatcgccgcaactgtatttctataatggcacggtgattggcgtacagggcggattttccacttcggccgggtactcagagatccacgatgggtcatttaaaacggtttcctgtgctacacacactaacggaagcagcgcccactatgctttgtatattgctggtgaggatgaagatgtaaagtgcgtcgtttatggcggttcttttgagtctgtttccaaaacggctgcacttatcggcaatgataataccggaggagacggcggaatcaatgccaatgcgaccacggaaatcaaaggcggcacatttaaagcgcctgcaggccaaaaggccgtaacaggagctgaaaatacgggcaatcctgtcattaccggcggtaagttctccagtgatgtgagcgagtatctggctgacgattgtgtgcagaacgctaatggcgaggtcggcaagctggagcaggtagctgttgccgaagtcgttgctgcggatggaagtacaactaccaagtatgcttccctgaccggggccgttaatgccgctaaggacggcgagacggtgaccctgctgaaagatgtggatttgggcagtggttatgtcaatatcgcaaagaagcttactctggatctgaatggttatacggttacaggtagcaatacatgggtcatcggagtttatagtgatgtgacgattaatgacagctccaacggacagggcaagattattaacagctctaccagtagtggaacccgcattgctgttttggcacaggaaaagagtcaggacgaaaaaacctgcaagctgacaatcgagggcggcataattgcggctactggaattgaaaactcctatggtgtgttcagcaataacagcacgactacatatggtccgacaattatcgtcaatggcggcgaaatcaccggctattttgctggtttgacggttactcatgacacagatttgactatttccggtggcgagatcactggtaattattacgccgtttcgggaaatggatctgcggatgacacggacattaccatcaatggaggcaagctggtgtctaaagatggaaatgtaatctatcatccgcaggtcggcaacatgaccatcggcggcaatgctgaactgacagggccgaatggcgtacagtattgcggcgcgggtatgctgacgattcaggataacgtggtcattaccgctactggctcctatacggaatttcctactaaaccgtctgaacagggagacggcagcacggacgacggcgcggcgctgtcgattgtttcccgcggcgacggatatcaggacggcgatcagaaaatggcggtcaatatcaccggcggcactctgaatagcgttaataatgcggcaatttctgtgtaccgtctgcaaaataaaaacggttgggtcaccaacgatcagactaacctttccagctatcttgcggcgctgaatattaccggtggaaagctttctggtggtgagcgtaagggcgcacttgagattgatacggcagcagagaagcaggtagctgtttccggcggcctgttctccagcgaccccagcgcttactgtgttgacggcaagaccggtgtgaccaactctgacaacgcgaccaaagctgattatccctacgctgtgggcgaagaggttgctgatgcaaagcctgctgtggtggaatctgccaccgtcccggctaacacgcctgataatgcgtctcaggatgcaaaggatgtcgcagaccagatgaccggcggcgcaggcgtgaagcaggatgcggcgctggagggcgcaatcaaggacgcggctaacggcaacaaaattgagggaaacactgagcttgcaactggcaaaacggttacggcgacgctgaacgaagcgacgaatggttccgctaatgataatgatgttgccatcgtctatcagccctatgtggatgtgacggtgaccaacgcggtaaagagtggagcaacggttacttctttcactgcagatctgactcccatgtaccgcgtagtggctaccaccaacgctgtggtgagcggcggcgtggaaatcaaggtctctggtgaggtggacgcagacgccaacgctgtcctgattgagagtggcaaggaattggacggccttgctgaccggcagtatgaggtcaagctggctctgcccgatgactttgcgaatgcaggggataagctgtgcatcaagcacgacaagaacggttccgcggagtactacactggaactgtgagtgaagatggcggaaaactgtttgttacctttattagcaatgggttcagccccttcacagtgtatgccgcatccgagaccgcggcttccatcggcgataatgtttatcccaccctccaggcggcggtagacgcggtggagaacaacggtaccatcaagctgctgaaagacggcgagactgctactgtgagccgcacggtgaagttcacagtcgatccttctggtaagaattacaccatcagcctgggcggaaattgcacggataaggatgctggcgaacatatctttgatgtggtttacaccgcgccttcctccggcggtggctcttccagcgcaacgtatacggtgaacgtgg

SEQ ID NO: 2523 - DNA, 24383 bp, Unknown
  16S sequences of unknown bacteria
agacgacgattgaggttgcggatcactgcccctgccctgccccttagcgggagcccttgtcgtaggggatgccttcggccttgggcgcacgggagctcttggaggtgaaggccagaacgatcagcgtgatcaagtacggcagaatccgatagaagttgatgttgatcccgatttccttcagcaggaagatgccgtcgccgttcaggtccaggctggcatagctggccgccacacacttgaaaagaccgaagagcagcgccgcgcccgccacgttcagaggcttccagttgccgaagatcatcacggccaacgccaggaagccgaagcccgctacgtcgccgttggcggagcagtttgccgtggtcatggcgtagacaaagccgcccagacccgccagcgcgccggaaatggtcacgccagcgtagcgcatcttcaccacgttgatgcccagactgtccgccgcctgaggattttcaccgcaggagcgcagccgcagaccgaagcgggtcttgtacaggatcaccgccagaatgacgtagatgagaatgcacaggtaggtggccagataaaccttgttcaggaaggtctcggcaaagaagcccagcttatcggtcttggcgtagcccagcatggtctttttgatcatgaaccagctggcggagtcgccggtgtacatctgcagggtgttctggttcgcaagcagacggatgaagaacagcaccagcgcgggggccatcaggttcagggccgtgccgccgatggtctggtctgccttcagattgatggcggcaaaggccaatagcagcgagaacagcgccccgaacagcgccgcaaccgccatggccagcaccataaacccttgcagcgccggccagtccttggcggccatggccgcgtcaaaccagccccactgctgtaccagacgcacaaacaaaacgccgatgaacgcgccgaagatcataatgccctccagcgccagattgatgatgccgctgcgctcggcaaaaatgcccgccagcgctacgatcatcaggggaaccgcgtagatcagggtctgacgaatcagaaagctcatttctccgccgcctccttcccatctccggcaggccggtcgatgttttcactgttgttggtctcctgggtcgcgggaatgatcttttcctcccggtgacggcggcgcttgccgctgccggacagccacatgcggatcaccagcgagaacgcggccagatacacgatcacggcaatgatgacgtccgtgatgtattcgttgtacgcggtcaggttggtcagctgcaggccggcaatatccagcatggacatgaacatgcccgcgaagatcacgccgatgggatggttggaagccagcagggctacagggatgccgttgaagcccacagcgggcagctgctggtaggtggaccagaagaactcggtgttgccgctgaggtagtacagtgaacccgccgcgcccgccagcgaaccggcgatagccatcgacagcacgatgttccgcttgtccttgatgccggcatagcgcgccgcatagcggttggagccgcaggccttgagctgataaccgaaggtggtcttggaaaggatgatgtacacgatcactgccagcacaatggcgatcaggatgctgccgttgacctgagagccggggaacagctgctccagccccattttggaggtggccacgccgttggccgtggtcttgtaaatgtagctggtcttggtgttttcaatgacgttcttcaggttggacacgtcaaagacccacgtggccagattggcggcgatccagttggtcatgatgcaggcgatgacctcgttgatgttcagcagagacttgagcagaccgggaatcgcgccccaaagtccgcccgccagcacgccgcccagaaacgccagaatccatacgaaccatgtcggataggtgacggcgggcacgatgccctgcgccgcctgataggccgccagttcgcccacgccggtggggacgctcagggcgatcagcagggtgacggtggttccggccagatactgaccgggcgcgccgatgttgaacagacccgtcttgaacgccaccgccacggaaaggccggtcaggatcaccggcgtagcgcggaagagcatattgcccacgatggaggggttaaaaccgaaggtcagcgcgccggaagcgttgcggcccgtagagaacaggccgaagaacaccagtcggatgccttcccatgcgctttgtaggccaaggcccttggtggtcaggcccacgatcaggatcaggacgctgcccgccaccagaccgatcagaatggagatcagggaagccagcaccgagcgggtgccttccttttgcagaaagtttttcatgcctccgcctccttctcctgccgcttggcgccggccatgtacaggcccagttcctccacggtgacttgcttgggatcaaattcgcccacgatctggccctcgtacatgaccagaatgcggtcggaaaggttcatgacctcatccagctccagcgagaccagcagcacggccttgccctcgtcccgctgcttcaccagctggccgtgaatgtactcgatggcgcctacgtccagaccgcgggtaggctgcaccgccacgatcaggggcaggttgcggtcgatctcccgggccacgatggccttctgctggttgccgccggacatgctgcggcatttggtaatggggccctgaccagagcgcacgtcgtactgctcgatcagcttttcggcgtacttgcgggtctcgtcaaagcggatgaagccgtggttctggaactgcttttcctcaaagcgctgcaaaaccatgttctgctccagcgtaaagtccagaatcaggccgtgcttgtgccggtcttcgggaatatggctcatgcccgcctcgctgtgcttgcggatggaggcatgggtgatgtcgtggccttccagcgtgatcttgccgtgagagggcttttccagcccggtgagggcataaaccagatcggtctggccgttgccgtcgatcccggcgatgcacaggatctcgccggcacgggcagtgaagctcacgtcgctgactgcgtcccgcttgtagagcttggagggcacatgcagatgctccacctccagcacgggcttgccgggatgggcttcgtccttgtccaccaccagctgcacggggcggcccaccatcatgcggctcagttcttccttggtggtgttggcggtctccacggtgcccacgtagcggcccttgcgcagcacggtcacccgatcggagacctccatgatctcgttcagcttatgggaaataaacaggatgctctttccctcccgggtcaggccccgcatgatctccatcagttcttcgatctcctgaggggtcagcacggcggtaggctcgtcgaagatcagcacctcattgtcgcggtagagcatcttaagaatttctacgcgctgctgcattcccacggtgatgtcctcgatcttggcgtccagatccaccttcaggccgtaacgttcggacagctcctgcacctttttgcgggccgccttcttctgcaggaagcccattttggtgtcctccgctccgaggatgatgttgtccagtacggtgaacacgtcgatcagcttgaaatgctggtgcaccatgccgatgtgcaaagcggtagcgtcgttggggtcgttgatctgcacctctacgccgtcttttttgatgacgccttcttccggctgatacaggccgaacaggacgctcatcagcgtcgatttgcccgctccgttttctcccagcaaagcatggatctcgccctttttcagctgcagcgtcacatcatcattggctttaatgcccggaaattccttggtgatgtgcagcatttcgatgacgtaattgggcgtattgtccatcgccatgccccctttctttgatttctgaatgaaaccataccatgagtcccgtagattttattataactttcaggaacaaaaaaggcaagaaaaaccaaatctttcagaggaaaaccacactttttgtacgaaatttccgcaaagaggaaatcaaacgttctccctctccgtcttaagagtgtcaggcctgacggaaaaacccgtagaaacgaggcgaaacaatggacagacaggagctggggcagaggatcgtcgattggacgcccctgctgtatcatgtggcgtgcggcctgctttccgatgagaacgaccgggaggacgcggtgcagtcggccatcgaaaaggcatggcgcaaggcggattccctgcgggagccggacaagctgaagccgtggctcgtgcgtattctggtcaacgaatgccacgaagtgctccggcgcagaaagcgggaatttcccacggagaacctgccggaagaaagcgccccgccgccgcaggagcagcgcgagcttcgagagctggtcatgagcctgcccgaaaacgagcgtctgcccatcgtgctgcattatctggaaggtttttcaacacaggagatcgcgtccgcgctgcgctgccccaagggcaccgttctttcgcgcatgagccgcggccgcaggcaattaaaacgcttcctgacggaggaatgaacgatgaatgattgggattccctttttggtgatgtgccggagagcttttcccggtgcgtccgtgatacggtggatcggctggagcggcaggaaagcgccccccgcccggccttccggctgcggcccgtggccgtgctggcgctggcgctctgtctgctggccggaacggcggcggccctaagcggattgggcgtgctggacacgctgggccgggagctgcgggcctatctgcagcccgaagccaaggagctggtgcagacttccgtctttcaggcggccagccagccccggcacgcatcctttacggtggaagaagccgtccacgacgggcggcagatgtacctttccgtccgggtacacccggaaagcgatgctttgctcatggatttcaacgccgaagcttcgtggagccgccgctggccggagcatcccgaccagaccgacgacggctcggagaccttcgctcaagcggcggccgtgcagggcaaggaactggttcgggccgactgtgagcctgtggatgaaaacggaacgctgctggatcgggccgtcgaggtgcattacgacggcgatgacctgctctacaacctgtcctttgcatcggagagcggaaaggcctccctgcgcctgttcaccgacgaggtgtacagcgaggactggaaacagagccgcagcttcggtacgctggacttggaggtcaacgtgaccgaacggggcaaaatctacactgcggatactcccatcgtctttgcggacggcgagctggaattgaccgggctgaccgtggtgcaaagccccatcgccacctacgtgacctacgaatacgccgccacggaaagcgccagcatgaagacccgggtacacctctacaacggcaatgtctgggtgaactggctggacgaaagcggcgagcccgtgccggaagcgatcatgggccggggcgttttcggggatgatgaccaaaccacctattcctgcacctaccgcgcattcgacaccctgaccggcgaaatgaagctggaattttaccggccgggggccggaaccatcgcacaggtcatggttcctttgcgggaagcagcggacgaaaatcaacaaggaggttcctccaaatgaaatatcaaacgacccggaaactgtggatgctgcttttgacggccgctttgctggccctgctgttcctgcctgccgccttggcggaagaaacactcccctccgtccatgtgaccctcggcgacggggaacccatcggctacttcgacggcttttaaggaaatttccttaaaaacgccgacagcgtcaagggcgtaacgggacggctttccctgagctacgaggtagaaagctacatcaccaaaaacggccaacgcaaaatgcgcgtggatttggaaaacgtcaccctgaccgacgacgtgatggtgctttactaccgcctgtctcaggatgaacccatccaatacgaagccgatctggatttcctccgcacgtggggactgcctgagccgatgttccaacaacgctccaccgggcgctggggcgtacaggacgttctttatcaggaagggcaccccattgacgacaaaagtctgtactgtctttacgccgtttcgctggcggaacccattcaggacggcgaagaactgatcttcggcgcgcagtgggatcagtcgtccatgcagtatgcaggcggcacggtcgtgaccatcgaccgcagccatgcggaggaccccaccgtggcctatacgccggggacggaactgcagctgacctacaacccctgggcgggcgaagcggaacgaagctaccacatggtcatcgaccgggtggcctttactcccttcggcaatcggatggtcatccgctcggaatgcacggacgatctcagcgccgttttccccctgtatctgaccgacgatcagggcgatcggctcaccacctattccttcggcgagcggacgcccggcaacgccagcaagacccgtcctgaatgggtggaaaacgatgtgtggttcttcggcggggaaaacagcgcttccctgacgctgacgcccatgctttccacagacgaccgggaggatcttcactacgtccgcaccgccgtgcctttgagcgagctgcccggcaaggtgactttcgcggacggcacggactgcgagattgttcgtctgcagcttcagccggacgggcttcggatgttctaccgtcccggcacccatctggggtatctggactttgagctgggcgacgaaaacggcgaccccatctccaacgatgtggtcggccattccgccaacaccggcagcgtggccgagggccttctgggctacggctgttactggacggcggaatacaagggccagtatgtttccatgctcaccgaggaggagctggctcaggccaaaacgctggtcatctcccaccacgagggcctgatggagcaggatcccgagcacgccttcaccgttcccctgtcccggtaaggccgcaaaaaaaaacaaatcaaatgcacccggagcgcataacgcgccccgggtttgtgatataatgacggggattcatgggacggcgcaaagcggcgcggccctgaagccgacgggcagggagtccgtgaaaagagaaaggggtattcatatgaacgcttatacttcccgcattctggaagggctgaagcagcgcaacgccaacgaaagcgaatttttgcaggcggccacggaaattctggaaagcatttcccccgtgtttgacaagcatcccgagtacgaaaaggccggtctgctggagcggttcgtggagccggagcggacgatccttttccgcatcccctgggtggacgatcagggcaaggtgcaggtgaaccggggctaccgggtgcagttcaacagcgccatcggcccctacaagggcggtctgcggttccatcccagcgtcaacctgtccattctgaaattcctcggctttgagcaggtattgaagaacagcctgaccggcctgcccatcggcggcggcaagggcggcagcgacttcgaccccaagggcaagagcgaccgggaggttatggccttctgccagagcctgatgaccgagctgtaccgtcacatcggcgcggacacggacgtgcccgccggcgacatcggcgtgggcggccgggagatcggttatctctacggccagtacaagcgtctgaccggcctgtacgagggcgtgctgaccggcaagggcctgtcctacggcggcagtctggcccgcacgcaggccaccggctacggcctgtgctactttgtcaagaatatgctggaggccaacggcaagaccctgtccggccagaccgtattggtcagcggcagcggcaacgtggctatctatgcctgtgaaaaggccacccagatgggcgcgaaggtcgtcgccatgagcgactccaacggctacgtctacgacaaggacggcatcaagctggacgtggtcaagcagatcaaagaagtggagcgcggccgcatcaaggagtacgccgcccgggttcccggcgcggagtatcacgagggctgccgcggcatctggaccattccctgcgatgtggccctgccctgcgccacccagaacgagctggacgcggaaggcgcgaaggcgctgatcgccaatggctgcttcgccgtgggcgagggtgcgaacatgccctctacgctggaagcgaccgaactgttcctgcaaaacggcgttctctttgcccccggcaaggcggccaacgcgggcggcgtcgccaccagcgcgctggagatgagccagaacagcgcccgtctgagctggacgttcgacgaagtggacgagaagctgaagggcatcatggcaaacatttttgccaagtgtgccgaagccgcgaaggaatacggcgacaagcccacgaactacgtcatcggcgcgaacattgccggtttcctgaaggtagccgacgccatgatggctcaaggcaacgtctaaggcagggcagggccctgcaccccggactgcgcgccggtggcgcgcagggcgctcgagggaatgcagcttggccggggttttactgccgtggcacgacgagtgccatggctcgccggtctggtcgagttttctgtcagttgaataggaaaggccgccgctcggcgacgggcctctcggcttgcgaaagcggtcagcgtgtagaaaatacgcgctggccgtttttgattagggaaaaagggggatggagcaaaacagaaaatggaacggctataccactgatcggggaaaaatcggtgaagccaatgctgttttctgaaaagattatcagaaaggaaagaatgttaaaaaacgggattgcgcccggaatggtttgtttatataatagttgcagaagaaagcgcgcctttgaccgggcggaaaggaacgtttgaatgaagaaagacaaggatcgttttgcgccgtatcctcccatgggctggaacagctgggactgctacatgtccgccgtgacggaagcggagctgctggaaaacgcccgctatcaggcggagcatctgctcccctacggctgggaatatattacctgcgatattcagtggtacgagcccacggcggggacgcggcccggctgcgaatacattcccttcgcgccgctgtgcatggatggctacgggcggttgattccggcggagaaccgctttccgtccagcacgggcggaaagggctttgcgcccattgcggcggagctgcaccggctggggctgaaattcggcattcacatcatgcggggcattccccgtcaggcggtatatgcccgcacgcccgttctgaacagcggctatacggccgaccagatcgccgaccccagctccatctgcctatggaacagcgatatgttcggcacgcgaaaggatcatccgggcgcgcaggcgtattacgacagtctctttgaactatatgcttcgtggggcgtggattttgtgaaggtggacgatattgcccatactggcgaggccgaatccggcggatacgcggcggcccatgagatcgagatgatccgccgggccatcgaccgctgcggacgcgcgatcgtgctgagtctttctcccggccccgcgtccgtggaaaaagcgtggcacctgagtcagaacgccaatatgtggcgcatcaccaacgatttctgggacgactgggccctgctgaaaaatatgttcacccgctgcgagatctggcagagccacgtcggtcccggctgctggccggactgcgacatgctgccgctgggccgcatcggcgtaaagttcggacagtcccggcagacccgcttcacccctgacgaacaaaagaccctgctgaccctgtggtcgatcttccgttcgcccctgatcctcggggcggagctgcccagtctggacgaagccacccttcgtctgctcaccaaccgggacgtgctgcggctgaaccggcactccttcggcgcgcggcagatcgtccgggacgacgcgcacgccgtctgggtcagccaggacgaagatggttcccggtatgcggcgctgttcaacctgtccgaaaagccgcgggaggtgtcgctggatctcctggagctggagggcgagacctttgcctgccgggagctttggtccggcgaagaacgcactgcccaagagacactttcctgtgtcatcgaacctcacggcgcccggctgttccgctgcacggaatgctgaaaaacaggcctgtcttttcaggcaggcctgttttcctttcatccacgtcccagaatagcgtccagatcctgttccggggcagtgatgggtcgaaggccataagcgtctaccagcgccttcacaacggtttcggacaggaaggcgggcagcgtcggccccagatagatattcttcacgcccagcgccagcagggtcagaagaatgcagacggctttctgctcgtaccaggagagcaccagcgtcaggggcagttcgttgacggagcactcgaaggcgtccgccagcgccagcgcgacccgcacggcgctgtacgcgtcgttgcactgccccacgtccatgatgcgggggaatccggcaatttcgcccaagtccagatcgttaaaacggtatttgccgcaggccagcgtcagaatgagagaatccatgggcgtttttttcgccagctcggtatagtagtttcgccccggatgcgcgccgtcgcagccgccgatgaggaaaatatgccgaatcttgcccgccttgatggcctccgtcacctctccggcgtgggaaagaatcgtctcatgggcaaagccggtggtgaccatatggccgccgttaatgccgctcatgctatggtcgtgctcgtagccgcccagtgcgagggcctgctcgatcaaaggcataaagtccttgcgcccgcgctcatcggcggcgatatgccgcagcccctcatatcctaccacggaggtggtatacacccgatcctgatagctgggccggggcggcatcaggcagttggtggtaaacagcaccggcgcgggaatgttctcaaactcggtctgctggctttgccatgccgtgccgaaattgcccgccagatgcggatattttttcagagagggatagccgtgggcgggcagcatttcacaatgggtataaacgttgattcccctgtccttcgtctgttccagcagttgatgcaggtcttccagatcatggccggacaccacgatgaacgggccttttcgaatgtccagagggactctggtggggacggggtcgccgaaggtctccgtgttggcccgatccagcagttccatgcagcggaagttgatccgcccgaattccataatcagctccagccagtcgccgatggagcgttcctgccgaagcgccgaaagtcccttgtagaaccattctgtcacctgctcgtcctgaaagcccaggttcagggcgtggtgggcgtaagcggccatgcccttcatgccgaaaagcagtgtggagcgcaatgagacgatatccgtctcgccccgccatagctccagtgttcccttatcctgtccgcccagcttttttcgttcgttttccacccggcggatgaaatggcgaatggcttcatcgtcaaagttcacgttggtcagcgtggtaaacaggccgtcgatcagcagccgggaaatttcctccgtgcgggctccctgctgccctgcggtctctgccagtcggatcagtccgcaaaccagttcgtcctgcaggttggctgtctccggctgttttccgcagacgccggtctggacgcagcacttgttgcccgcggtctgctggcactgaaagcaaaacatctgggacattctttccctctcctttcaccaaaggggcggcgcagcgccctttccaaaacagtctcggctttttcagctcaaatgatacgtttacttttgaaagaagaaattttccacatgaaaaagacccgtgcgccttccaaagcacacgggtctttcatcagggctgttcgccccgtttccgccgcgaacggcttttttattttctgcggcactccatataataccgcttttcattggcctctcccatggagaaggtctttcggggcagcacacccagttcccgcacctgctcgaagaaccggctcttatccggtgcgggcagcaggaagcccacagctccttcgcccttcaccagctcccggacggcctgttcgccgtggacgtaatccagcttcgcgccgggatgggcgagcaaccattcgtccaggaagatctgcaggtcgcccactgccagccggtggggcgtaggaatggagaccgtcacttccttgccctcgtacaccacgcggatatcctgcgtcgcgtccgggtcgatcaggtcttcgccccggcgcaccgcataggcttccagctcgtccagcagatcgtcgccgtccacgccgaacagcacccggtgaatgggttcgaagcgcagcgcgtcgtcatagatattctcgatttccaccatggcgaaccgggcgggatgggtcatggtctcctccggggtcaggccgggcttgaccttgtcccagatggctttggccgtagcaaggctgtggttgccgtcgcccacggcgaacagcatgggatcgtcgccctgacgcagccgttccaacgccgcatagaccccgtcgatgtccgctgcgtcctccacggcgtagcctaccagctggccgccattcatcatcagcggaaaatcgtagagcttgcgcagctggcggcgcttctgaaacagcggctccaccaccgactgcatggggtcgtccatcaacagcatcacatgagaggtctccagcggcgctttttcccggatgcgcacccggggcgggatgcgctcggcaatggtgccctcgctggcgcggacaaggcttttcgcttcgggatggaaatcatagcattccagatcgatcatgccgacaagccccacccgcgcgccggagggggtgatccgttccgtcaggataaagccctgctgcacggcgggaaccagcgtgccgtcccgcaggtactgctccatggtgcggcagatgccggggatccgtgcgtccgtctcgttcagccagcattccggcaggatcatgcggaatgcggagggctgattgcccaccagacgctccacttcctcccagtaggcgggctgagaagtgaactgatcgcaggccacacaggcccatgcggtcaggttcgtgccctcccggggcagcagcaattgaccgggataaaaacaacgattggaaacagccatcgaaattttcctccttgtggaaaaatcagggaaacgaaggggtcacgggacggcttcgccctcccgcaccatacggaacagcagcaccagacacttaccgttgccccggctggacaccgtcgccagcgtcatcagccggtcggacggttccacggaaacggagaatccatacagactgcggtctgccgccgactggacgtactccatcatctgcgcgtccgtgtcgaaggtatcgtgggaggcatagtcgaagtagcccggcttggcagggtcgctgtccgccacgatgacggaaaacagcacgtagcgcgcgtcctcgtacagggtggtcagctgagcgaagcaggccccggccgcgaagccgatgccgccggactcatactgccacaggggagcaaagctcacgcccgccacgttgccctcgccgcgcagcagcaggttttccgggggcgtgctgatgaaacagtccctgtccagaaataccgctccaccgtcggacaaagagccgcgatagttgtgggtcaggtaataggtattattgcgctgcaccacgtactcgtccagcacgccgggaatatacagccgtgccagcacatccgggtattcggtgctgatctccttcatgctgtccagcacattgcacagcgggttatccgggtagcgtctcagccgggtgcgggtggtttcttcctccaccgtgtcggcggacgtttcgcctccgttcccactctggacggcctccgcctttggcgcggcaaacacctgcggcgtggacgtgggggtaaaggtttccccggcgggcagcaaatctaccttcacgcccgcctgctccaacgcctgtccctgctgctcctgataggcctgacgcacctgcgccatttcccgttcgttagcggaaaggctcataaggatctttcccccggcgatgaggcagaacagcagcatgaccgccaccgcggcaatggccgccacccttccccagagaatcggcggtttgggtggcttttccttaggcggtttggaagatttcttcggtttctccgccgcagcgggcttttgggcaaagggacgatggggcgccgggcggctcgattcgggtttcttcgactccacgccggcataaaaaccgttgttttctaccggcgcggaatggtaaggctggccgggctgaaacggcatttccggagcggcagcttgtccgcccgcattccacccgaccgcattccacgaagtttcttccgaatcagaagcggcggcaaagaagggctgatctgcagatggctgctccatccgcccgccaagcggcggcagaccaccgccaacaaagggctggtcgaagccgtgcagcggcgcggagccttctttcgagggactctcctccgtgggcggcagcacgtcctcctcaaagggataaaacactggcgcgggcgtttccgaaaccggctgctcctgtaaaggaacaaaggggtcgtcttcgttgaaattccagtggatttccgccttgggtgcatcgtcgctgaaaaatgcgtccaattcgctgcccatgggcgaagcggcaggatcccacagagggccactctgctgaaaaaccttgtaccattcgtcttcccctgcggcaggagcggctgccgccgtgctttcctctttcacgggcttttcagcccggcagggagcggcggagaacagcggctcggcggcggggtcgggctgatctttcaccgtgaactcattgtccgattgcggctgcggctccatcatggacgtttcagcagccggggtctgcggcttgaaggcagactcttccgctgcttgcgccgcagacatggctgcggacgtttcagccccttggggctgtgtttcgaatacgggcgcagccgcatggggcgctgactcggccatggacgctgcagcctcatggagtggctgcacaccgcttgatgcctcggcagtttggggctgggtttcgaacacgggtaccgcttggggcatcggctcggccatgaacggctctgccgcatggagtggcggcacatcgttgggtgtcccggccgtttggggctggacactgacaggcggctcggtctcttgcggaatcgtctcgttcgcgggcgtttccgctgcctgtacgttctccccgtggaatcttgtctttctcacgggttcgccattcgtcgaagacggcagttcgaccctcgccgcttcggtctgtaattcgtctgcggaagtctctgccgggctgccccatgcagcggaatccgctccattctccgttgccgttgaagcgacggcgggctcctctttttggggcgcagctgtcaaaaccgtttttgccgccatttccgggatggatactggattttcgttttcttccacagcgattgtctcggcatggggtgctgcgggcgctttggcaaattcggagggaatcggcgttccttcccccgtggccgaggctttttccagctcccggcgcgccatacggctgcgccgtcggggctgggacgactgggtcggctggctttgcacagtctcggtgttttcggctttgttcgaaaggggcgcttcaccgggcgcatccgcacttgtttctactttcgcgattttttccggctttgttgcggaaaccggcatttcgctctccgaagcagattgcggggtattttcctccgccgcattcgtttcgggcgcggcctgttcttccagcggcacaggcttcgtcatgggccacagcggcacgtccagagacggccattctgccgctggggccgttgtttcggccgtcgtggaaacagaaggaacccaattacggggctgggcttctcccagcgacgggctgcgctgcaaatacttgggtacacccagcgcatccttttccacagggcgctgggattcgggaatatattccggcgaggaactttcctcaactgctttttcggcgggcgatccttccatcgggctttgccagaggggttgaaaagaaggctcggacggcgctgcgggctgaatttcctccacaggccgaaagctcggagaagcaaaaggctctggctgcataggcgcaacggatgcgttcaccgaaccgaacggctggaacgaagaaaaggggaccgtctgcggagccgccggttcggttggggcaggagaacccatgacggcgggctgataaaacggcgtgcggccgtacagctggcccgggcgcatcatcatcggctcgtgagccgtatggcgagtcttcggcacaggccgcgacaggcgttcgtccaacgagatcggctgaaacggattgtccttttcccggcgctgatcttccatgagtcctcctcctttctcccaataatccaatgaatgtttcctttccgcttacagaaattcgccgaaggcgatcaacgcggccttggagcccttgatctgaatttttccccgcagcagtgccgacaggggcgacaccttccgctgcaggatgtccatcaggtcgcgttcccggccggagacgatcacgtccgcttcgtctatttcggtctttgggatatagcggccctccaccagcgaaaaggcgcacacatagcccgtatcggtggcgcacaggcgataggaataggtgatatgtttcagttcatcctcatgctcgctcaaaatgcggcagagctgcttcgtccattccttcaggcccgccttggggtcagcatgggcgaaccactcccccaccgcttctttcagttggctcattcttttttcagctccttttcgatctgcttcatcatcgcccggcagccgcgctgcacgtcctgccaggtcgcgtcaaaatcgccggtataccacgggtcggccacgtcggagccatcgctgcagaaatccagcagcttatgcagttttccctccgggtcgcccggaaacgcccgacgaagattgcgcatattccaatcgtccatgccgacgatccaatcaaaacgatcataatcttccgggacgatttgccgggcccgcttgctctgacaggagattcccgcctgccgcagcttctcccgggtgccgggatggacgggattcccgatctcttccgtgctggtggcggcggattccaccgtcgcttccgcttccagcccgcgccgggcgatcatatcccgcaggacaaattccgccatggggctgcggcaaatattgccatggcagacgaacaatatctgaaacaccaagacctcctgtaacgtcctgaacaggacaacccgattgtaccataagcaagcggttttttccacattttccacgttttcagctgtgggattccgacttgtttctttgaccaaaaagaaatataatacccttgaacgcggcgcggggcagcggtttgcccgcacgcagaacccaccaaaggagctaagaacatggctgaatttaccaatgaactgatgaaatggctcagcggcggtcattcgccgtggcataccgtagatatggcagcccactggctgacggagcggggctttgaaccccttgcgctgaacaggcccttctccgttcaccggggcggacgctattttgtggaaaacggcacctttctggcagccgtgaccgtagggcagaaagacgtgatccgcattgcggcggctcacaccgactggccctgtatgcgcatcaagccccagcccgagctgatctccggcggctgctgccgtctgagcgtcgagccttacggcggtgcgatcctgaacacgtggctggatcggcctctggggctggcgggcgttgtccttctgcgcacggccgaccccatgcagccggagcgccgcctgatctcgtgggacgagccggtgatggtcatccccaacgtggccatccacatgaaccgggaggtcaacaagggcgtcccctacaaggccaacgtggacatgctgcccatctgccgtaccgtgcagggcgaatttgaaaaaaacggctatctggtgcgtcagctggcgaagcggctgcaggtgcagccggaggacgtgctgtccttcgagctttgcgcctactgctgcgccgagcccacgctgcttggctttgagaaggaccttctgtcctctccccggctggacaacctcagctccgtccacgcctgtctgcaagggctggcggatgcgcagggcgacggtatcaacgtggcggtcctctacgacaatgaggagatcggcagcaacactcgccggggcgcggacagcagcacgctgacggtgattctggaaaaactggccctgtcgctggggctggatcgcacggcgctgctgggcgcctgtctgaacgggatgctgctttcctgcgacgcggcccacgccatgcaccccaatcatcccgaatacgcggatttctcctgcgcgccggtactgggcggcggcgttgcgctcaagcgcagcccccgctattcctccgacgcggagacctgcgcggtcattcaggggctttgcgacgcgaaccagatccccctgcaaatttacatgaaccgagccgacctgcccggcggcagcacggtaggctctatggcctcgtccctgctggccatgcccgccgcggacatcggcgttccgattctggccatgcactccgcctgcgagaccatgggcgcggcggatcaggacgctttcgtccggctctgcacggcgttctttcaggcgtaaggccgaggaattttccatttcttatgaatcaaacaccgctgccccggtcgtaaaagccgtagggcagcggtgttttcagtaggaagaagcacaccatcaggacggaaagggtctatccctttttcccattcccccgcagtgcgaaacggattggtttttcaggccgtttccgcttacactccctcaatgatctctggcatcagaccgggcagttcgtcaagcgtgatcgtatagtcctccacactgttcggaagcgcggcaatatccttcgcagtcacatgaacactgcggtgcacctttgcagaagaatactggccgtccttgcaattatgctcccaccaataaagtttcacgacctccatcgagccttcgggacgcgccgaagaagcatcgtttacaaacagcgtccgtaggcactccttcacgacctgcgcgtcttcctgagaaaaacccgtcttttccgccaattggacattgatggagcctttgatctcgtacaacccaaagcgcacgaaatgcttcatgcccatcgtatcagaggcgcgcttctcacccggttctccgttgacgctcttggtgatctgaagcgactccacctcaaccggggacaggctgagcgcctgatggatggaaaccgggccgcgaacgccaacggaaacgccgttcttttctttcttaaacgcaaacacctgtccaaagctacgcacgtccatccacttttcacaggcaagctgcgcataggcttctctatctttgatccctgccgtcgccgcagctgcgcgctcgctcaggcttctgaaaccatcgtcgcagcggtcgtccgactgtacaaagatcgcataccccatatcctgcattcggttgcgtatttttcgcttgatgcatacgtcagaaatttccccgatgccgttataatccactcttgggcgatttccgttcagcgggtcgccattcccatttgcttttgtcacagataccagtgccagaaagtcgatcttatgctccaatgccgccatgtttattcctcctctttttcttcacttgtttcatttttttcaaagaacgtatttctttgcagttcataccccatcaaatagagatcagaaagcggtttgttcagttcttcctcggggaactcccgtatgatccccatgatctcaccggtcaggcgctcataccggtccgcctgccatggttccacgcggttcagataggcctgatgcaggtggcggttgacccgctcatacacaaagaacggccgcaggcggaactcgttcataaacttgatcgcgtttgtctgccgcttctcctgcgttttgtaataataatcctgctccgcacggtccatgaccgccagaagccggccatactgaaaactgcggtcttttttgtccaattcccaagccatttcatcgcccccctgttttgtgtcgtaccgatacttttgaatggcggaacaggccgtgtgcaggatccgcctccaaaccgcttcctcataggccagcggcatggatgcccgctccgccaacgcacttaccatatcccgcggaaatacaccgccgtccaccttgcagtccagcagccgctgcaaatggtgacgctggatccggtcgtcgatcgccagagagcttccacgcggtgtgccgaaggcacattccacgatctggaacaggtccggcgcctgaatgccgtatttccccgcataccagcagcagtgcgcgtcccacatccgcatccgctccaaaaatacgtcgagagaaagttcgttgtaatccgtaacggcgagccgcccagtggttgcggcgtcaaagctcaccaggatcgcggagtccgtatctttgagctgtcgttccttccgcaggctcagcagcgtagctttgagctgctcctgatagtcgctcggcttccgcgtcacctccgtctccacgccgcgcagcctgcgcatgggcttggggatggcttcgccctgcgggttccagcacagaaagatacgattgcctgaaaactcgtatacgccctgatccgacgccagccagcggatagcgttatgcgccttctgggaagcgatgtagccaacgctcgccgcctgccattcttccgaaaagcgcccgcggtaggtaaagccgctcgcgtcattggcggagatcagctttgcgtttccgtttacagggatcatcccttttggatgctgcatcgcagccgccttcggttttccttcgaccatgcaaagcttccgatcccgcgccgagatccgttcgcagtagtagtcggcaaaagaagcgaacagctttcggtttttccaacaggcgggctcttcgtccgcaaagccgtgtacgcgccagcatatcatccatttttcatcatagtgctccgcatcctccaaaagccccgcccctgccaggtcgttcaggatcgaaccgtcttccgcgtaggagaaaaccgccagcagaaaagggtgcgaatgcggcgactccatccatgcgcgcagcgtctgcaagtaaagcgtgtgtgccttttcgttcgtgcaggcaatatacttcagctggtcgcaaagcggatgcggcgcaagtccgctggtgcgtccgctggaatcctctgtgacgggaaacaggatcttcggctctgttttttccaccttccgcgcagacaggaacgcgccctgggcgttcaaggtgatctcgacgtccgcgttcgtcaggctgtgcccgatcggcgcaagcgggtcgcgtcccgcctgatacacgccgatcagttttgcgtttgcatcataggtttctaccgctttttgcaaaagtcccatcacgtcgcctcctcaaattcccgcaggcctgagaagttctgcaattccgtgccgaatcgtttcatttccatgtcgcagatcgttttgctttgcgggcattgttccggcggcaggaaggtgatcacgccgtttttcatcaccgggttccagaaacgcacggtcatttttccttttgtttcctcggaatacgcctcgtccgcgtaggtaatgccatggtacatcagtccgaaggacagttccggcacttcgtcgtaagcgcctgtcccctctccaaatacgcacggttccacatagccctgacactccctgcaccccagaaaaatatcccggcgtccccccttgcggatcatccttttggcgatctcatggtgcttgttctcgttgcggtcagcgatcagttccggacggttttcgttccactcgaaatgtgcgcgcacctgataacggcagtccttcagataagtatagtagctcagatcgtttccgccgccgtacttgatcggccgaatgcccttcgtctccatctggatcgggttcatcacccgaaccgcgtcgatgatccacgtcagcgttggtttccaatagacagaactcagaacgcccttgagcgcttcgtaggtcggcacctgataagtgcatttttcgccgccgacccgcatgatggggtccgagaacagcgcatagtctccgctcacctgaaattccacaaggttttcatgctccgtatttttcatttcacgcctcccaaaatcccattgaatttcattccgccttcaggccgacctcagcgtcatagaattcctccgccagcgccagcgcacatccgccgcagaccggaaacagcgcccgcgccttttccaactgttttttctgatattgatatacgctgaccgtaaatggactcagttttttcaggacagctgcgcgataggacgcgtccgatcgacaccgttccgaatccagctccgccaagagccgccgtccctcctcatacgggaccagaatatccgtcgtttcctcctcaaaaacggagaaatgctgccccgctgttttgaatgcctgccgcaggtaaaaattctccgcctccgggcagcgcgccgtatacttttcattcgatcccatcagatccaacagggtcgttttttgttcctgaacgtaatcatcctgctcgcctgccgccatatccctgtatagcgcggcgtaataatatcgaatggctgcggccgagaacaggctgccgtcaaaacgttccgaagaggcactgaatgcctccgtcagcgccagcgtagcgtcctttccccgccggatatcgcgcagcatacccagattttcatctgtgcagtttacaacatagaccgggcgcggcgtttcggattctcggtcgcggttgcaccgtccggcagcctgcatgatgctgtccattccggcggccagccgcaggaccgcgccaaatgaaatgtccacccccgcctccataacctgtgtggcaatgcaaaggaccttttctttccgcccgagcgcagcctgtacttcgtccagtacatcgcgccggtgctgcatacacatcgccgccgacaaatggaagctccgatattctgccgagcgggtgtgctccagcagatacgccgcctcgctctttttgttgcacacggccagcaggctgtctgtggtttccatcagtgtgcagatcatctccggcagctcgtccagacggcggccgccggccagttgaagctccgttctccgaaatgttgcccaaagcgcctcgtcatacggcacgatctcctccggcgcgcgccgcagcgggtgctctgcccgctcaacgcacggctgcgttgccgagcacaaaacgaccgtcgcgcggcactgctcgctcaaaaattggatggcaagattaaaaagcgacagcagtttggtcggcacggtctggacctcatcgatcacgatgacgctgtcacaaagagcctgaaacctgcgaatggaagtcgttttcccgtcgaacaacgtgttcagcagctgaaccagcgtcgtcagaatgatcggcgcgttccagctttgcaccagaagttcgcactcgtcaagcgcgtcctgcgatgtatccgtctgcacaacgttggaatggtgctccagaatcagccgatcgtcccctacaaacttccgaatctctttcgcgttctgttccagaatcgacagcagcggcgaggtgaaaatcaggcgttttttcccaaattgtttcgcgtgcgccagtgcataccgcagtgaactgagcgtttttccgccgccggtcggaacgttcagccgatagatgccggacgctttctccgcaaacgctccgcacgtttcggaaattttctgccgcgcgttgtcgatctctccatcgtgcggcttcccctgcagcttttcttccagataggcaagccgcgccgcccagaccggcgtcatatcctccggcaaattcggcggtgtgtttccctccataaacgcagccgtatcataccggtcgccctcgatcacagcggacagaagcagccggggcaaactgctttatgttataaaattgttatattgcttgattttttgga

SEQ ID NO: 2524 - DNA, 1815 bp, Unknown
  16S sequences of unknown bacteria
tgcaaactgcaaattggggacagtccccaatttgcagggcctgtccctaaattgcagtttcgaaccatctaacaaggaggaattcgcgtgtccgaacaaaaggcgccgaacgcaaactcgggtgagagactcgaggaattcggctacaagcaggaactcaaccgccaactcggcctgaaagacgtcgtgctctacggtgtgctgttcatggtcatcatcgcgccgcagtccatttggggcctggtcagccagcagtccatgggcatgtcgacgctcgtctacatcatcggcttcattgccatcagcttcacggcgctcagctacgtgcgcatgtcggcgcgcttccccatcgccggctccgtgtactcgtacgtgcagcgcggcatcaacccgcacgtcggcttcatctccggctggctcatcttgctcgactacgtcatcacgccggccctgctctacgtcatggtcgccaactggggcacgatgctcatcccggaaagcccctggtttttgtggatcttggtgttcgtcgcgttcaacaccttcgtcaccatccgcggcatctcgatgaccaagggcctcgacttcgtcatcttcgcgattgagatcctggccgtcatcgctttcgtctacctggcgagcaagtacgtgctcggcggaggcggcaccggcgcgtttgtcatcgatccgctgtggcagcccggcaaggtcgacgcgcacttcgtggccgccggcatctccatcgccgcgctcaacttcctcggcttcgacggcatctcgacgctggccgaagagacgcacgagcccgagaagaacatcggccgcggcattatgatcgccctcggcatcatcatcgtcgtgttcatcgcccagacctacctcgcctcgctcgtgcagccagactgggcgagctgggacgagcagcatgcgaacaacgccttcttctacggcgtgcagctcgtcggcggtgacatcttcatgaagatcatgctcgtcatcaacatcatcgccgtgggcatcgcgaacatcatgaacgcgcagctcgccgcctcgcgcctgctgtattccatgggtcgcgacaaggtgatcccgagcatcttcggcaaggtctcgaagaagtggaagacgccgtgggtcggcgccatcttcatcggcgtcgtcgtgctgatcctggccccgacgctgggcatgagctcgctgaccacgctcgtcaactttggcgcgctgtcgtcgttcatcatcctgaactttgccgtgttcaagttcttcttcatcaaggagaagcgccgcaagactgtgggcgactgggtgaaatacctcatctgcccgtggatcggcatcttgatcttggcgtacgtgtttaccggcttcgacccgctcacctacatcgtcggcgtgagctggctcgtcatcggcctgatcgtgggcgccgtcaagtcgcacggctacaaggaggtccccgaggcgttcaagaacctcgaggtctaacgccggttgcaaaatagggacacaggctgcaaattggggactgtcccctatttgcagttcgtgccctttttgcgcgctagcgggcggcgccatccgtaagcgtgacctcgagctcgtgcggctcgtcgtcgacgcaggcgtcgcgataggcgcagcagtctttctccgacatgcgctcgagcatgcgctccgcctggcgcgtttcctcgcggtcggcatgttgcatgttgtcctcgtccgccgcgacctcgacgtattcgacgccgcgagccgccgccgcgcgcgcctcgatgcatacgtcgcagaacacggcgcccgcctgcacca

SEQ ID NO: 2525 - DNA, 1659 bp, Unknown
  16S sequences of unknown bacteria
ctaagtcaaaaacgaaaaaaagcgcttgacaaaattcatatattagaaaaacaaatatctaatttagattatttaaagaatgaaataaaaaataataattaggaggaatttaaaatggtaaaacaaacagcaggtagggacagtttaggcgattttgctccgaaattcgcagaactgaatgatgatgtattattcggagaagtatggtcgcgagaagataaattgtctttaaaaacgagatcaatacttacagtaaccgcattggttagcaaaggtctaatcgacagttcttttcggtaccacgcaatgaccgcaaagaaaaacggcgttacaaaaacagaaatggcagagattttaacacatcttgctttttatgtgggttggccgaacgcgtggtcggcatttcgcgttgtaaaagaagtgtatgccgatgatactactgttgaaaatcacggtggaatgttcggtattggtgaggcaaatacggcatatgcgaagtattttatcggaaacagttatttaaaaccgcttacaaatccgaatgaaacggtatttgtggcaaatgtaacttttgagcctggttgccgtaataattggcacgttcaccacgcaacaagaggtggcggtcaacttcttttatgtgtagacggtgaaggctggtatcaagaagaaggcaaagaaccgcaaagcctgaaagcgggcgatatagtcgctattcctgcaggtgtcaagcattggcacggtgcaaaggcaaacagttggttcagccatttggcagttgagtgtccgggtgaaaatacatcaaatgaatggcttgaacctgttgatgatgaacattatccaaaagaaaactaaaaggagagaaacacaataaaaagaataatatcaataataacatgaatttacagctcgcttgtattttgcggtataacaggttgtgttgcaggcgaaacaacacaagcgacagacaatacagaaatggcttacaaacagcggattcaataagtaattaggaggaatttaaaatgagtaaaaaattggtagcatatttttccgcaagcggtgttacaaagagcgtagcggaaagaattgcaaaagtggctaatgcggatttatttgaaattaaacctacaatgccttatacaaatgcagaccttgactggagagataaaacaagtcgcagttcagttgaaatgagcaatcccgactcacgtccgaaaatagcaaacaagcttgacaatatggcagattacgatacagtattaatcggtttcccaatttggtggtacgttgcacctacaattatagatacatttgttgaaaactatgacttgtcaggtaaaacaatcgttccgtttgcaacttcaggtggcagcggtatgggtaagacagttgatgttttgagcaaactgagcccgaatgcaaaatggcaaacaggtaaaatggtaaacggtatatcggaaaaagaaattaaaaattgggtaagcaatttataatactgaaaaaggaaagcattaagttgctttcctttttctatgtactacattttaaaaattgttttaacgatacctctaagacattttggcattttaacgacaacgattttcatttttacctactcctttctaccatttaaacaaccacaaatacccaaaaagc

SEQ ID NO: 2526 - DNA, 24268 bp, Unknown
  16S sequences of unknown bacteria
ccgtcacttttaccaaccttgccgccgccgaaatgaaggaaaaactgaaacgcgcgatcgtcgggcgcatcaacgaggagacggacgagggcgtgaaatcgcgcctcaaatacgagttgagcgagatcggcgcgtcggatatctgcacgctgcattcgttctgcgcaaacctgatccgccgttacttttacgtcaccgacgaaaacggcgattttcagatcgccgacgacgcggacgcttcggaaatgaaaaaccgcgcggcggagatcgcgacggacgcgcttttggaacaaaagagcgaaaaattccaactgttattgcggctgtacgcgggcagcaagggtttaaagcggctcacggaattatttttgcccctctacgaaaagatgcgcgtgcacgccgattaccgcgcgcggctggaaaatatgcccgcgcgctttaccgaagaaacgtttcattcgatcgcggataccctcttttcggggttgaaagtccgtttaacgcagttgcgcgcgcgcgtgcagtcgctggcggaggaaaccgaatatttcgtttcaggcagcgaaatgagtcccaaatatctctcgtttctggcggaaattcaggcgctgtgcctgcaattggaaagagcggaagatctgtacgccgcggcggctctggcaaaggaaagcaaactttcctccaagccccccaacgggccgctcaaaaaggcggaaaacgcgcccgcgctcagactcgacgcgcacatcgacggcgcgaaaaatgcattcaaagagatcctgatcgaattgaaggggtacgaaaacgaaggggaagacctcgcgcgatactttcgctcgggggagatcgcggcggcgctgtgcgaacttctgctcgccttcgacgacgcgtacgccgccgttaaaaagcgcgcgggcaaactggacttttccgatctcgaacaccgcacgctcgcgctcttgtcgcacgagatggtggaaaaagagttgaaatcgcgctatacgcacgttttcgtggacgaatatcaggacgtgaatccctgtcaggaaagcatcttacgcaccttgcagggggaaaatatgttcatggtcggcgacgtcaagcagtcgatctacgggttccgcggttgcagcgcccgctttttcggggaaaagttcgaacgtctgtccgcgtgcggaaaggcgctcgttttaaacggtaatttccgcagcgcgccgcgcgttctggacgcggtcaatctgatcttttccgaagtcatgaccaagcgcacgggcgccgtcgattacaagaatacctcggtcatgaccgcgagcgaccgtttcccgaaaaattcgggcgaagtgtggctggatttcattcccgaagaggaagaaaaagcgcccgaagagcgcgacgtgtattcggtcatcggccatctgaacggcggcgaggaaaagaccgacgccgagggcgcgtatatcgcgagcgtcatcgccgcggaactgcacaaaaaacacttcgacgcggactcgggcgaattcgtgcagaatgattataaagacatcgtcgtgctttcgcgcagcaagacggggcgcgcggcgaagatcatcgcggaactcgtccgccgcggcattcccgtggcgagcgccgccgaatacaacatctgcgagtaccccgagatcaagcgcctgatcgagattctgcgctatctcgactgcgcagaacaggatattccgctcgccgccgcgctcaaaagcgcgctcggaaaactgacggacgaagaacttgcggatatccgactggcggcggggtcgcaaaaaagtttcgtcgaagcctgccgcgaatacgccgaagccgcgcagaatcggacgggcgaaaaactgcgcgcgttttatgcgcagacgcaaagactgcgcctgctcgccaacgtgcggagcgcggcggaacttctggcgggtatcctgtccgagtcgggcgaggagatcgaacagttgcgcgcggaaaacggggaagagcgcgtcaagcgtatcgaccgctttttatccgaatgcggcgcgctgagcgtgtccgacgtcttgcgccgcctgaaaaataaccgttatcaggtcggcttttccgaggcgggcggcgaaaacgccgtgcgggtgatgaccatgcacgcctccaaggggctcgaatttcccgtcgtcatcgtggcgggcatggacaatcgattcgacgacagggatttcaaggaaaaaattctgaccgacgaagagtggggctttgcacccctttcttacaacgaacagaatttcaccgcctacgacacgattttgcgcgccctcttccgcgagcgtatgaccgcgcggcgcgcggaggacgaaatgcgccttctctacgtggcggcgacgcgcgcgcagtattgtatgcacttcattttccgcgaggagggagaattcgactttgcccgcgtcgggcgcgcgtcgaaattttccgacttcattcccttcgaaaaattccgcgaccgctttttgcagttggaatctgcggatttcgtggcaacgggggagcggccgctccttatctcttccaccgacgaggcagccgaacgcgagatcgccttgcgctaccgcgcgccttatccgtacgcaagcagcctcgaaattcccgtcaagagttccgcaagcgccattttaaagcggcagggcgagcgcttttacgcggaaaaagaactattccccgaggatacgggcggctcgaagacggacaaggaaacgggcatcgcctatcacgcctttttagaacgggcgaactttttcgcgccgcccgaacgggaggcggaacgcatattcgccctctttgaaaagacgcgccccgaacttgcggcaaaactgaacagacagaagatggcgcgcattctcgcctttcccctgttcggaaatctgcgcggctttaccctgtaccgagagcaggaatttttgctgtccctgcccgcaaacgcgctctttgcaacggacagcgaggacgaagtgctcgtacagggcgccatcgaccttcttgccgtcaggggggacgaggcgctgatcatcgactacaaatattctacgcactccgacgaaaggctggtgcgcgactacgcccgccagttggaaatttacgccgcggcggtcggaaaaattgcgaaaatcgaaaaaatttcggcgcatatcgtcaatctcgatcgtctttcgtgcgttcacgtgccgctgcattgaaaaagagacaagattcggcaaattattttgaattatttttaaaaattttggctataattcatccgttagcaaaaaacggagttgaatgttatgtctaccgatattttagagaggatcgcagaaatagccgccgaagcgggcaaaggatttcaggacgcgtgggcgcttttgctgctcgtatctcccctggcgctgttcgcgggctacgtgatcgtttatttttccaacgccgaagcgcgcggccgcggcaaggcggcgtttgtcgccttttccgacgtgtgcgttttcacctttgccgcgctcgcagtctgcgcttacgcgcccgaagaagccgaacgcgctattttatacgtgggcgtcgctttggccgcaaaagcggcgtatctggtgctgtacggcgcgctgtcgctgtttcccaaaaagaagagcggaccaaagcccgccgcaaaaccgcgcgtcgccgaatacgtggacatgagcgaacagttcccgcccgcagtcggcgcgcaaaggggctcggaactgaaaaaggtgcgctgtttcaccgaacccgaatacgcgggcgacgaatacgattcctacgcctccgacgtgcggctcgatcacatcttttccgtcgtcgaacggctcaaatgcgtatctttgggcgcgggggacaggctggaagtgcagaagtacgaggatcttctgaccgtctataagagcaaaaacgccctctcctccgaagaggcgcagacgctcaacgacattttggcgtcgcttttgaaaatgatggcgaaatacgatttataaagaaaagcggtgcgcaagaagatcttgcgcaccgctttttcagtctgcgttgagaacggtcacggtcagttcgaaaagtttgttgtgaaagatcgcgctctttaaaacttcgggcgtgatcacgctgcctttgcggatgatgacgttgccgcgcacgtcggaaatgtcgcgcggcacccgcttgcccgtcagaagattgctgcccgcctgcgcgctcgccgcaacttccttttcgcaagtttcttcgctttttccgactgtttcgggcgtttcggataggggagccgaaagctttttcgcggcggtctttttgggcgcatcgcccagtatcagacactcgccgaccccgtgtatcttttcgggcgggcacgtttcgcccgaggagaggagcaccgatctcacaatctttccctcgcacacaaagtcctgcacgatccccagtaagtcgccctgttcggaaagaacgcgcatgcctacgggcgcgggaacggtttctttgggcggttttccgcccagtcctcggatcatcacgccgccgtcgcccgatgcgcggatcgaggccgcaggcagtataaactcttcctcgtcctcgtctgcacagacgagcgcgcgcaccgcatccagttttttggacagccgcgcgccgatcacataccccgcaacttccccgctgatcaatacgacgggttttccgatggtttcgctcaaataagtttccataagccacctcacttttacttcctccattaacttattgtgagagcgcggcggatagaagcgcgaaaaagcagaatttttgtcgaagaatacgccatttgcgcgtttgactttttttttgcgttggtttatactgaatttatggatacaaagttgattttaagagaagtgcttcccgcagattacgcgcggctcgcaacgctcgcctcgcgcctgtggcacgccgcctacgatgatatccccgagatcggcagcgcgcaggtcggatacatgctggaaaaatttcagagcgttcccgcgcttacagaacaggtatccgcgcacggctatacctattattttgtggaatgcggcggcaagatcgcggggtatacgggcgtgaaagaggaagaggacgcgctgtttctctccaaattgtatctcgatcccgcattcatcggcaaggggatcgggcagaaaacgctggcttgcgtgagaatgatcgcggaaaatctgcgccttgcacgcatttatctcaccgtgaacaagcacaacaagagagcgatcgccgcatacgagcggttcgggttcgcgcgcaccgaagaggccgcttccgatatcggcggcgggtttgtgatggacgattatatttatacttacgatctttgaaaaaaagaacgccccgcgtcttgacgcggggcgtttgtatcattcttctttttgttcatcggctgtttccgacggggcgatctctgcggcaggttccgacaaaatttcttccgtcggcgccgcgtccgcggaaaccacgttgcgcttgatctttttccacttggggcgcgagaacacgccgaggcagatggagatcgcgtagatgatcatgaacacgggcgaaagcaggatcgcgggccacaattttttaaagggaacgtccagttttttgcggtcgagccccgccgccagcaaggattgcagcgtaaacggcagatagaacgcgaacagcagaatgtagccgatcagttttccgatctcgatgagaaaggcggtatccgccaccaccgcggcgaagattattttatagccgtaataaagggggaaccacgtgcacgccaccacggcgatggggataaacaggagcgttaaaaacatatccaggtatccgaaacggaaagtggtgaagaatttccccagacagcggaagccgtgggaaaagaacagtttgaacagtccgttgcccatgcgcttgttgcggttcacggtgtctttcaaagaggagggctggtcttcgtacaccatcgcttcgggcacgtaataggtgcgctcgccttcgagcatggcttgcagcgtaaattccgcatcgtcgctcacgcccatacatttccagccgtcgtgccgcttgatgatctccgcgcttaccatcatgcccgcgcccgtcagcatctggtcggtatgcagtcccgaacgcacgtgacaggcgatgcggctgtcgcggatatagtaaagccccgaaacgcccgtccacatattctgtccgaggtttttgctgttttcatagcaacgggcgatcttcacgcccgaatcgagcgcgtcgttcatgcgcgcgatatagtcctcgttcatggtattgtccgcgtcaaagtggataaacgcgtcgtaattgtcgtattcggcgatgatcttgcggaagccgtgctgcaaagcgtaactcacgcgcttatgcttgggatcgtcgtcgttgtgttcgaaaacgatggcgcccgcttcccgcgcgcgctgcgccgtgttgtccgtgcagttgtgcgcgaccacgaacacgtcgaacagttcccgcggataattctgtttaaagagcgtccgtatggtatcgccgatgacttcctcttcgtttcgggcggggatgatgatgccgaaacggtgctgtttttccgctttggggtattttctgggtttgatccagaaaaacagcacgtatatgatttgaacagcaaaggcgattccgcacaataccaaaaatacgttattgataatgtcgatcaccgtgttgaaaatgtgcatgtatcttttttctccttgttttcttgcctttgtatggacttccgaacaattatactatataaatcatgtaaagtcaatcgcggaaacctaaaaagcggcgcttttcaagcgccgctttgtgtattatatttccaaatcttccgtcagttcgtccaatcccacgccgagcgccttgctcaggcgcaatagattataaagacccggctccactttgttgcgttcccattcgctgatgcgctgttgcgtcgtgcctaatttttcagccaactcctgttggctgaacccgtttacttcccgaaatctttttaagttatcaccaaaagtattcatgccagtatttttatatcattctccgtaaaaagacaagtgttacactttttttagtgtcgtattcggaaaaattttcgcccgaattaccgttgattattcatcgtataatacacttaatatagtgaataactgccgctgatcttcgaggaatactataaaacgaaataacgtgaataggactaagaaaaaaccgacctctttttatagtcgccgatctgcacgttagatttcgccgcggaatttttttttgaaaatttttaaaaaacatattgacaaatgctttaatttatgatttaataaaacaggaaagtttctcgagaaaccttttgaaacgacaaaagttattcgagaaacttaataatttcaaaaagggatatccctttttttactttggtcaaagaccaaagtaaaaaaatggacttcacggaatgaaaggagtggacatgaagagattcttgagttgttttgtgttatccgtaacgcttctgctgtttgccggctgcggcggtacgggcgacgacggtggaaacggcaacaaaccggaaccgccgcaacccgggcagacagaagtgacgcttcgctttaacgcggattcgggttgggtcatccacaaacctacgccgacgaatatcaacggcgtttaccgttacgggccctgccttttgttagatgaaaacggcgggatcggcatgtatacggcgtcccctggcaattcctatgcggaatgggattgggggcgttacagatactctgcggacggcggtaagacctggggcgacgaggtggtcgcggtcaagccgacacccgggcaaatggattccgtcagcacgtgcgatcccggggttttcaaaatgggcgactattattatgccggatatacttccacgtacgaggcgggcggcgtaagcaacgcgatctttatcgcgcgcagtaaaacgccgcaaggaccgtttatcgaaaagtggacgggaaacggctggagcgtttacgaatcgcgtcccgcgatggtctatgacggcgatcctacgaaattcgggatcggcgagccgagttttgtcgtcaaggacaatcagatctatatgtactataactggtgggacgccgaagcggacggaacgacgatctcgcagacccgcgtggcccttgccgaagcaaacaacgaaaactggcccgcgactttgcaggagcacggcgtagccttcgataaggtctattcggacgaggacagttcggatataaaatatgtggaagagcacgatatgttcattgccgtcaacacggcgaaacgcttttccaaagacagttttatcgcgttttacgaatcaaaggacggcctgacctttgagcacagcacggtcattaaaaagaacattgcgcagtattgccataacatgggcatttcgggcgacgagcaggggcatatcaaagcgggcgatcccatttatatcgcatacggctatgcgaccgggccgaacgtctgggcaaactggtatacgcgcatgcacaaggtgacgatgaccgccgtcaaacccggcacggaggacgcgcaggacggattttccaacagtctgaagcccgattcggaaaagaagacgcacggcggcagcgcgatcgaaactattcattcccgcgaacccgcgctgtatctgaacctgacggacactacgcagaagatcagccttttctcgatcaataacgattaccgcgaagaggagatcacgggcagtgataaactcgaatacacggtacagaacgaggatatcctcaccgttacggcgggcggagtcattcagccgaaaaaggcgggcataacgtatgtcaaagccgtgtatggcggaaacgagagtgcgtacgcgctgattcgcattaccgtatgcgacaatcctttcacacgtgcgatcgcctctgcgggggcttcgaacctttccgcgatcaacaacggcgggacctttgcgacggcgagcattgcggcgggaaattccgaccgatggttcggcgtggaaggaaagagcgcaaaaatcacgggcgcggcgatcttccccaaataccaggggcagggtttcccgtcggtattcgatctgcagtaccgcgcgaacggcgaatggaaggacgttcccggcatgacggggctgcgcttcgttgtgaataaagcgtcttcggtaacgcccgtcgtgcttcggttcagcgaacccgtgacaggcgacgctttgcgcatcgtggataaaagcaacgcggatatggcgtttgagttgggcgagtttttacctttgacgggcgatatggcaaagacggaactttccacgctgaagagcgagtatgtgctcgatctgtcggagaaaccgcgcgcgcagatcatgctcgaagcggtctggaacatcggtttttgtcaggaatattacggcccgcagttcgtgcgctattcggattacgatacctctgtcattgcaatcgacggcaacggaatggcgacggcaaaaaaagcaggggaaacgacggtcactttggagtttttcggtcagaagatcacctgcaaagtgacggtgcaataaataaggagatatttctatgaagactgttttgaaaaaaatcgtgttgatggtcttatcattgatgcttttattcggcatggctgcctgcggcggcggttccgggaacggcgacgataacaatccgggcggaaacacttccgcggagaagagcggcacggtcacggtatccattcccgccaacgcatccacgcaatatgcctgggaagcgatggaatatgcgtacgaaagtttgcccggcaacgaaaaagtggacgtaaagatcgaaacgaatacctcttccgaggattatacgaccaaacttttacagtcgctgacggcaggggcgcagaacgtttcggcggatatcgtcgttgccaacgaggcagggcaatatctgaagacctgttttgcagactatatgccgtatctcgccaaaaaaaatccgtatgcgaataatcagatctggcgcgatacgctggaacaggcggcgtacgccacctacggcgccgacgacgaactgtatatgctctcattcgataccacgcaggtattcatcgtgtacagcaaatatgcgttcgccaaagccgggatcacggaagttccgcagacctggaacgaactgatcgcggcgtgcgacaaactttccaagacggaatccccctccaagggtgaaacatacgtgccgatgtctttcggcggcagtaaatcctcgatgggtatgccgctgagttggctgatccgcatttattccgatcaatatttccgcgattttgccgaaatcgctcattccgcagacggcgattatacctacgatcccgacgtcgacgcggattgggaattgagttatgcgcttgaagactacgagggcacggacgtcgaaaagaaacagggagcgatcaacaacgacaatccatttgcatacacttccaacccgctgcgcgcgctgaacgcgtattacgaagggaccgaatacaatcccaagggcgcgcgctggcaggatatgatcaataatctgaatctgcttttgggaaatcccgattatctgaacgacgatctgtcgcagaactacgcgacggcgctgaccaatatgtataccaaccgcgcgggaatgtgcgtggtcgcctccgactttctcctcgcttatgccaaccagatgggatacacgatggatcaggtgctggaagtcttaggcatcttttacgcgcccgcgatgaccgcgttcgacaagaacgatcccgaagcggcgcccgcggccgattatacgcgttcgctcggcggtcccaacggatttttcggcgtcgtgaataaaaacaaggcgcagacggatcttgcgatggatttcatgatgttcgtattttccaaacagggacaggaagtccgcctgaacaatatcgcggaaaacaacggttccatcaacgggcctctgctcgtgaaggacgtggagatccccgagtcgctgatgggccccctgaacgccctgcacgaagcggcgggcggcatgtattattacggcgaaagcgattataacccgtatttcctcgtatcctcgggattgaaagcatacaacggcatgtacgagccgcatgcggacgacgatatcaaggaactgtactggaatttctttatcaaaaaagagatcaagaccgcgcaggacctcggcgcgcagatctatgagaaaatggacgcgtacaagaaacaatatttcgaacttctggattaccgcgacgactgtctgtcaacgccttcgaaaaatccttccaagtaagagggcgctatgataaaaagattgtcaagattgatcttttgcgctcttctcgtttgcgcgctgtcgttttcggcgatcgggtgcgggaatacgggttcgggggacgataatcccccggatcctcccgtcgaaaaactgaccgaccacgtgtcgctcaaaatcctgcccgataccgataaactggtgcacagcccgaatccgcgcgtggtggaaaattcctaccgctacgggccgagcatgatcctcgacgaagaaggcacgctgcatatgtggacttcttctccgggccgctttaagacgcagtgggactggatccgttaccgcagcagtgacaacggcggcacgtcctggtcggatgaaacgatcgccctgacgcccacgcccggcaccgacgacgcgtggagcgtgtgcgatcctggcgcggtgaagatcggcgaatattactatatcggctatacgtcgtgttataacgtttacgggcgggataacaacgtgttcgttgcccgttcgaaaaacgtttacggtcctttcaacgaaaagtggaacggtcagggctggagcacatctgaggcgcaacccgtcgtctatttcgacgaggccgcgaccgatacccccaaatcggacgcattcggcgcgggtgaacccacttttgtagtgaaagacggcgtgatctacatgtactacacctgggataacaatgccgcgggggaggaaggggataacagcgttcgcgtggctacggctcctgcggacgacgaaaactggcccgccaaactcgaataccgcggcgtcgcctttgaacggggcgacggagaggcggaggacagcggcgacgtcgcttatttagaggcttacgaccgtttcatcttcgtcaacgtgtcgaggcggtacatggataactgccgcattgcggtgcgccagtccgccgacggtatcacgtgggacgaagaggtctcttataccagcacgaattttaccaaatacgcgcataacggcggcctttccaaacgtagcgacggacatatccgcaaaggcgatcccgtctacttcgcttacgcccatgccgaaaattcaaacgccaccgtggtaaactgggctacgagaatctgcaaagtcacgttcaaagtgagcgaaaaagtggaaaccgaccgcggtatcacccgactgcagaaagtgccttcgcaagctaccactacgggcagcgcgccccagtcggtattcgtttccgatccgtacgtgcgtatccgtatggggaaacccgcgcatcaactgcgcatcaaacttctggataacaatatggaaacgcgcgttctgagcgcgtcggagatcgcaaatatcgagttttacggctacgatacgtcgatcgtcgatatttcggaaagcgggctcgtcacagccaaaaaaacgggcatgacgcacgtttacatgaaatacggcggcgacgacaggctgagcgataatttcatcgtgtacgtgggcgagggcgcttttaccgaggcgatcggctcgaacgccgcggggcttgatgccttgaccgacagcgacgtggataccgtgtacaacacgcaggcgaacggcgaaaagtggatggggttgcagacggcggacgggaagaacgcgccgctcaaaggcgttcatctgtattcgcagatcgaggcgggcttttatcccgcaacgttcaaggtgcaggtgcgctccgcgggcggcgaatggacggatacggagaaatggtcttatcattttctgtccgagccttccacgtccacggcgatcgtgcccgtgaccatcgtgttcgacgaaacgatttcggcgaacggcgtacgcatcgtgggcgcgggagcgaccgaaacgacggcgatcggactttcgggcatggaggcgtttgccgacgaagacgagatttccgtaacttccgtacgggcgatgagatccgaaattcgtctgcatatcggcgatacttcccagttgaagttatatgtgcgctatcgttttcagtttcaatacgagatctatttccgcgagcagggcgtgacctacggaaattacgatacttctgtgatttctgtcggcgaaaacggacttgttacggcaaaagcgaagggcgaaacgacgatcacggcggattggaacggtacgcagatacccgtccgcgtgatcgtggattgaacattataataaggaggattttatgactaaaacaaaaaaactgtgcgctttggtcgttgcggcgttgttgctgatcgtgagcgcagtgtgcctgatcggttttaccgctgtgcgcggcgaagcggtctggacggcaaagaacggaacgactacgatcagcgggaataccatctcttcgggcgaggggaacgtatttgtcgcggagtatcagaacaccctcgatttggcgaacggcttcgatcttcagttcaaagtcaacaaattcagcggtacaacgggcgaaaactggatcaagggagatgaaaacagcataggctttgctctcagcgcgcagcccggcagcgaaacggcgcaaaaggcgtacgtgttcattttcagcaagaaagcggacggcaattttgccctgttcacttattacgtaaacaatttcaagatcgcggcagacggaacgttgagttacacgacgaacagtctgtattacgataacaccacggcgaactccgatttcgatgctgcctccgcatggacggacggcgcgacgctctctttgagcggcgcggaactggacggcatgcccatgttctggctcaacggctccatggtcaacccgttcggcggcacgattttcgataaaaatcccgcttcggccgcggagtatgtcaaagcgctcgaggaatgctacgagggatttgcgatggatacctccgccatgcacttatacgctttcagccgtaccaatcagcaggcggaattcgagattggcatcgagtcgatggcggaagagtacgatgccgtcaagggcggctggttcgccacggataaggctgcgtcggaagtgatcgaaaacggcgtgcattattccgagatcaagggaacgaacggcatgtcgagaacgagatttatctacggccgcagtttcgatctgacgaaagaaaacatcgaatttacgatgtctattcccgaaggctttaaacccgataaaaatacgtttatcagcgtgcgcggtttcggcatgaatcaattgaccactgtaaaatcggtggcgaaccgcaattacgaaggcttttatttctccggcggcgccacgctcggactgttcgataacggaacccgcgagcacgcgcaggcgcagggtatcaacgcgcagccggctcctacggcatatgcaaacaaggatacggtggagaacggctggctgacccgtaagatttatttcggagataacggaaacggcggctattgctataaggtcaacggctcgaccatcgtcaattatacggcggccgacctcgcgcccgttctcggggatcttacccgcgtacagatcaccgtgatggcggacgaagcgtctgcgacatataaaataaagggcgaatacaaactcagcaatttcgcgcagatgcctacgacagacagtgcggaggaagtttacgtgaaagattcgggaaatgacgttacctttaccgtccgctatcccgcaaacgtagaattcgccaaaatcgaggacgcctcggggcgcgcgctcgcttccgccgattacaccctgtcggaagggacgctgaccctgaaatccacgcttttggaaaccttgaacaacggtgtgcaaaccttcaagatcacgacgaacgtgggcacgacgctcgttctgcgcgtgaacgtacgctcggcggtcagtctgactccgcagaccgcgctgaaagcaaaaatcggacagttcgaagatattaccgtcaaggtggagttggtcggcgaagacgccgtgcgcagcatacatctgaacggcgaaacgctgacagacgttctggaaggcgatatcgtcaccctttccgccgaaatgctcaatcggctgcacgcgggcgagtatgaactgaccgtcgtcaccgaaaacgggtcggcgagcgtcatcataacggtagaagcgatcgcgcagcaggctcccgttctcggcgaagggcaggaagacgaaataagcgtggatctgaacgcggcggaagatatcgtcgtgaaggtcgatcttaaagacggcgccgatcgttacgtgcttttgaacgggcgcgaactttcggaaagcgaagcggtatttgcggtcgacgacagcggcaagggtacggtaacgatccccggatccgtcgtaaaaacgatggcggtcggagagggcaccgatcatttgacgggcggcagtttcgtcaatattatcgagatcgccacggacggcggcaccgccgtcgtgtacgtgacggcagaactttccttaggtgattggactgtttccaaggcgctggagcaggctcccgtgctgaacgaagacggcagcgtttccatgaaagggtatacgctcctcacgaaacaggaaaacgtcgatctgtccgagggctttacggtttccgtaaaattcggcgatattttcgactactccgcgcttacgccttcggatttcgttgaattcgtaatctatgtcaaacaggcgggcgtgcgcatcgaaacgcatatccgcgcgtacaatacgggcgacctcgtttccacgggcagcctggtaacggtagaactgttccagcaggtgttcatgcccgacggcggtcagcctgttgcgaacgataccccgaagggaagcgtaaaactggataaagagcaggtttggtcgatcaaacttctggacgatacagtattgaccatgttcaatcataaagagagccgcgaaaacggacttatgctcagcgacgtcggcaatttgacccgctttgacaacgcgacgatcgagatcgctttcgatacccgtgcgagcgaagaacacgtttccgatacgaccggttcgctgatcgctttcggcgcctttaacgaagagagaaaggatatccccgcatgggcgaaagagtatttcctcgacgcgctggatgcccccgttctgaaagtcgaaggaaataaagtggtttggaacgccgtggaaggcgcaaagcagtacatcgtgtacgtggacggcgaagcggcggagatcgtgagcgctacggaattcgactttaccgattatttctccgacggggaaacgcacagcattcaggtgaaagcggagggcaacggcaccacgttcggtgacagcgaactttccgcagcagtggaactcaaactctccggaaacggaggcaatcccggcggcgatgaacccggaaatgaagaaaaacccggcgaagatgagaagaagggctgcggctcgagcattgccgtaagttcggcaatttccggaggcatagtattgttagccgcggttgctattactttgacattgcgtaaaaaagaggattaaacgaaagaatgaaaattcggaccaaacggttcggcatagtaacggcggtatcggttgccgtcgttattatgctgattatgacaattgtatccgccgtcaacttgaacgaccgttcggccatgacgttgacagcgcacggcttcacgccgacggtgatcgaaacgacggcggataaacagatcgtcggtacccgcgacggccgcgtcatctgtaaaacctacgaagatgaaacgctgtgggaataccgcctggaatcggagggcgccctgcgcgacatcgtggcggacggcggcgaattattgtgtgtgacggcggaaacgaaagagttttttgtcttggacgaagagggtgcttttctcggaaaagtcggcctttcctacgagcctgtcgccattgccgccgatgcggaacacgccgtgatctataccaaactgaagacgaaaaaccaaatggtcgtattttcgcgcagcgggaactcgaccgatttaggcagcgcaaaaaagagcgcgaacgatctgccggaattttccaatatagaaatgacggattcgggcatggttttcgcgctcggcgtcgacgcgacgccttatcgtttcgataccgaaaacgtgtccgcttcccccgaagagatctttaccgttacgaacgaagaattgatctatatgatcgcctcgggcgaaaattatctcgccgttaccaaggacggaaaattcgtggaatacgacggagcgggaaaggttttatcccgtgtcggcggcggagagcggttcgtttccgtatcgtcggacggcggacggatcgtcgcgctgtccaaccgcaacgatatttcctatttcgacggaaaccgcgtttacaaggtcgatacgggcattcaagtctccaagatcatggtcgcggaacagggcgtgtttctgatcgacaaatcggacaatatttccgcctacgatttcagccgtatcgtcgccaaccatacctttaaaattttgcttcccgtattcggcgcgctttcggcggcgggtgtcgtggcggaactgatcgcggtgctgctcgcgtttcccgcgacccgctataagaccgagaattttttccgccgtttgggcaaagcgctgtggacgtacaaaaagacctatctctatttgtgtatccccttcggtttgctggcgatattcgggttctttcccgtcgtatggggctttatcctggcttttaccaaatacgtgccgggcgtaaagaccgaattcgtgtttttcgaaaattttctgtccgtgttccgcaacgccgcgtttttcgcgagcgcgggcaatatgctcgtatttttggtgacggacctgataaaggcgctgatcccttgctttatcctggcggaattcatgtttatcctgcgcatgcaaaaactcggttacgttgcgcgggtgctcaccgttctgcccgggattttgcccggcgtggcgctcatttacatatggacgagcggcatttacggttccaacggactgatcaatatgtttttgcagagcctgggcttttctcagtttgattttaactggctgggaaacgaggaaactgcgcggaacgcgttgattttttacggattcccgtttttaggttcctatattctgctgttcagcgccttgcggggtatccccgattcactgatcgaagcggcgaaactggacggctgcaataaagtgcggcgtatgttcgtgatagacgtaccgcttttgacgccgcaactcaaatatattttcgtaacgacctttatcgcctcgatccaggatttcgggcgcagttatttgaccaccggcggtgaatacggaacgatgatccccgcgttggaaatttattatcagatcaacaaatatttcgattacggcgtcgccgcggctatgagtttattgctgttcgtgctcatatttatcgtcacgcttgccaatatgcgtatcaagacggaatcgatctattgacgggggcgaaaaatatgactttagcgcaatcttttaaaaaggcttgtaaaagaaagggttcggatagtataatagtgcagagcctgatcgtgctgtatatattcctgatggtcatcatggcgcttttgccgctgtttatgactttcgtgttttctttgaagaccacgcaggaattccatggcgatgaattctggacttttcccaaaacgcccatgttttccaactacagttcggcgttttttcaggcgctgccgaacatgctcaactctatcgtgatatccctgatcatcacgtttgccgcggtggtgctcgcagttgcgacctcgtatgtgtttgcccgcataaaatttcccggaaccaacgtattgtttgctcttttgatgtcgctgatgatggttcccatggtgctcacaatgacgccgacctatcttaccatcatcaatctggggctgaaaaataactggctggggctcattttgcccgcggtatcggggcaccaggttggcacgatcttactgttccgcacatttttggagcagcagccgcaggaactgttcgagagcggccgcatcgacggcgcaagcgaattccgtatgtgttttcagatcgcttttccgttagcgctgcccatcatcgggttgcattccatcaatattttcagtgcgagttataacgattatatctgggggttgctgcttatagaaacacaggaaatcagtccgctgatgcccgttttgaaacagttggtggggcgcgcggtggaagcgtcggggcaactcggcgtggagtatgcgctctatctgatggcaggcgcgcctctggtcataaccacgatggtcggcttgaaatattcgatcggcggcgatatgtccgcggggatcaaaatgtaatgaaaacaggaggatacgctatgggcggaagaatgtgtacgagaaaggacgttgcggaacacgccggcgtttcggtcacgaccgtatccaatgtactcaatcattccaaggaagcccgtcctgaaatcgtcgaacgggtcaaaaaggctgcaaaggaactcaattaccatcccaatctcatcgccaagggcctgaaaatgaataacagtatgcaggtcggcgtcatcatcagcgaaatcaacaacccgtattttatcgacgttttacaggggatcgaagaagaagccgcggtgcacggctacaatgtgagcatctttttcatcaaaggggatatctggcataaatataaggacttgatggggcgtcgctttgcgggcgtgatcaatctttccaatattccctacacgcaggaattgcagacggctttaatgaaacaaggcgcgcatctggtctgtttcgatccgctcgtcagttctcaggtcaatttcgacgcgcgtcccgcgctgaaagaattgatgctaaaagcaaaagaatacggtcaccgcaaactctcctatgccgtgggttttcccgaagaggtggcccggcaggatgagcgcgtcaatacatatatgtgcgcgtatgaagaattgggattcgaaaagcatccgtatcagttgatctacggggattttcccaagacgtcctcggagcagaacggcgtgaatacggcgcgttttgcgttggcgcatcattgtgaggcgtccgcctattttgccataaacgatatgtgtgcgctgggtatgatgagcgaattttcacgggccggtctgcacgttcccgacgatatttcggtgatcggctgtgacgggatcgcaatttccgaactcgtctacccgcagatcgcgaccatcgacgtgccccgcaacgagatcggccgccgaatgatgctcgaaatacggaatgcggtcgcgggaggggaatctacttccgtcaccatgtcgtgccgcgcgctgttccgcgaatcgttgggcaaggcgaaatcataacaaataaaccccgatgaaaatttcatcggggttttaagtatgtattaaaaaaacacggccgaaaccgtgttttttggctggggtagctggatttgaaccaacgaatgatggagtcagagtccattgccttaccgcttggctataccccaatataataggagcgcgtccttattaccgaaatattttatcaaatatcgtgggcgaaatcaagcgtttttatgtggtttcggaaaaaaattttaattgcgtatttatttgtaaaatccattgaaaagcgcgccttttactggtataatgaaatcaatactaagaaaaggggagtttatgaaactcaattacaaatcgaccgttctcgtcggctttgcgttcttttccatcaccctgttctggcaggtgtacgacagcatgatcccgaaagtgctcgaaaacattttcaatttcaacaacaccgaacgcggcctcgtcatggcggcggataacgtcgtggcgctctttatgctgccgctcttcgggcatctgtccgataagaccaagacgcgctggggcaggcgcacgccgtatatcgtctgcggcaccgtcctttccgcggctaccatcgtggcggtgggcgtctgcgcggattttgccatgctcgttccgtttatcgtctgcctcggattcaatctcgtatttatgagcacctaccgctcgcccgccgtgtcgctgatgcccgacatcaccgtcaaacccttgcgcagcaaagcgaacgccatcatcaatctgatgggcgcggtcggcgggatcatcgcgctcgggctgatgagcgttctcgtcaaggaaagcgtttcttcgtacatatattcgtttatcgccgccgccgtcatcatgatgctcgcgctcgttttgtttatcgtgttcgtgcgtgaaaagaaactcgttgagcgccgcgaagaagacgagatcaaactgggactggaggacgacaaccgcggagaaatgaatacggtcggccgcaaactcaccaaagccgagagaaagagcatgatttttcttctcctttcggtggtgttctggtttatgggatataacgccgtcacttcctccttttcggtgtatgccgaagtggtctggaagatcgagggcggcggtttttccattcccatgatggtggcgagcgccgcggcgatcattgcctacgtgcccgtcgggatcctcgccaataagatcggccgcaaaaagaccatttacgtggggctcggctttatgctgatcgcctttctgggcgcgacgggattcggcaccacgtttttcggtttccatatggatttttcgggcggcaattatttcgccaacggcgatttttatattttgtgtttcttcttcgctctctgcggcatcggttgggcgacgatcagcgtcaattcctatcccatggcggtggaaatgagccgcgcgggcaacgtgggcaaatacacggggtattattataccgcgtccatgattgcgcagtccttcacgccctttatttcgggacttttgatggatttcggcggcgggatattcaacgacaaggccgagggaatgatgctcctgtttccgtatgcgctcgtattcatcgtgcttgcgggcgtgacaatgttcttcgtccgccacggcgacgtgcgtcccgaactcgtcagcaaactcgaagcgttcgatttcgaggattgacatgaacaaaatcgactataacaaaatgatgaaagaggagatgtcgcgcgcgggaacgggcgcgcggctcttgctgcacagttgttgcggcccgtgctcgacgcgctgtctggaaacgctcaaagacgttttcaaggtcagcgtgctcttttataatccgaatatcaccgatgcggccgaatacgaaaagcgcaaaagcgagcaggaacggcttttgcgcgaaacgggttgggcggacattctgaccgcggagtacgaacccgccgactttttcgccgcggcgtgcgggttggaaaaggagcgagagggcggcgcgcgctgccgcgcgtgttacgccttgcgcctcggctacaccgcaaggcgcgcaaaagaagaaaaattcgattatttctgcaccacgctctcggtatcgccccacaaaaacgccgaatggatcaacgaactgggcgacgaatacgccgcgcgttgcggcgtgccctttctgcattcggattttaaaaaagaaaacggctatctgcgttcggtagaacttgccgaaacgtattctctgtaccgccagaattattgcggctgcgtcttttccgattggcgaaaataattttatttcagccgtattttttcattgacattgcgcatatttatggtatataataattgcaaccaaaacggttgcaatttatttttttagggaaaaaccgatgaaattgtcttcaaaatcgcaatacgggctgaaagcctgttatatattagcgctgaattacgaaaaacgcagtttcagcgcgagcgctctggaaaaggagatcggcgtatcgggcaaatatctcgaacgcattctccgcatgctttcgggcgcgcggatcgtggctgcggagcgcggcgtgagcggaggataccgtctcgcgcggaatcccgcaaagatcaccgtgggcgatatcgtgcgcgttctggaggacgatctcgacatcgtggactgtatcaacgcgtcgtgcgacaaatgcgcctcgggttcggtctggaaacggctgtacgagggcatcaacggcgtgctcgattccatcacgctcggttcgctcgtcgaagatttcgagggcggaggcgtttgtaaatgcgcgcatatgaaaaaagaaaaggaagactgaacatatgaaacgtatctacttagatcacgcggcgacgacgggactggacgccgcggtcctttcgaaaatggcgccgtatttttcggacatattcggcaacgcgaattcccagcattccttcggccgcgaggcggtcagaggcgtggacgaggcgcgggacaccatcgcttcgctcatcggcgcgaaacccaacgaaatatatttcacttcgggcggtaccgaggctgacaactgggcgatccgcggggcggcgcacgcaaaccgcgcgcgcgggaatcatctgatcgtcagcgccgtcgagcaccccgccatgcttaccaccgccagagaactggaaaaggaaggattcgaggtgacgctcgctcccgtggacgaattcggtacggtggacgtagcgaaactggaagaaagtatacgccccgaaacggtttttatcggcgtgatggcggcaaacaacgagatcggtacgttgcagccgctcgcagagatctccgagatcgcgcaaaaacataaaatcctgttttttaccgacgcggtgcaggcggcgggggcgatcccgctcgacgtgaacgcgccgcgcgtcgacatgatgagcatttcggggcacaaattttacggccccaagggcgtcggcgcgctgtatatccgttcgggcgtgaaaacgggcaagatactgacgggcgggcatcaggagcgcggcatgcgcggcggcacga

SEQ ID NO: 2527 - DNA, 2056 bp, Unknown
  16S sequences of unknown bacteria
gtaatattcataagcagataaatttttccaaatggttcacttataattctaaaatcgcatatgctaatgttgaggttatctttatgttctaatctccagaaagaagggatgattggtgaactactccagtatgcaaaatcaaaatttgtttccccagtgtatgtctatgttctcagctcaactgcaatcctctgtttcggaacaatcaaatgtagaacctgcaccattatcaagaggaaatttttatgcattgttttcacaaacaattgaacaccaaggacagccggttcattttgacggtatgaccagtgtatccggcttaaaaatttacaaacagtcacatattgtcattcaaaacagtggtacgtacttaattagttacagttttactccttgccaaggcgtaacatcgggagattttgtaggaattaaagtaaatgataactggattaccacatcattacaatcgttatcgttggatgaggttggtattcataaaacgtttttgtttgaccttatggaaggccaagaactgcatatggcggtacaaagtgaaaaaaacataatcttacaggccggaaatgcaaatgctaatttatgtctgctgcaggttgtaggaagaaaattgtaaggatatgaggttatcacatgaaaaagaaagtattaatatgggaaataacaggattcttagtggtttgtgctttaagcggtgtatttcactttatatatgattggagcggaaaacaaacatggattggatttttctgtccggtgaatgaaagtacatgggagcatttaaaattgttgttttttccagttttgattttcagtgcgattgaatatatctggattagaaaagaatctaaaaattttatcgctgcccgagttaccggcacagtattgggaatgtttacaattatagcagtattttatacgtatacaggaatattgggaaaccattatttatggctggatttggtgacatttttcatcggagcgcttgtaacgtttttatataccaattatggtatgaaacgttacagagaaaaaacttccacgacgattatggccattgttgtgtttattttgttttttgcggcatttgtgattttcacatattatcctccgcatattggattgttccgtgatccgatatccaccaaatttgggataatagattaaacgaaaaacaaagcgcttttacctattttttgtatctatttgtcatttttgatatattggattttattacttgcgaactttctgatttattttctgctttttcattgacaaacatcgtaaactagcctatagttagtaccatgcctgacaaagcgtgtttggtataatattttataaaagaggtactttattttatgtacgagaacaaaactttaatttgcaaagattgtggcaacgaatttgactttactgccggtgaacaagagttctatgcagaaaaaggctttaccaatgagccacaacgctgcaaaccttgccgtgatgcaagaaaacaaacaagagacgatgcaagcagaactacaagagaactatttgaaactacatgttccgaatgtggctgcacatgtaaagttccatttcagcctagcaacgatcgtcctgtttactgcagtgattgctttgcaaacaaaagataaatgtgcttcattgcttgaaaaattactggatagtttctcacaccctttaggtgtgtttttatgaaaaatgcgcttccttcttattgataagaaaaggaagcgcatttttattatgtgtatttccatggattttgttgcagataaaggtaaaacaaagtttctcttaacatatggtctgccatcaaaggaagaataattgactttattttgcagtttaaaataccttgcaaagcagattcgtttaattctttgaattgaatggtctgtgatacgatctcttgtggcggcttgctcatttgggtttttgacttttttaatctctgcgtatcttgcgcaaacatatcggaaagagcaatgtttttccgaatgaaactttgttctgttggatccatcatacc

SEQ ID NO: 2528 - DNA, 20284 bp, Unknown
  16S sequences of unknown bacteria
gcattttggttggcgtttcacgctatgatcatgctgtaataacctcacggcgttgccggaaatcgaagattttctcccgtttgtcagacagaatacccgcaaaggatgtgaactctatgacgaaaaaacagactgccgaagaatctgtgcggcgtctgaaagaagcctatccggatgccatctgctctttggaatccactcagcctcatgaacttttgattgccacacgtctttctgcccaatgcacagatgcgcgggtcaatattgtgaccaaggttttatttgatcgatatcgcacaattcacgattttgcggttgccgatcttgcagatgtagaatctatcgttcatccctgcgggctttataagacaaaggcccgcgatattatcgccatgtgtcagatgttggaacgagattttgactccacggttcccgacgaaatggaaaagctgttaaagttgccgggaatcggccgcaaaactgccaacctggttttgggagacgtatatggcaagcctgccgtagtctgcgacactcactgtatccgaattaccaaccacatcggcctaaccgatacaaaagatccactgaaatgtgaaacgcagctaagaaaattgctgccaccggaagaatccaacgatttctgccaccggctggttctgcatggccgtgcagtttgcaaagcccgcaatcctcaatgtcaggactgctgtctgaaggatatttgcaaaaccggtaaaaaagcctgacggagggctgatcatatgctgtcggaattcatttctctcaaacggattctcataaatatccatactgcatccatagaagaagcggtgttgatctgcggggagcttttggtcaaagacggatgtgccagccccgaatatccggctgcaatggtggaaaccgttcggcagctgggggattccatcgtcatggcgccgcaaacagcactgcctcatgctgctttttcaaaagggggtctggttccggctgtctcggttctccgtttggcccagccattggatttgggcggggccaacggtcctgtcgcgcttttgttgggcttttgcggatctgatgcagaaagccatatgaaagtattggccgctctggcgcagtttttcagcaacccggcggctatttcttctttgctgcgcgctccaaccgcggaggagctttaccggatgctgtgtcaatcaaacgaccgctgagtggcatcggtatttcatgataacaaaagttcgcgcatccaggttaagacgcatgaacagaagtgatcaaaaggagggctgggccatgggattttttatgagcggcggttttggaataatgttttttctgatgttctctttggtaatcggaatgcttatcctgaccgcgatccggggaatttcccaatggaataaaaacaaccactccccgcggctgacggtggaagctacggtagtcgcaaaacgcgaggaagtgacacatcatcagcacaatacgggaaatcatacgatgcacctatccacctccacctggtactatgtaacctttcaggtggaaagcggcgatcggatggagctgggcgttggtgggtatgagtacggaatgcttgtggaaggcgattggggccggctgacattccaaggtacgcggtatataagctttgaacgaagcagccgcaactgaccgaaatccagccagtttttcactgcggatttcaaatcaaacagataatcccccctgtggtcttaaccacaggggggattggttttgcaaagaatttttacgcccaaaattttctccatgttatactgctgttttttcgagctctgctttcagccatttcatgatccttttctccaggcgagagatataagactgagaaataccaataatatccgccacttctttttgggtatgttcacttttcccgcccaaaccaaaccgtaattccataatgatacgctcccgctcacccagttttgccactgcctccaacagcagattcctctctacctgattttcgatattccggtttaccgtatcactgtcggttcccagaatatctgaaagcagcaattcattgccatcccaatcgatattcagcggttcatcgatggaaatttcatttttctgagactgcgtttttcgcaaatacatcaaaatctcgttttcgatacatcgggaggcataagtcgccagcttgatattccgatccggacagaaagtattcaccgccttgatcaagccgatggttccaatggaaatcaaatcctccacaccgatgccggtggactcaaatttacgtgcgatatagacaaccaagcgcagattatggacgatcagcgtttcccgtgcctcggcatcctccggcagccgctgaaagacctgcgcctcttcttccctggtcagcggagccggcagattttccggcccatttatgtaaaagaccgactcttttcctccccaaatacgagccaaaaacgcggcgattttctccctgattgtctttcccataccgatcccctttttcctgaaaacttttctttgtccggtccagccgctgcaaaccggggtgaagcagaattccatatccggaaccaaaaaaatcctggtcggcaatcgcggccatcacctgctccacctgctggtaccgtccattttgcttaatggtcagaaaatccggtcgaactactggaagcagacctttttttcctacggtttcatagggcacaaaccggatcccctgttcggcggctttttcgattcggtccgggccggaccgctcaaaatacgcgatcaacggtgcggaaagcagctcttttaccgattgatagcggcaaaggactaccggtagcccgctgaaaggatctgacagtcggtttccggtatcgacttctcccagcagggaaacctgtcttccgtctattccgatttggacctgtgccaagcccctttcttcccgctgggtctgccgatggcgggtacacagccacacggctccgtaaacagttaatacgcccagcaccaatatcatcgccgggatatggaaataaacgacgccgtttccataaagcatggccggcggcgaaaaaagaagccatatggccaccatcagcccggcaaacaaaaaacctgcgagatacagcaacccacactgaaataaaaaggtgcgcagagaacggaaaggaaatgcgaccgcagtcatagctgccgccgctgcaatacgagtcaaggtcagaaccgggccgctcaactgaggcagcagcaaaatcaaggcataaattccacctagaaacgccgctgtcaaaatccggcccacttttttttcccgccctgccagggcagcggtaatcaaaagaagaaaaaaattgattactgtattgaggaacaccaaaatatctacatatatctcctgttccattgtatcccctcctgcttgccctacctagaattataggcccgggacaaggataggctttgtcaaaacatgtcgtcccggtttgaaaaatcctatggccgctttcgattgttgtgcaaaaacggcggaatcacaaaaataaaaaatccccgctgaaagcggggatggaccatctgcgggaattctcttcaggaacagaatctaccagacggtttactaagaaataaaccactgctcgattttacattgccactgttcgtttttctgtttcactttcgcatccgaatagccaacggcgcccagtccgctgcgccatttcattcctgataaggtaaaactgcgtccggactgatttttttccgagaacgacaggatcattccatctttatagtacggattatcccgatcgatctggccttcttcgcaaagctgttcataggtggattgaaaaacttctttttcataacggcagcccaccaaataacaaaccgcttccttttccccctccgttaaattggtcacttctgtcaaatccaacacgatcttttctgctccgtcgttaagacccgcgcccttctggtacagctcgtcgatccggtccaggtaaaaaggcaacaggctttcaaacgttccggtcatttgcagcgcggtaacgccgcctaactggcagggataagtttccagcaccgatccgtcatattcgatccgaacggtcgttccagcttccagctgagatggctgagcggggtttccctgctcgtccgaaatctctattccagcaggtgtaagcagaatcagatcttctgtcgccatatgctcctcttcctgcacgagaagtaaggattcttccatccggtacaaaatccggcaattcagactttcagtcgataaagcagaacccggcacgtcctgcggcagagatgaagatccctgttctggctgtccacatcctgtcagaatcaaaaaagcggcggccacggcaaaaacttttttcaaaacaatctcctcctttttctttctattctttcagtgtaaaaaaaggagggtaatcctgcaccatattttcacaattatataaaaagctgcttgtgtaactgcaaatagcaaatcgtatgccgttggaacaaaatgtgcagaaatatcacaaactatcttttatgccctcatccggcaaaaaagggaccagctttttatccggccctcgtaaaacagttaacccggcctgtgagtgcaatcacaggccgggcctttgtatcttgtacgggtacggcacaagccgcgctacttcctttatatccaaaggaggcctttggaacgctgaaaacacgcactacaaattacaccaggggcaaaagcgtacaaagcgtgcgctttcacctttcaacaaaccggaattgatcagctgattggcacatcatagcgatgaaccgtcatgccggattcctcaccataaatggcgtctacaaactttccgccattggcaagaattgttctgttgctgccgatgttgatgtcacggcaaatgatccgcacatgatccatgcccagccttttggcttcctgcaaaacgagccgcaactgttctttggcatagcctttccttcgctcactggggcggatcgaataacccacattggatgcaaaatccgggtcatcatcatcgtattcaagtttatgccgcaggcagcaaaagccaatgatttttccgtcgctcatccggaccgacatataccatgtaatcttgcctttaacggtatccagaaaacaaagccattcgggaatactattatagttttcaagataatccattccgggaatcctgtcaggatcataggtaacccgtatttgttcaggtgaaaactctgctttgtattccgctatctgttcagcatattcgatagatggcttaaaaagccttagttcttccatattcgtgtctccgcagattttaaaattatcggcatcttgcccaaaaaacacatcttgattatgaacgttccataacaggccacagcagctcatcctgcttgcgcctgttcgctgttttgccaacaccgtccgtttcgccagcctctttttacgtcaatcctctaccaccgtataatgggtagaagcatcctccttcgtcgcatactcgctgaccttcagcacgcgcaccttaatcggccgggtacccatctgaatagagatcagatcattctctttcacctcataagaagcgcgagccactttgccgttaactaaaattcttccggcatcacacgcttcgttagcgactgtccggcgcttgattaaccgggtgacctttaaatatttgtccaaacgcatcataaaactccttaagaaaaatgcgtaaacacaagaaatctccccgtgtttacgcaacgccctttcccgtttgcagattcttatttggaaactgcatctttcagcgctttaccagctttgaaagaaggcagtttggaagctgcaatggtgatttcttttttggttctggggttgatgccctttctctctccgcgctctttcacctcaaaggtgccaaagccaaccagctgtactttatcgccgccagccagcgcctcagaaatcgcatcgattacagcaacaaccgctttatcgctgtcttttttggaaaagccggttttctcggcaaccacgttaatcaattcggttttcgtcattgttttttcctccgtttagttcaactttattattgtgcagacatgcagacacatccgcttaataactttttttaatctcctgccaaatttcatccagtttctggataccagccgtcttcatatcaatgtctctttgtcgggccaacttttctacctgcgcaaaacgcttcacaaacttctcgcacgaaagtcccagcgactcctccgcatccgcgcctataaaacgcgaaacattaaccgcgctgaagagaaggtcgcccaattccagtccccgctgctctggcgtgccgtttttcaccgcatcctccagctcgtccacttcactgcgtaaatcacgaaacgcatcggccacgctgtcataatccatcccagcacgggatgcccgcttttggattttttctgcccgcatcagtgccggaaggacttttggcacgctctccaacgtttctgccgccgttttttgccctttttcctgctgcttaatcatctcccagttggacaacacctcttcggcggtatccactttgacatcgccaaaaatatgaggatgccggatcaccagctttttacagatgccatcacaaacatcatcaatagaaaaagaacctttctcttcctccattgccgcgtgataaatcacctgcagcaaaacgtcgcccaattcctcctgcaaaagcaccggatctgcggcgtcaatggcttcaatcgcttcatatgtctcctcaatgaaatttttccggatcgactcatgggtctgctgtgcatcccaagggcatccgcccgggccgcgcagaacacgcatgactttgaccagatcgtcaaatccgtatttgtctttcagaggaaaatccgcccgcattttgccacctcgccgtcaaacatagtaggcttattcatcttaccctattaacctgcatttttcaagtagttttgcgattttttctcccttcggaagcattaaaacatcatatttcacaattccccgcaccaaaaataatacaatcacgtacactgcgcctgccagcaggatagatatggcagtagaaacggtatttcctgccagattggaaagtagtccatagcttgcccatgcggtaacaccgcaaagaacaccagcaaaaagaggctttaaaaacacttttgtgaatcgaatccggattcccgctgtcctgcacagcaccggaatcgaaatacagacaatcagcccataacacagcagtgttccatagggtgcgccctggatgttgactgccgggatcggtaccagcacaaaattgaccgccagctttaaaaagccgccaagcaacatcagctttaccggaacgttgaccttccccaccgcttgcagcatgctattggtaggcgaactgagcgccacaaaaactgccgcaaggccaagaatgcgtaaaatcggcgcagcaatgggaatcgaagccggatccgcttgataaaccagcgtcagaatcggctctgccagcgcgcaaatgccaaaaccagcgggaaatgcaatcatcgaagtaacccgccataccgactcgatattgcggcgaagcagggatttgctgcgggcagcccaggcggctgttactgccgggagggcgctgaccccaaaggttgtcgtcaacgccggaatcagattaaaaagcgtgaccgacatattataagccccaaagagataattgggaatttcatcctgcggcgtattggtcgggagaatcccgtcatacatggaaagcagcacctcgctgccgcgttctaatgcagtggaaaggcggtttgtcaatgagctgacgtcaatcaaggtggtaatgttcagcgccagcgcgcccaggcagatgggaatggcaatggtccaaagctgctttagaatttccttgctccccctggctggtgccgcatgttccagcatctgccgggaaatgccgtctcccttacacctactgtatatccataaaaatagcgagcccgctgcggtactgaccacaatacccaaaatcgcccccgctgcgccgtaaggcagcacggcaagctgcgcctgtgacgacgtttcaaccgcagtgccgaataccctgccgaaccgctcatattcctccaaacccaaacggacagcagcagaggaaaaaagcagcccgcaggccagttttactaatgcctcagaaatctgcgaccaggcagtggggtacatattgcgcaagccctcgtaataaccccggtaggaagaactaacacagacgaaaaagatcgccggagccatgacaaataccgctaaaaaagcattggggttttctgcaaagcgcacgtatggacctgctcccgcaaacatcagcagcgtacccaacagcccggtacacagaaaggaaaccgtagacaagcgcttgattttgcgtacatcccggtaacggccctgctgcatgttctgtgccaccattcgcgacacggcaatgggcatgccggctactgacagcgcatacagcgtattaaacaatccatatgctgcgttaaaatagccaaagccgctgacgccgataatccccttcagtgggaccttgaaaaaatacccgatgattttgacaattacagtggcgctcattaaaatcaaagcgccatgcaaaaaattctgtttttgctttgccgacaaagaaacacttcctttgctgtctgtcaaacaagttgtttaaaattgcttttacaaaaaggcaggctttgacaggcatcctgcacgatctgcacagctttcaaaaatgcttatgaaatcttttcatcagttagaccgaatttccggatatccctgtcatccaagcctgaaaagttgtttttcatcatagcatatctaccatctagattcaaccaatcgtccgtgaatatacctcttttttcaaaataatcacttcaaaaaaggcctccgattttacacgggtgctcataagaaagtaattcaaaaaattacgattatggcatctatcagacggggtcggtaaacgcgataacgggtattcggtgaaagccgaatacccgttattattttgcccatgcgtggaagcaatagatttattcgcatttttcgtgtataattaattcgtatcttttctagaagcaaacaatcggtaacaatttcgttgacttttgcatacacatacggtatagtattaatatctctttgcactgcattacattccgaaaggaatgcgagatcaacagtacaaactgagcaggcgatgcccgtaagggcgcggggccgggtcgcgttgcaagcggcaacagaatgtgttttttgagcatatctgtgggacagtgcgtatgtttcacgggtgtgctatttttataccatttttcgggaatagccctatttgtgaacgtatacgacctcaaatgaagtgccataggggaaatcaagacaccgtaatgcttttcaataacgggaaacggaggattcttttatgaaaagcactaagaagaacctgacaggggctgacccatgatgaggtcaccaagcgacagcagcagtacggcaaaaatgaactgatgctcatttgcgagggtgtaaaaatcccggcagatggcattattttgcgttgcgccgatctctgcgtggatgaatcccccctgacgggagaggctgagggtgtatggaaaatccaaaccgagaacgctgaaccgtcagaggattactggcgtaaggattattgttaggccggtacgctcgtcacgcaaggaaacgccaccatacaggtagagaaaaccggcgcgtctaccgagtacggtaagattggaatgggtgttgcgtctgctgctgccgaggatacgccgcttcagaagcaaacaggaaagctcgtaaaaacctgtgccatcatcgcgggagtcctgtttgttctcgtgggtgtgtttacatggctcaacattcccgaccacaatttttctgaccgcctgatagaaagcattctgtcgggcgtaacgcttgccatggcgatgattcccgaggaatttccggtgatcctgaccgtctttctttctatgggcgcatggcggttggcaaagaaacactcgcttgtccgcaaactgcccagcgtagaaacactcggtgcggtttcagttctttgcgttgacaaaaccggaactattactatgaaccaaatgaccgtacagagcacatgggtggcatccggcgatgaacatacactaattgaaacgatgggactcggctgtgagactgaggcatatgatccgatggaaaaagccatgttccgcttctgcgaggagcaccagatttctaccgaaaagctgttctctggcagatttgtgtccgaatacgcctttacaaatgagctgaaaatgatggggcatgtttggcaaagagacgggaagctgatcattgccgcaaagggcagtgccgagcggattctgaccatctgcgagctgaccgacgaacagcggaaagaagcggaagaaaaaattgattccctttcctcggaaggattgcgcatcatcgcgattgccgcaggatatcctcagaccgaaaatgaagtaccggcttctattactgattgccgccttactctgctcggactggtcggacttgctgatcctccgcgtgagagcgtcaagaatgacattgcggtttgcaccaaagcaggaatccgtgttgttatgatcacaggtgacaacggtattaccgcatcagcaacagcaaaaaaggtgggcataccaaacagcgatcacattgttacaggcgatatgctggaaaaaatgacggatgcagaactgcgcgaagctgttaaggatgtttctatcttctcgcgtgtcattccggagcataagatgtggatcataaaggtgttcaaagataacggagaaattgtggtcatgacaggcgacagcgtgaacgatgcaccggcactcaaatatgccgatatcggtattgctctataaccattttaaagacaagtacagaagataaattggaacattagaaaagagaccgatgcaatcaagcatcggtctcttactatctgattaggcgcaatctttggtgtaagtatggtgtaaatcgagatgtttaccacacacaaatccagtgattgcaagggttttagactggttatcaatacatgccgcccatgccaccagcaggcattgccggtgcaggattctcttccttgatgtccgcaaccaaactttcagtcgtcagaaccatcgccgccacagaagcggcattctgcagtgcggagcgggtcactttgacaggatctacgatgccgctggagatcatatcgcagtatacctcttttgccgcatcataaccatagcccaccttgccggagtttacgattttatcgatgatcaccgcaccatctaagcctgcattggccgcaatctgccgaacaggctcttcaattgctttgcggacgattttcacaccggtcttctcatcgccctccgacgtttcgagcagcgcttctaccgccgggatggcgttgatcaacgcagtaccgccgcctgctacgatgccttcctccactgcagctttcgtcgcggacagagcgtcttcaatacgcagctttttatctttcatctccacttcggtcgccgcgccgactttgatgaccgctacgccgccggacagttttgccaagcgctcctgcagcttctctttgtcaaactcggaggtagtggtctcaatttgagctttgatctgatggatccgcgctttgatttcgtcggaagagccggcaccgtccacgataatggtattttctttctgaacctttacttgttttgcacggcccagctgatccatagtagcatctttcagttccagtcccagctcctcgctgatgacctggccgcccgtcaggatagcgatatcctgcagcatctcttttcttctgtcaccaaagccgggcgcttttaccgcaacgcaggtaaaggtaccacgcagtttattgacaatcagggtagacaatgcctcgccttcaatatcctctgcgataataaccagttttttgccggcctggacgatctgttccagcaaaggcaggatttcctgaaccgcagaaatctttttatccgtaatcaagatgtaagcgtcgtcgatcacggcttccattttatccgtatcggtaaccatgtaaggagtaatatagccccggtcaaactgcataccctcaaccacttcgctgtaagtctcggcggttttggattcctcaatggtgattacgccatcggcagttactttttccatcgcttcgccaatcagtttgcccaccgattcatcaccggcagaaatagcagcaacacgctcgatatcagctgtgcaggtaattttctgagaattggcgagcatagtttctacagccgtatccactgctttctggatgccttttttcacgaccatgggatttgcaccggcagcgacattcttcatgccttcccgtaccagcgcctgtgccagcaaggttgccgtcgtggtgccgtcgccggcagcgtcgttggttttcaccgaaacttcttttaccagctgtgcgcccatattttcaaacgcatcctccagctcgatctccttggcaatagtaacgccgtcattagtgatcagcggagaaccgaattttttgtccaaaaccacgttgcggcctttgggacccaaggtgattttaactgtgttggaaagtttatcaataccggtttggagcgcttttctggcctcttcgccgtaaataatctgttttgccatggttgattcctcctaaaattcgtttgactgcggctttttactcgacaatggccagaacatcatcctggcgcagaatggtaaactcctgcccgtccagcttaacctcggtacctgcatatttgctcatgagcacacgatcgccgggcttcagatacattttgatctctttgccatccacaacgccgccaggtcctactgctaccacttccgcgacctgaggtttttcttttgcagagcctgcaaggataatcccgctctttgttgtttcttccgcttcgaccatcttgattacaatccggtctgccaaaggtttgattgtcataagaacgcctcctgtatgataaatgatctgttagacgatttggcactcatcatctttgagtgctaagcctattttagccctttttcaggaaaaatcaagtctttcagaagaaattttccaaaattaaaaaatccttaacatttcactgcgtcaggaaacggtggttccgcctctgttaatcgtagaatttaccgttacggaaaataaaatatcttttaaagacgcagtataatggtctttgttcgctttccagtattccggctgctgctgcatcagaacattggcgtagcccaaagcatcgcaggacagctcatggaatagcctttccagtgcatgctccgtttcttggctgaccagttgctgctgttctttttcgtactggtcgtaccgttcggcaagggagagcccctgtatgggggaaagttcttcacttacattgctttttatttgaatcaaaacttcataaaaaggcatcccgtcccgaatgtgaacagtaactgtcacatcggaatctactacgtccagcgttgttacgccaagaccgttgtcctccaaagtcagctgcgtttttcccacttcgccggccgcccataagataccgcgcgtttcttccggcgaaaaggtaccggcaattctgccgtcccgcaaaatggcggttccgacaatttgaatacctgggttttcctcatcaccggaaaaggccgccatcggcaaatatgcacccacggccggattttccaatgaacccaaaatacctctcagctgtgaccgaaccagttttccgttgtcctggtaaccttccagcatcattttggtactgagaaccggcaaaatcgtgctgtccaacggttcacttaacacctctcccgcttctccgtcagcaatcagcacatctatattggggcgcgactgggcatctgcattaaaataagccataacggattcgatgccatccttagcaatctgttcaccgataataattaatttggtatgtccccaaaaaatctcctgtccttgtttcaaattggcgttgcgcatggcctgtgaaatggtttttcccgttacgcgcagcatttttccgccagaagtatcatcgccctgcgctgcttccggatcaaatatctgcatcgtcaaagcatattcgctatctttccaatccagtcccacggcctggacaatcgcccgctcattcagctgaaccgacctcatacagcccgaaaatagaaccagaagaagatacagcgccagaatggatatttttttcatctcccggttcctcctttcctgcaagacagcaaaagtagaagcggcagcaaaacggtaagcaaaagcaccggaacgccgccggcaaaaaagttccccagtgcttccaggacatctggcttttcggttaaaatcccggacaacaccgctgccagtgccgcgcagacggctactgcatattttgaggcttttttcggcatcatccgtgccagggattttcctgatacctctaaaaataaagccagacgaaccaacgtgataaacacccaaagagccacatgaaggctatccaaccgctggaagatagatacctctgcaattttggttactgtataaaatggaaagcgctggcttttggcataatcccccagtgcagccgcagtaaacaagaagatggcagctaacgttaccacagacagcaaactccacttccaaaatacactccttttattttggtttactgcggaaatcaaaaataaaagcgccgctgtttccacattaccaagggtcaggttgataaatagaaaaagctggctttgccatccgtcataagaaggcgggcgaagaaactcccattgaacctgaggccataagctgatccccacaaacagtagcgtaagcagcaaggccgccagcacaaaggagccaaaccgtgccgtaggctcataccccatggaagccgcgtatccccctaccgctaaaaggagcagaataaacaaccagggcgaagtttgggcataagcgacgctggttaaaaaataggaaaaagcgcaggtggtctggattaaaacacacagagaaaacaggaaaaaggcgaccggatataccagcccagctcctccccaacgttcccccgcaatatctaaaagccccttatccggatgccggcggagcagaaaataagcgggcagcaaaagcaaagcacttaccgcaacagaggacggcagcaaaagggcggcagttaaagcgcccggctgttcgttttggggcgctgccaaaaaaaactgcataacccggctgagaaacaaaagcaccgccagctgccaggaactgattgcagattctcctttcaagtcattgcctccttttttactgaatttccgtgccaggaagattttggattttcagctttttgcggcccagctttttccatccggcccgcagcagtacatcccgcatcgcgaacatctgaaacggagattctggagccatgctggggattccgtaagcattgaccgaacaaaggttgacaatcatcaatgcaaggcccagagaaataccgaaaacccctagtgtcccgcctatgatgataaacccgaaacgcatgatggtcacctcctgaaacagcgacggaaccacaaaagaactcagcgccgtaagcgccaccaccatgaccatgggcgagctgatcagccctgctgtcactgccgcgtcgccaatgaccagcgcgccgatgataccgatggcatggccaataggacggggaagccgaaggccggcctcccgcatcagttcataaataaaatggatcagaagcgcttcgatcaccagcggaaatgggacatcctgctccgcagccgtgacatttaacaaaagcgcttcgggcagaagttccggatgaaaggttccaactgccacataaaggcccggcagaaggatggtgaaaaagaaagccagatatttaagccaccgttcaaataccgcataatacgggcggtgggtgtaatcgtcaatactttgaaaattctcgttaaaaaaatacggtacaattaaggcaaatggagtaccatctaccaaaatgcctaccctgccctcgctgattttggcgcagagggtatcgggtcgctgggtagtgccgacattggaaaaaatcgaagtgatatctgtatccagaaaaggctggatatagcccgattccaaaatgatatcggttgggatttccctaatccggcgacggatatcacgaagcagctccggcgccaccatatccgtctgataaatcaagcacagatctgtattgctcttgacgcccgctttcatcagctccatcttcagcgcagaggacttgactctgcggcgcaccattgtcatattaatgcggatcggttccgtaaacccttcccgggaaccacggacattttcctccgctgacggttccgatacgctgcggaattgaaatccctgtacgcctgctacaataaccttctctatcccatctatcataatcccggcaaaaccagacatgagaaaaggaaataattctcccagcgtctccacctcattttggtccatgcccaacacagcgcgatgcaaaacccagtcccgcagcgcctgggcagacggctcgtccaacgtcaaatcgcccaacggttccaacatgatttccgttagcgtttgcaggctgaacatcccttcaaacatcatcagcttgaccggtattccgcacaccgtaatttcccgcaccatgaaatctgccgtatcgtgtagcgccgcgcggatattggaaagatctttggtggcattgccggtcagccggaccgactcggtctgcggcggctttggcgtaacataaagcgcctgttctttttcttcgattttttttgtaaaccattgcggcataacgatcccctctttcccagacattgttgccaaatcgaaggaaaaacatgcacaatttgccgcaaaaaacaatgtatagagcagacactccggcgtatactagaaaaaaccgggaaacaaaaggagggctttggcatatgaccgtcaattttctgcgcacgatgatcctttacatagtgatcgtcgttgcggtgcggattatggggaaaaggcagctcggggaactctctcccacagagctggtcatcaccattttaatttccaatatcgcgactctgccgattgaggatacgaatattcccttgaccgccgggctagtttctatttttacattagtagcctgtgaggttttggtatccggtattcttttaaaaagccccaaaatgcgaaaaattgtttccggctctcccagagtgctgatccgggacggtgtaattgatcaaaaacagctttccgacctgcgcttgtccatcgatgatctaactgcgcagctgcgcggtcaaggctgttttgatatcaaccaggtagcatttgcggtggtggagaccaccggaaaactgaatatcttccaaaagtttaaagcccaacagccgaccaaccaagacctgcacgtaaaagagccgaaaaatgctgacgctcccccaatggtcattgtttcagatgggagaatttccgatgcagccttgcagttctgcgaaaaagataagcaatggcttggaaatctgcttcaggaaaaacaatgtccgttggaggaagtttttctgctcacctgtgaccgcagcggaaattataaactggtgaaaaaggaggcatcgtaatgaaacgagtcgccttatgtgccgccgttttactggtcatcatccttctttgtaccgcgagtctcgtcacggtatcccgctaccagcatcattttacccaagcgcttcaggatctggaacaagcggtgtaccaggaaacatttgaaaggctgtccggccaggctgccgatatttgccgcgactggctggatgccgagcatgtattaattcgctttgtccgtcatgcggagctggatgaagtgaccggcgccatgacccgtttggaaatgctggcaaaatacggggatctttccgaattttctgccgagctaaaccggattaaaaatttgcttcatcatatctatgattctgaaattccctatttacgcaatattttctaattaaatcatggcaaaatatactttctcttttgcaaaaaaggccgcttcgcggccttttttgtattcttttcgaaactaaggtttatgtttcatcattattttggaactgcaccggttcaatggactctgtcagcttttcaaagcggtatccctgtgctgtcagctgatcgatgacaggtcctaccgcttctgccgtggaaacgcgcatggaatcgtcgtgacagaggattacaaccttatccttcccctttgcgccgtttacaatgttgcgaatcagcgtatccgtatccgtcatataggatttatcatcgccggataccaaattccaatcataataaatgtaaccgcgccgcctcatttcaatccggatggccttttgaactgacggactggcgaaactatttttgacgcttccgcctgggaaacggaaaattttcggttctacgccggtaacccgaataatcctttcgcgaattttttgaaaatcggccaggtaattttccacactgctataaatttcctggtaaacatgagaataggtatgcatcccgatactgtgcccctcatcgacaatccgttttaggattgcatcggagtcgacaccggatacctcctggccggttacaaaaaaagtagccttaacccctttttctttcagtgtatccaaaatagcaatggtatttttggaggggccgtcgtcaaatgtataataaacaactttcccctcttccggtgagaactcgtttccagtattgacatacatatcaggatataaatcttcataagcggaccccgatactgcctttgtctgctgaactgccgccaaaatcccaccacagcaaagcagcgccgccacagacaaaagcaccttcttcttactgcattttatcaagcaaaacatctcatccaccaaccttctgctttagtatattgcccgactttgtccgcttatgtcctaaaaggagaagacaggcgaaacaattcgcctgtcttccgacaaaaaaggggattgatattcagacgacactttactgttgcgtttttcctttcccgataaagctggttacgccggaaacaattcggccggaaacagatttcaccttgaccataacgcctgcgaaaacatcttgtctaacgcttccactgacggtgacatcttttccggcactcacatttcctcccacatttccaccaatctcgcaattttttcctgcatccacattgccttgcacaacatctccgtgaacgattatatcttttcccgcatccgcgcctccttgcagaatgcttcccatcaccgtaatatcttttcctgcatccgctttaccagccacatctttttcacagaccagatccaccgcgcaatttacattgattgccgctccgtcataacgaagcatcatgttcctccgctcatcgccgctaaagcgctgaatcagacgatggccctaataaaccaccacatgcaacgccccatcatccggccaggggaggttctctacaataccaatcggcgccagggattctacctgcggctgcactgactctgtttgaatgccaaacaggccgtcgatcgtcgtatcaaacatcctggcaatctgcggcagcagaccaatatccggacaagaacgtttggattcccatttgctgatgccaagctggccggcaacctgctcctgtgtcatttccttttgtttgcgtaagctgctgatagaatcacaaaggatatcataatagttatattcttccatataagatgtccctcccgatttatttttctgtcacgtgacaagtttattgtatcggtagagagccattttggcaatagaacatttgttgatatccgctatttttatctgaataaatagttgttttatatacttttcatacaattttggagtagatattttattgaggcccgcttttttatataaaccaatggttgtttaaaaaagcaaccattgattgcaaaataatccacaaaaaatttttcttctttctgacgtatttcataaaaatccattgattctcttgctggattttttgctcagtggtatgc

SEQ ID NO: 2529 - DNA, 32759 bp, Unknown
  16S sequences of unknown bacteria
aattccgacatttgcgaagtggtgccaagataatcagaaaatcggtagaacttttatgaataaaagtctctgtaaaaattgcaattctcatatgctcaccatttttaatatttaacttttattataacataaaagaaattgctatgcaatttctagcagaaaaacgttaaaacgttctagcaacaaccaaaatctatgattttgagtttgttgtaaggttgttataacattaaaaaattgctatagaatttttacagataaaagctaaaacgttttcataacagtcaagatttttaatttgttgttcctaaaattggttaaatcataatgcgatttgtaattcatacttgtactgtaaagtactggcttgctgccgacaaaaacatgtgcatgtaacttgcgatattgtgctctttgttttccttggcagaattacttttttgtaaaggaatcattcaaaatgtacgaataatagcgattttatacgaaaaaactgggaaatcttttttggggaacccctttaaacttttttacagttacggtataataaataaaatagacttttcaatatgaaggaaagcaggtgtgttgcattgtctcagtttacaatttcattatcaaaaatcatgaaagagctttctttggaaaccatttatatgccttccaatccggatgaattattggtatgttctccggatgtaaatcgtcctggattagagttacatggcttttttacccactttgagaaagatagaattcttattataggcaatgcggaatccgcttatttggaggaagaatgcgataaggaaaaacgtattgaagtgttggaagcattgctttccaagcaacctcctgcagtgatattttgccgcagcttacagcctgtggaggaatttatcaccattgccaaaaaatacgaagtaccgttattgagttccgatgaaatgacatgtgtattgctggcagcattaatttcttttttaaatgtacagcttgctcctcgtgtaaccagacacggcgtattggttgaagtatatggtgagggcattttgattgttggagacagcggtgtcggaaaaagtgaaacagccattgaattaatcaagcgcgggcatcgtttaattgcagatgatgcagttgagattcgccgtgtttctgcaaaaacattggttggttcttctcccaaaaatattcgccactttattgaactgcgcggcatcggaattgtcaatgcacggcgtctgtttggtatgggtgctgttaaaacaacagaaaaaattgactttatcatcaatttggaagtatgggatgataaaagtgaatatgaccgtatgggcattgacaaagaatatactgaaattttagatattaaagtacctgttatgaccattccggttcgtcaaggaagaaaccttgcagttattattgaagtagcagcaatgaataaccgtgaaaaaacaatgggttataatgcagcaaaagaccttatggaacatatggggatggatcctgatattatgcagccgcaagaaaagaagatagatttggaaatttaattttgtataccatggaggcgactatgagtcaactggaaaaactggaacaacttgcaatttcattacactgtgatgtacgcaatcaagaacctatgcgtaagcatactacgtttaaaataggcggaccggccgatttgtttattgtagtaaatgatgtgcaagcgctgcaatctgtttatacagctgcaaaggaattgggagtaccttgtatggtaattggaaaaggttccaatttgcttgtaaaggacagcggtatcagaggtgctgtgatacagttgggaggtgcattttttgacattaatttaaaagaaaataatgtgctggaagcaggtgcgggagcctctttggcgactgtttgcggatatgcattacagcagtccctgacaggattggaatttgcatggggaattccaggttccattggcggtgcagcctttatgaatgccggagcatacggtgaagaaatgaaagatgtggtactaagctgtactcatatgaatcctgatggcaccattgaaacttatactgcagaacaattggattttgcatacagacacagtgtttatcaaaagtcacatggaattgtattatcagttgcgtttcaattgaaaaaaggcgataagcaggaaatcaaagccaaaatggatgatttaatgggaagacgaaaagagaaacagccgttggaatatccaagtgcaggaagtgtatttaaacgtcctgtaggatattttgcaggtaccatgattgagcagtgtggtttaaaaggtaaaacggttggcggagcaatggtcagtccaaaacatgcaggttttattgtgaatactggcgatgcaacatgtcaagatgtgttagatttgatttctttgattcaaactacggtgaatgaacaaacaggtattatgcttgaatgtgaaattcgtgcaattggtggataataccgattcctataaaataagattgagagtgcggattttaaagggaaaggatgggaaaatggaatttttaattgtaacaggattgtccggtgccggaaaatcggttaccatcaatgctttggaggatattggattttattgtgtggataatatcccatcaaagcttgtggttaccttttatgatttgtgtgagcgtgccaaagaagatttttcacgtgttgcggttgtgacagatattcgaggcggagcgctctctgacaaattctttgagtttttagagacatttaaagaaagaaaggtaccgtataaaattttatttttagatgcaggcgatattgtattggtacatcgctataaagaaacccgacgcagacatccattatcggaagcggcgtccggctctttggaacaagcagtgaaaatggaacgggaactcttaagaccaatgcgtgaagctgcggattatatcatagatacttcctatttagcgccttctcaactaaaacaacgtttgtccaatttatttctgggcaatgtttcggatgcgcttaccattcaaattatgtcatttggcttcaaaaacggaattcccaccgaggcagacatgatgtttgatgttcgttgtctgccaaatccgttttatgtgcctgaactgaaaaaattaacgggtttggatgaacctgtaaaagaatatgtcatgaagtgggacgagacacaagggtttattacacgttttttggacttaattgattatatgattcctctgttctgcaatgaaggaaagagtcaattggttattgcaattggctgtacaggcggacagcatcgttctgttaccattgtagagttgctgtataagcatttaattgcacaaaataaacgagccagtgtaaaacatagagatattaaacgataaggagaaaacagttatgtcatttgcagcagataccaaaagtgaactttgcaaacaagtttgcccgtacgactgctgcgccaaagcagaatgttacggcattttgttgtttgcaaagcagttttcactcagaagtattgctttcagtaccgaacatagggaaactgctttgcgcttggcagatttgattaccgaacagacacaggcggttgtagatatctctgcaaaaatgacaagacgaaatgggcatcccgttaccagtacggtaactatacctgacgaaaaccaaagattgcggttactacagtactttggtcacacaggaaatgaggttacgctgagaatcaatcgtgatatgatacaatgggaatgttgtatatctgcattcttgcgaggagtttttttgtcttgtggcaccataaccaatcctgaaaaagaatatcatttggaatttgtagtgccttatatgaatttagcaaacgatttgaagaatttgcttaccaatattcaagagctggaattacagccggctgttaccaatcgaaaaggtagttttgtagtatacataaaaggcagcgaaggaattgaaaacttacttacatttatgggtgcaaccaatgcgtccatgaattttatgcaagtgaaaatgttcaaggaagttcgtaaccaggtaaacagaaaaaccaactttgaaacagcgaatatcgataaaaccgtttctgcttctgcaaaacaaattgcggcaatcgaaacgattatacactctgttggtttacaacagctgcctttagacttacaggaacttgcatctttgcgctatgaaaatccggaaatgtcattgcgggaattgggcgaacagctttcagagccaatcagccgttccggtgtcaatcatcgattaaagcggattatggcatttgcagattccattggaaaaaagaactaaaatcacatagttttataacatgttgtagatgttggaaaggaggaagcaatgtcaggttttgtacatttgcatttgcatacagaatatagtttgttggatggcgcttgccgtatcaatcctttgatggaacatttaaaagaaattggacaaactgcagttgccattactgaccatggggtcatgtatggtgtgattgatttttatcgtgctgcaaaaaagcatgggattaagcctattattggctgtgaagtctatgttgctccacgtacccgttttgataaagtgcatgaactggatggcgaacagcatcatttggtactgctgtgtaaagataacaaaggatatgaaaatttaactgcactggtatcccaggcgtggacagaaggattttacagcaagcctcgtgttgatttggatttactggccaagcatagcgaaggactgattgcttcctctgcctgtcttgcgggtgctattccaagagcttgccgacgaggtgattatgaagaagcaaaacggctagcattggtacataatgaaatctttgggcaaggtaatttttatattgaactgcaagatcatggaattgaagcccagcgagaaatcaatcccatgttaattcgtatttcagaggaaacaggcattcctttgattgcaacgaatgacagccattatatcaaaaaagaagatagtcagatgcatcatattttaatgtgcatccaaacaaaccataccgtagaagatgacgaccgtatggaatttgcttccgatgaattttatgtaaaaacggaagaagagatgagagctttatttccggaacatcccgaagcatttgacaataccgtaaaaattgcggaacaatgcaacgtagaatttgagtttggcaatacaaagctgccaaattacgatacgccaaacggtcaggataatgtggaatacttcagaaccaaatgttatgaaggactttaccgtcattacggaaaccagcctgatcaggccttgatagacagactggaatttgagttgaataccattattaaaatgggatatgtcaattactatttgattgtatttgactttattgattatgcaaaatctgtcgatattcctgtagggccgggaagaggttccggtgcaggcagtttggctgcttattgtttgggcattacaggaattgacccaatccgttacaatttgatgtttgaacgttttttaaatccggaacgtatcagcatgccggactttgatattgatttcagcgacgaacgcagacaggaaatgatagattatgttgtacgccgctatggtgaagaccatgtagctcagattattacatttggcaccatggctgctcgtggttctattcgtgatgttggcagggcaatggcaattccgtatgcaaaagtggattctgtcgcaaaattggttcctatggaattaaatattaccttggaccgcgcactaaacatttcccatgatttaaaaaatttatatgattctgacccgcaggtaaaagaactgattgatatggcaaaaaaattggaaggcatgcccagaaatgcttccacacacgctgcgggcgttgtgattactgaccgacctgtttgcaaatacgtaccgcttgccaaaaataacgatgcggttgtaacgcagtttaccatgacaactttggaagaattgggactgctgaaaatggattttttggggttacgcaatttgtctatcattcagaatgcggaattacaaatcagaaaacaaaaacctgatttttctatagaagatattccgatggacgataaaaaaaccttttctatgattgcatccggcgcaacagaaggtgtgttccagtttgaatcggcaggtatgaaaagcatgattgtgcaattaaagcccgtcagcattgaggacttaattgcggttatctcgctatatcgtcccggacctatggattctattccaaaatatatagaaaacagacacaatccatctaaagtacgatataaacatccgcttttgaaagatattttggatgttacatatggctgtattgtttatcaagagcaagtaatgcagattttccgtaccttggcaggttattcccttggcagagcagacattgtacgccgtgccatgtcaaagaaaaaagcagatgtcatggaaaaagaacgtaaaatcttcatttacggtttgcaaaatgaagacggtacttgggaagtagaaggctgcatcaatcgcggtgtggatgagcaaacggctgtatctatttttcatgaaatggagagttttgcttcctatgcctttaataaatcccatgccgctgcgtacgcggtactttcttaccagactgcttggttaaaatgtcattatccaaaagagtatatggcagctttgcttaccagtgtattggacaacgccaataaagttgccatttacaatgcagaatgtaaccgtttgggcattcgcgttttaccgcctcatgtaaacaccagcgaaacaggttttacagctgtgggaaatgatattcgttttggtctgttggcagtaaaaaatttaggtcgtggatttattgaccgtatgatagaagaacgcaccagagaaggtaagttttccagcttctattctttctgcaaacgcatgtatggacaagatttaaatcgccgtgcattggaaagtttgattaagtgcggcgctttggatgatttaggttgtaaccgcaggcaaatgttggcctctgtggctatcgtcttggatacgctggaagcggataaaaggaaaaatgtagagggacaaatcggcttttttgatgtgattcaaacagatggtccttcggtagaagaatttgtgcctgaaccaatgccggatatcagtcagagtgaaaaactgattatggaaaaagaagtaacgggaatgtatttgtcagggcatccaatgtcagaatatttgccagtgtatgacaagataggggcgcgtaaaataggggatattttggaagatatacgagaacaaacaggtatgtaccatgatggcgataccgtaactttgcttggcgtatttacttctgtcaaaacaaaaatcaccaaaaataacagtaccatggcattcgttatgctggaggacatttatggttctatggaattgttactgtttccaaaggtgttggcacaatattcacatttgattacagaaggaaatatcgttcgcgtggttggaagattgagcacttcagaagagcaggatacaaaattaatctgtgaggctgtgtttgaggctcctgacaaaaacggtgaaatggcgcaatcatcaaaagaaagaaagaatcctcccggcttatatttgaaggtgaacagcaaagaggatatggcgtataaaaaagccatgcaatatattgccatatttgatggtacgatgccgctgcatatttattttaaagatgagaaaaagttatttcatgctcctgtttctcagcgtgttgatgtgaaccaaccattggtgaatgcgctggaagatgtattgggcgaagaaaatattgctgtagtaaagtgaacattttgttcatacgatatatcaaacagcagacagtaaaggatgaatgattatggaacaaaaaaccattgcagtgctgaccagcgggggagatgccccgggcatgaatgcagcagtacgcgccgttgtgcgtactgcaattgcaaatgacatgcgtgtgctgggggtacgacgtggatatgatggtctgattcatggtgatatgattcccatgaatttgagaagtgtttcggatattattcaaaatggaggaactgctttatttactgcaagaagtcctgcttttatgacagaagaaggacaaaaacaagcagttgatacatgcaaaaaatttgatattagcggagtagttgtcattggcggggacggttctttccgcggtgctaaggctttatgcgagaaaggaatcccatgtgtagcgattcccggaaccatagacaatgatattgcttgtacagaatacaccattggatttgacacagctatgaatacagctgttgaaatggtggatagactacgtgatacaacggaatcgcacaatcgctgcagtgttgtagaggtcatgggaagaagatgcggcgatattgctttggaaaccggaattgcagtaggtgctacctgcattttagttcctgaaattgcttacgattttgagcgtgatattctgaatagaatggaattcaccagtaaaacgggaaaacatcattttattgtggtagtagccgaaggggtaggtcatgtatctgatattgcaaaacaaatagaagcacatacaggtattgaaacacgtcctacagttttgggacatgtgcagcgaggcggttcacctaccttgcgagaccgtgtggcagcaagccagatggggtatcatgcagtaaaattactgcatgagggaaggtcaggcagagtggttataatgaaggataacaaaatagcggacttagatatggcgcaagcactggaaatgaaacggccgtttgacgacgaattgtatcgaattgcaatgacaatttctatttaatgttatttgacaatagaagcagttgtttacattcattcctctagcgcaaatttcagaattggtatatttggaataaatcagccaaaactcttagtacagtaatgctttactaagagttttttacttttggaaaggaggtatgcagttggcatatattttcttaatcatagggtttgtgtttttggtaaagggagcagatttttttgtaagcggaagttcttccatagctcgttttttcaaaattccaagttttattattggactgacgattgttgcctttggaacaagtgctcctgaagcagcagtcagtatcacagcagcatttaaaggccaaaatgatattgcactgggtaatgttgtcggctcaaatttatttaatttacttgcagtagttggtatttgtgctttaatcaaaccaatcggtgtgaagacatccattttagcaaaagaatttcctttttccattttagctaccgttgcgctgttattaatggggcttgatgtattttttggcggtggagattcgaatctgctgtcccgtaatgaagcgtgggtattaattttatttttttgtatttttgtatttatgctggttacttccgcattatctgcaagaaaatccggagagattgttgatttggcagatgacgcgcagtctgaggaagcgcccaaaaagaagcagccgctttggaaaagcattctgcttgcggtagttggtctggcaggtattattggaggagggcagctggttgtcaattctgcaagggaaatcgcgctttcctttggaatcagtgaaagtttaattggtttaaccatcgttgcaatcggaacttctttgccggaattggttaccagcattgtggctgccacaaaaggagaaagtgatattgcaattggaaatgtagtaggttctaatatctttaacattttatttgtattagcactgtctgctgctattcatccaatatcctttgacctcaatgcattaatcgatttgggcattttgattgcagtttctttgctgacctatgtatttgcgattgctaaaaaaggagtgaatcgcgtggaaggcggtattttagtttcgttatatattgggtatatggtgtatatcatattacgatagaaaaggtatcgggttatcccgataccttttttggtgataaaaaagtacaattgataagcataaaatacaagattgatgtatatggtgtgttatgggggaatgtatatgaaatgtttggtgttaacaagacgtaagatgcttaccatatgtgcttgctttgtagtgtgcggtttggcagttgtattttccgtaaaaggaattcaggcagtacaaacagcctatgtacaaaaggtgcctatttattctgtgccaaccccggataaacaagtggctttaacctttgattgtgcttgggatattgaccatacagaagaatatattgatattttacaaaaatatcaagtggaagcaaccttttttgttacaggtgtatgggcagaaaaatatacaaatgcagtaaaacaaatttcagaggcaggttatgaaatcggaaatctaggcaacacctatgaaagaattccgcagttatctcaagccgatatgatgtcaaatttaatgcagtgtaatgaaacattaaaaaaaattacagggaaaacaccggtattattccgtccgccctatggcgactataatgctctattgctggatactgcaaacacattagaaatgcaggcggtgcagtgggatattgacagttttgaccagcacaatacaacagtacagggtattgctgataaggttatggaagaagcaaaaagcggttccattattcttttgcataatcgttcagatttgacgttggaagcgctgccgtatatgatagagacgctgcaaagtgagggctatgaaattgtttcagtttctcagcttatgagaaatgcatctgagatgcaaagtgaatagtttaaaaatagcactgaatgatagtgctatttttattaggtgaggaaagtttgacacatattttcctgaattttacaaataataaagtttagattgagaggggagaatacgtgtatgattccaatttatatttttggaaacgatgaagatgagactttagggcaaatcataaaaaaggcgatatcgccttttggtaccactgtttataacacagataaacattccgacgaaattaatgatacctgtagtttttttatgaaagaacaggaggactgctctaatttaaaaaattcggttggaattgctgtttttaaaaaaagttttttacctaaagagccggtgatattaccggctaactggattgctgtaatagattctaatcatgacaagctaaaagagcaattttgcaaaacaggacaaattgttgtaacttgcggtacgaaagcaacggatacatttagtatatccagtttggatgaaaatcaagcctctatcagtttgcagagaactttaatcgcaatcaatggcacggtaatagaaccttgcgaaattacgatgcatattaccaaaccgtatcatccaaataaaattttgcctgttgcagccgttttgttattagcaggcattcaatgggatgctgatttctatatctgaaatttccaaaaatttcttgtataataaaaatgattacgctcataatagtaaggcaaacgcaaataaaaaagtttgaaaaacaaaagaaaaaaggagtgcttatactatgtctaagaataaaattgttgttccagaagcaagagaagctatggatcgtttcaaaatggaggctgctgctgaagttggtgttaaccttaaacaaggttacaacggtgacttaacttctaaacaagctggttctgttggcggtcaaatggttaaaaaaatgatcgagcaatacgaacaaagcgcaaaataagttttgttgaaataaaaaaaggcggtatccaatcggataccgccttttaatattgtcactttatcacattttcattaaaaaaacaataaattgtcctgcataatagatttgtttatgtacacatttacgaagttttctttttgataaatttttatcataataaatagcaggaattgtgcgaaaatacttgaaaataatacatatgtacattataatgaatccgtatattacaatatatgttaatttgaaaaggtgtaccttatcaaattacagcattattggtatcatgaaacatttaggaggggtatgctatggcaatgaaactaacaaaacgcatttcttgcgcagtattggttttggcaatggtattgttaagtttgaatcttgcagtttttgcggcaaacaacagttctttgcaaggaaccggtacacaagaagatccgtatttggtatctgaagctggacaactaaaagaattggaaggcaaaaatggggtttatgtaaaattaacagctgatattgacttatctcaagctgaatctggaggtaaagttgatagttgggctgattattacatcaataatttttcaggaaccattgacggtgacggacatcgcatttataatgcaggagcaaacagcacattgattgcaaactttggcggaggtgaactcaaaaacttcacctttgaattaagcggacaacctgcaacattggtgtggaatgcatatacagcaggtatcgaatacaactacacagatattaatatttccggcagcattaattataccagcaacaataacaatgaaaatgcattggtcgtttatgcgggcggtaatacaactttaacacgtgtaaatgtaagtgcaaatattcaatcaccgacttataacagtatttttattggctatacaccatttgcaaacagccattataaattggttgactgtacatattccggcaatgctgttatgaaacaacctggtattatttttgcaaacgcttcttccggtactaatttattgaatggcagcacagtagaagcttccggctgtaaaattaccggtaacattttaggtactgatgcagagcctaaatttgttggaagtgtttcttataaatcggattatgatgcagtggaagcagctgtaaaagccggttttactattacaggcaatatagcaaaaacagaagatttatccgattatacttataaagtaaacgacaatggtaatgtaagaattgatgtagcaagtgagaatagttccgttgctactttaagagttatttctgaagtttattataatgtttattaccaagacggaacccaatggggtaccatgaaagccgatgtaacagaagacattcctgttcaatccggtgtttcttcctattattcttctttaggtaaagtggatttctatgacggtgacaatggcagacaatttacaaccggtgtaaacagtgcattacaagcaattgatgttaatggaagaattggttatgttatcaccaataaagatgactctttggtttataaattaggagcttttaactctgaaaataactggaaaacttccagcgtaaccgtattggcatatgataaagacggtaacttaattaatactgtaaacggcggcggcagtgaaagctttgcattcaatatggaaacagtacaaacagaagcaggtactgctttatcagctgttcaagcacctgccggtacatcttgggtagattctgctgccacagtagtaggtggcgaacaaatttgttttgctaaaaaagataatacagtgataccggtaaaagtagttgctgttcaaaaacctgtagtagatgtacctgtcattgatccttctgttccggtagaagaagtacaagttggtgttactcctgaaacagaaaatgaattgaacgacattatttccggaaattctgatgctgaaatcagcacagaattacagcaaaacattgatgaagcattagcaagaggcgatcaagtaacaattagcttgaaatctgacaaattggaaaataatcaagtacctgctgctgatgcagaaaaaattactgaacttttgactgctcaaacaagcaattcagacaaaactttggcagtacaacaatactttgatttttctgttctggtttctgcaaataaccaagtaattggtgaaattacagagttaaacagctctaaaattacgcttcaaattgcaattcctgctgaattacaaaaagaaggacgtacttttggtgtaattcgtgtacataatggtgttgcagaaattttgaattccagtgttgaaaatcatattttaacttttgaaaccaaccaattctcaacatatgcattggtatcttatgatgtaaaagacaatggccaaaaccctggtggagatgacaaccaagagaacaatggaaatggaacagagaataatggtaacacaggtaatacggataacggtagtacaggagcaaacggtaacggagagaactctaacaatatggtaagtcctcaaaccggagatgcttctaactacatgatttggatttctgttgcaggtgtttctgtagtagcaatggttgttttgtttgtaatgaaaaagaaacgtaacacttaattatttatttgatttattcagtgtttgagaaagaagaccaaataccaattcggtattcggtctttttttctataaccatcatcataaaactgatgttatgttaataaagtctttttatctgattcataatcaaaacatataaaatacatatttttaggataaaataaaggataagctatcatagaataaaagcttatccttacattataaacaagttaactgatatagtcttccagaataatttggacctcgccttgagaatttgctgtaataccttttttaagtaattcttggtcttctgctggtaaagcacttaagggaacattaacttctttataaggttgtgtttcatcatttaaaaatacaccgatatgtccattatattctttaatggtataaatatctgattgacttgtcatagtagtaatatcgtcgctattgacatgcgatgatgtgctttcttgacttgaattgggatttgaggtaaaatgagtttgctcactagtaacattttcagatgcattttgaggaatggtaagacatactaccagaatgataattcctattaataaaaccaaagcgatactaaatatgatataataggttttcttcaatttgaccatacctacctttctgtgataattgatatcatttggtatctttggtgctagtatggctcaaaattggaaatatatgcataggaaaaatgaaagatttgttttatttcaattatctatttgatttagataattgctgcattattgaggtgaattgattgaaaaaatctgacattaatcagtacggattaaaacctgtaccggacccgaaaggaaatagcaccggcaaagcagcaggaaaagcgatttcccgcgtggtaattaccattgtgagtttgttttttgctacattgtttatcataggcatttttatgttctcttatatcatgagtttaaggggagaagagatagacattgatttgcattctttgaacttagactatacaagttttatttacgtaaatgatgaatccggtaatcctgtagaatataaaagcttatatggtggtgaaagcaaccgtatttgggtggattatcaggatattccgcaatatatgaaagatgcaatggttgccattgaagataaacgcttttgggaacataacggtgttgactggtggagaacgctgggagctgccagcaatttgttgtcttcaggaggcagctttggcggctctaccattacacaacagttgataaaaaatcttaccggcgaaagcgatgtaagtatttcccgtaaattaaaagagattttcagagcagaaaatctggagaaaaagtataccaaagaggaaattttggaatgctatctcaatgttgttaactttggcagtggctgtaaaggtgtacaagcagcagcaaacctttattttggaaaagatattaaggattgcagcttggcagaatgtgctgctatagcgggtattacacaaaacccgtatgcatattctcctatgaattttccagatcagaataaagagcgtcagcaaattgttctgtcagaaatgtataatcaagaaaagataacaaaagaagaatatgaccaggcaatgtctgagtctgaaaatatgaattttgtattccaagaagcaactgagacaggggcagacgataccattaacaattggtatattgatacgatgattcaagacgttgtttcagacttacagtctgaacttggatatacaaaagaagatgcacagaatatgatttattatggtggtctgaaaatttattctgctatggattccagtgctcaggaaatggcagaaaatgcagtagctaacgaccgtaacttaaacagtgacccggacatgcagtgcggtgtttatatgatggattattctggccgtgtgcttgcaattgtaggcagcagcgatgaaaaagaaggtaatatgtggtttaactatgcaacagatgcaaagcgtcaacctggttcctcatttaaaccgattgcggcctacgcacctgcaattgataaaggaattatcaattattccagcatagtacaggatgagccaataccaaattattttgatgatggtactgcaggtccgaacaactatgatcatcaattcagaggtcctgtaacggtacagtatgctttacaacaatcttataacccacctgctgttagagtatatcaacagttgggaccgcaaaacgcctataatttcttaacacaaaaattagggtttacctcattggttggcggcggagttgacgacagtaacttaggtgtagctattggtggtgtgcacgaaggtgtaacagtaaaagaaatgacagcagcatttcaaatttttggaaacggcggtcaatataatgaaccttatacgtactattacgtggaagaccatgatggtaatgtcattttagataaccgtgataatatttctacacaggcaatcaaatcttctaccgcaaccataatgcaaaaattgctgacaactgttgtaacacaaggtaccggtaccggtgctggtgttacaggctggcaaatttatggtaaaaccggtactaccgatattgatgacaacagttattttgtgggtggttctccgtatgctgttattggtgtctggaccggttatcaaaatccaagccgtttaagaaatacaaatgcatccaaaagcgtgtttcaaagcttaatgggagcatatttaaacaccaaacaattaaaacaatttacaacagattccagcgtaacatctgctgtttattgtacacaaagtggtaatttagcaggtccgggctgtccaacagcaactggttggtatgaaagaagcaatatgccttcagaatgtacgcaacatcaaaatacaaatacaacatcgtcccgttctgaagaggaggaagaaagctcttccagcaatacaagcagttcagaaagcagctcatcatccagttcttccagttcctcttccagctcaagttccagtgcgtcatcgtcttcatcttcttcggcagcttaaatagattataaaaagtgtctgcatttttgcagacacttttttgtttgcatatttcatattatgtatattatccattacttgcctatttggaaaataaaaattttttataaatgtgcattgcaagattcgtagaaatatgataaactgtacattgtgaacaaacaatcgtatatgggtggtggacaatgaaaaattctgcttttcttttagtaaaccaagaagtacttcctcaagtatttacaaaggtaattcaggcaaaggaatatttgaggactgcacaggcttccagcactacagaagctgcaaaaatggcaggtatttcccgcagtgtattttataagtataaagatgctgtttatccatatcacgggaaagcagaaaaacaaattgttaccattcaagtagtgttatatgatagaccgggagtattaatggcggttatttctgctttttacaatgaaggtgctaatattttgaccattaatcaaaatatccctgttaacggaacagcattggtttctatttcatgccaagtagatcatttaaaaggctctatggatgatttactgctgcatctaaaacaagtaagtggtgtgcagcgaattgagcatattacaggcgaataaataaagaggtgtaaatgatgattgagattgcaattttgggtcatggtgtcgttggctcgggtgtagtagaggtattggctacccataaagacagcattttaaaacgcgcacaaaatgaaattaacattaaatatattttagatttaaaagaatttccggacagtccctttgcagaccgctttacaaaaaactttgaggacattatccaagatgatgatgtgaaaattgtagttgaggtaatgggaggattgcaccctgcattcgaatttgtaaaacagtgtttggaaaaaggaaaaagtgttgttacctctaacaaagaattggttgcttccaaaggtgcagagctgttgaaaatagcaaaagaaaaaaatgtaaactttttatttgaagcaagtgttggcggaggtattcctattattcgtcctattcatcaatgccttgcagcaaatgacgtaattgagattgcaggtattctaaacggtaccaccaactttatcttaacaaaaatgattcgtgaccaaatgtcttttgaagacgcattggcactggctcaaaaactgggctatgcagaacgcaatcctgctgctgatatcgagggtgatgatgcttgccgtaaaatttgcattttggcttcgcttgcctttggcaaacatgtttatcctgaccaagtacatacagaaggtattacgaaggttacattaggtgatgtagaatatgcagaagcctggggcggcgtaattaaactaattggcagagtaaaaatgatggatgatcatagaattcaaattattgtttgtcctatgctgattccaagagaaagccagttagcaaatgtagatgatgtatttaatggtattatggttcgtggagatgcaacaggggatgtagtattctacggaaaaggtgcaggcaaattgccaacagcaagtgctgtggtagcagatgtgattgactgtgcaaaacatatgcatgcaagaaagaatctgttttggagtgacagtgtagacaattatgttcaagactatttggacgatatcactgctatgtacatacgtgcaactgctgatgacattgcagctgcaaaaacagaagcagaagcattatttggaactgtagagctattggtacaaaaaaatgctccaaaaaatgaattggcatttgtcacaaaaccaatgaaagaacgcgatattcaagataaaattggtgtattagagagtaaaggcgtaaccattgcatctacaattcgtgttggtgatttgtaatttaagcagataggaagaacagaatgataagtattaaggttcccgcgaccagcgctaacttgggttctggttttgattcactgggagttgccctcaattggtataactatgtctggatagaggaatctgaccggattgaaatctcatcgaaagacaatgtagcaattcccaaaggaaaagataacttagtatatcaggcagcagagtttgtatataatgcatatgggaagaaaatgcccggtttaaagattattcaggaaaataatattcctatggcaaggggaatgggaagcagttctgcttgcattgtagccggtattaccggtgcaaatgaattgttaggaagaccgtttgaccaagatacgttaatcaattttgcctgtaaaattgaaggacatccggataatacaacaccggctattttaggaggattaacggtttctgccatggatgcaggaagagtttacagtgttggaacacaggtatctgataaatttagatttgctctgttaattcctgattttcagttaaaaacagaacagtcccgtgctacgttaccaatgcaatacagcaagcaggatgcggtatataatctatcacgtagtgcgcttatggtggcatctttatcttgtggaaaagcagaaaatttacgtattgcggtacaggataagttgcatcaaccgtttcgagtggatttgattgaaaattgtgctcagatttttgagcttacttaccaaaacggctcactgggaacatatatcagcggagcaggaccatgcattatgtccattatcgaaagtggaaatacagcatattataatcgtatgataaaacaattggaagaacacggcatcatcggctggaaattagaagtactggagacggatagggaaggtaccaaagttctcccaaccatataaacataatataaaggagaaatgatttatgagcttaattgtccagaagtttggtggtacttctgttgcaaatactgagcgtttaaaaaatgttgctgatatcatcacaaaaacatatgaaaaaggcaatgatgttgtcgttgttgtatcggcacaaggagatacaacagatgagtttattgagaaggcacgtcaagtgaatccaaatccttcaaaacgagagatggatatgttgttaaccgcaggtgaacaaatttcagcttctcttttagcaatgaccatcgaagaaatgggctatcctgtgatttctttgttaggctggcaggcaggattttttacaagcgcaaataacggttctgccagaatagaacgtgtggaccctgctcgtatcaagcgtgaactggatcaaaaacgtattgtgattgtgaccggttttcagggtgtaaatcgttatcaagatatgaccacattgggacgcggcggctctgataccagtgcggttgcaattgctgcatccatgcatgctgatttatgtcaaatttataccgatgtggaaggcgtgttcacagcagatccaagaaagataaaggatgcacgcaaattagatgttatttcttacgatgaaatgttagaacttgcaacattgggtgcacaagtattaaataaccgttccgttgagatggcgaaaaaatatggagtagagctagaggtactctccagcttaacaagaaaaccaggcacaattgtaagggaggcaaacaaaatggaagaaatgttaatcagcggtattgcaaaggataatgaagtagcacgcgtgtcaatcattggagttcctgatagaccgggacttgcatttaaaattttcacaaagttggctgcaaaagagattaatgtagatattattttacaatccattgggcgaaataataccaaagatattagctttaccattcctgaatctcagctggatgaaacaatggaaattctaagaacttatgttgaaaccattggtgctgctgatgctgtctatgatggtaatgtttctaaagtctctgtggtcggtgcaggtatggaaactcatccgggagttgcagcacagatgtttgaagcactttttgacgccaatattaacattcagatgatttctaccagtgaaattaaaatctctgttttgattgcacgtgacgatgccgaccaagcagttacagcaattcataaaaagttcttttcaggaaaataatattgcataaattgctataatatggtttaatagtaacagcacaataaataatagccagcaatctgtttcagttgttggttttatatccgggtgtagcgcagttggtagcgcacttgactgggggtcaaggggccgcaggttcaagtcctgtcactcggaccagactgagtcttgtcgcaattcgcgttcggactcttttcttttgtttggatgaagatacacgcgtcagtagcggcatcttttttgtaatataaacccacgtcgagtgttcataacgaatttgagttatgaacactcgttttttatatcaatcgatttttagtggtgtgtatggagcgggttttactctgctcttttgttttatgcagacactcaactatactcctgtcatctacaggagtgtaaagaatttaaaaaattccatactaaaagtttcgattcccttctaattccaggttttctctgtttacgttggatttttttgaaaatatctttcggatgttttaaataagaacagccttttagagatgataatccctaaaaaatatgccatattattttggatagacaattcaaccggattggggaatctcttgaaaaaaggagttttctatgatataaatagtatgataatattttaatgtatccatatacaggaaggagagtttgatagggatattgatggagtgaagaaggcagtctatttttctggtaaagtagttttttaagctatttcaagtatgttacagcaagtatatgctgtatgttcagtaaatgaaaagaatggttttttggtcgtcaaacaaggagagagaagtatgcaaataggaagtttaggtaagaaaattagtaagcgtttgttagtgtttgtaatgatactactgtcattgactattttggttgtgcctgtcaatgtgtatgctgctggtcaagaagtagcagaagtggatggaaagagacatacaacattaacaagtgcaattgacgcagcgtctgaaggcagcaccgttgttctgctttctgatgttacagaagatgttacattcgacaaaaatattacaatagacggtggcagcaaatatacaattttcggtgtatccacagtaaaggcaggaacacttacgaatcttactttaaaaccgagtgaaaataaagcggatggtaaatttttgacacttggcagtggtacagaaacatctattaagctcgaaaatgttactgttcactattccgtgcaaaacagaagctcggggagtgctgtgacagtatctggcaacaaggcagatattatagtaaataactgccgttttattaatacgccaaacaatggcggagtaacagtagatgcgccggaatggtcttacggtttatttgttaatgaacagaattctgccggaagcattacgtttacaaacaatgaatttaacggagcattccgcacaatgcttgcaaatgtaagtggaaattttctcattgaagactgtaaatttataaacagtgtttacagtgttgtaaatggaccgacaagtggttccggctcagaagctacgaccattacaacctcaagtgcttctaacaataacattgttgtaaagacaagtgtgtttgataatgccggagcaatttatttacagtctcaggcgaatttcgcagggaatacgtttcaaaatgataaatttgagcattatattcaggtaaaaggaagcattggacagcctatagattttacaaataacacttttcaacaaggtgataatgatttagtaattattgatgttgcagctacttcggttcttcttccggttggacaaactgcagttaactattgggtatgggctgatactccggaagatgttagacctgatgactatagcgactataagtatatgtataatgaggatggtaatatcacatttatgcctcagtctgacgtggcattggagcaatttttcagtcaaaaaggcaatggaaatatacaggtagataataatgatactgttttaattgagaaaaatttgaaactgaaaaatttgaatgtggatgctgacaacaacattacatttgaaataaccaaagactcaacgctggaaattgaagagagcttggatattaaaggcaaagttgcagtaaagggagaaggaatgcttgcaattgctgaaacaggcaaggtaatcattgatactaacgctgcattggatgtcgcacctaatatgaattttgaaaacaacggtacgattttaaataatggggaacttatcattccggattcttcaacaggcaatggaaccattgacggtgaaggtaccacagaaaaagtacataatgcaaaatattttgaagcaaaagaaccaacatgtgacgttgatggtaatatggaatactggtactgtgaattctgcgataagtattatactgataaagatttgactcaagagatttcaaaagaaaatactattataaaagcgcttggacataattatgtggatggaaaatgtactgtttgtggtatggcagacccgcatgacaatcagggtcaggtaaccccttcccagctggataatacagaggaacaagacaatagcagtgacaacccacaaaccggagatgatagcaatttggtactgccaattattatattgtccgcatccggtattggtcttgtcggagtatctatttatttgagaaagcgaaactacagcagatagttttcatcattgatcagttgatgtaattaatagaaaacaaaagaaaacgtttggcgaaaatcagcaaacataggtaattttgtttttcagtcaagtgaaattgatataaggaatacaggtacactttggaccttaatttatttttagaaagggatggaaacacatgaaaagcagaaagaaatttttgagcatcttgcttactctctgcatgatgttcgcactggtacctatgacagcgttggcagcagaagacgctacatttgaagtcattgatacagaaggaaatacaacccaatttacaaaaatacaagacgcacgtaaagctatgaaagatggctatacattaaagcttttaaaagattatgtttcgacatcagattataattttggaatatccatagatggcaaggtacgtggtgttacaatagatttgaacggatatagtgtaacatccaatcaaaagaatggatatgctctaaagttagaacagagttatggtggagcacgtgataatactgtaacaattaagaatagtggaagtaaacagtctgttttaacaagcagtggttatcaaattacaacgagcagcggagatagtaattatacccagattgttaatttagagggagacattgtacttaaaaacttagacgaaacgaaagagcctctagggattaagttgggaacaggttctaaattattagatacagaaagtgcccgcaatttaataccaaatggtggattttcagtaaaagaagcagatggcaataagtacatttatggctcttatgcaaatgcggcaggcaaagcagcagacggcaacataacattgctgcacgattataaaggaaatgaaccaatcaattccggttctaaaagtgcagctcttgatttagacggtcacacatacacttataccggcaaaactgctgcaattaatgtgaactatccgaatgtggagtttactgtaaaaaatggtaaagttgttgctaccgatgaaacaaccgatggtgctcatttgattggtgcgccaaacgaaagcaatatgaacaacagaagccttactcttgacggagtggaactaactgttccgggggatgtatgtggaatcataacaaatggcactgaaacaggcaataaagtgacacttaaaaattccacgctcaatgtggaaaatggctttggcatttatttcccatcgtccggtaaggtaacaattgacaattccgttatcaatgccaaacatgcgggtgtgcaagtttgttcaggaagtcttacaatagtaggcgagactgcaattacagtgacaggtcaacctcaggaaaaaactgatgctgacggtcccatcgcagatggtgctgctgtatcaattgtaaatcgtgacggatacaagaaattagaaacggttaatattgaaaatggtgtttttaattccgcagcagatgtagaagcagtcagggcatattcatttaataatgcggacaaaaccgagaacgaatggtctgaagcaggaaatgttgttgaagtaaccggcggaagcttctcgtcaaatattgcagagaatattgtaaacagcgatatgcaagcaactacaacttccggtggtgaaacaagatttgttgttggaaaaacagctgtggaaaatgcaattcaagcattaaaatcaggtgacaaaataacattcaaaaaagttgcggacgatgcggttattacagttcctgaaaacgtggaaataactaacagcacaggaaaagatatcacagttaacggagatacctttgaagttggcgaaactacaactgctcatgtgtgggatactgaatatacaattgacaaggaagctacctgcacagaagatggaagcaagtctatacattgtactacccctggctgtacagccaagaaagatgtacagatcattcctgcagcacataagttagaaaacgttgctgagcagcaagctacttgtaaggcggagggaataaaagcgcaccaacattgcacagtgtgcggtaaagattttattgacggcgtggaaaaaactgtagatgagctgaagattactaagcttgctcatacctatgtagatggcaagtgtactgtttgtggtgaaagtgattcgaactacaatcccggaacaatgaatcccgaacagatgattccttcccagccgaatgatacaaataaacctgacaatcgtatggacaacccagagaccggagacggtagtaatctgacactgccgattattatattgtctgtatcaggtatcggcctttccggaatattcatctatctcagaaagagaaaatgtaatagatagttttttagaacaaaacgccccgcaattttgcggggcgtttgttttatatatggttttaccgttgcacatcgtggatttttttattttgaagttttatcgcctacatttatgacagatatcttgttttaatataaacttatgccaaagaaatgaattatatgtgagtaaaaatcggtttttatacgtttctgtttgtattatattttttatagagatataaataatgacgattttaaaattatgattcaaagcagatgttttccgatatcactggaatttgactaacgattcgtatctttgcttgatgatcgaaagttatgaggaatgctatattgttagtgtcattggcggtaaatgaaatatgttatgtggactattcttatgaaaatcgctctttaaaagcacaggctgggaattagatttgcccattgttaagagatagaaacggttgtgagcgaatacttaaaaagtacagtaatccgttgggaatcgttacatttcggttgatattacgaacgaaaacagaagataacaacttattcatgattgtcttctgttttctccatcggtatcctaaataatatgtaaaatgaatattagaataggcttaattgttctgcaggttgttcacggcgttttacagtttctctttttatggtgtttgacagctcggataaaaatgaagaaggttcggctccacaggtaagaattaattcctcacgggctctggtcattcctacataaaataaacgtcgttcttcttgaatatctgaagggtgctttgtagactctaatggcaatattccggacttgattccggacacaaatacagcagggaattcaagacctttactgccatgcaatgtcataagatgtacagcacctgatttccagttttttgcggtagtacggctgatatccgcttcttgcccaagaaccagtgcattccgtaattcttccagattggaatgaaacacggctgtatttttcagcttttccaatgcagaggaagaaccgtatgtttcttcccattgctgcaccaatttccatggcttttctttttgtatcagtggaagccatgattctattcgctctaacatttgaagcagtatttcgtacccctgaaaatcatattgcagagtttctaggttccattctgtctgatgagagcatatcttctgggcatattctattaaatcagaagggcagttccacagtaattttaaagcagttcggagtgctgcaatatctcctggttcttgcaaacaacggaaaaacgacaggagaccgcgtacatcatctgcatttaaaaagtcttcgcggccacttataatacacggtatgtcatcatatcgtaaacatttttctatcaattccagttgtctgtgagtgcggcaaagaactgcaatatcagaaaaagaacgcatgtgctgtgtatgtcccaaagactgtgcttccagcatatctacgcctcctgttatacggctgatttcttttgcaatccaaatgccttctgaaaaatcgtctgcggtctgtaccagtcttactgcaatacctgatgtttgattcggagttaataaccgtggtttgccaggattatgttcaattacgggtaccgctgtttgcagaatttccggagtggaacgatagttttgaaccaaacgaatgatatggatatcaggagaatcctcttccagtcgttcaaagcatcgtccgctggagccgcggaatccgtaaatagattggtcggggtctccaattacaaaaagattttttccgctttcattccattttcgcaccaactgatattgaatatcattgatatcctgaaattcatccaccagtaaatgagtgaattgtttttgggtggtgatagtttgtttttgggcttctaataataaatcgtcgaagtcaagtacacccaattcccgtaatcgagaacaatatgaaatatatacttcctcggataattcggctgtttcaaatgatgctccgttttttatcagagacactgcttgtatcaattgtttagcactttcttttcgatgttgtgtttgtaatatttcttccgctatctctatggcttcaccttcgctgataaggcgtacatctcccaaaagcttcagacagattgcatgaaacgttccaatggtcatacgtgatatggcacgtttccctcccaaacgctgttccaatctatggcgcatttctgctgcggcttggttggtaaaagtgactgcggtaatttcttccggttttacaccttgttcttctatcagataagcaatacgggataccagcgtttttgtttttcctgtgccgggccctgcaattaccgctacaacccgttgcaaatctgatacggcttgttgttgttctgtgttcaaactgtcactggtatttacaataggtgtttcttcaggtgcgggggcagttgttttttgtattttactctgctgtttggaagtctttttcggaacatctgctccaaataaagagatttgtccatttaattgctctatttcggatggatttaataaagaaatcacaccgtattctccgtcaaagcccggttttcgctctacttgtccaatgcgtaaacggcgaataccttcggcaatacatggacctgctgtccgtttgatgtcttcaatgggggcttgacgtaaaatatagaattcagcacctaaagactgcagcatctcttcatactgctgctgtgtttttttacttgctacagactttcctgtacaagcagcaaccacttccggaagaggagccagactttcaaacggtttggcgttttcaggacaatagccaactggtcggtcggccaactcttctacgcggtgttctacgccaatggtgatttttttgccgcatacagggcagataccgcctaactgagcagtttcggcaggagtaagacaaacattgcagttacgatgtccgtctaagtggtattttccttcttcgggaaagaattctactgtgccaagaaaaccctctctagtccgaattgcatgaaccaattcggggtaggtaagcccggtatcgagcagatttgcttcacgtcccaattttgatggagagtgagcatctgagtgtgataccaacgtaaggttgtctaaagcggaaacacgccagttcataggagggtctgaagaaagtcctgtttctactgcgtgaatatgagaggttaagtctccaaagcaggcttctatactgtcaaaacctgaaaaagcaccaaacatagaaaaatgcggtgtccaaatatgtgcgggaataaattctgcatccggacaagtttctagggtaatttccagtaaatcacgactgtccagtcctaaaataggacgcccgtcggaatgaatattgccgattgcttctaatttggcggcaagctcatcggctgcctctaaactgggcagtacaattacattgtgtacttttctggtttttccatcttttttatagatggagctaatttcgcctgttattacaaaacgtggtgtttctcctggcactgcatttggaattcgtaaatctttctttaaggtatatacgccttctccggcaggaacaagctgttctttcagttcagcacgccatacagggtgtgtaaagtcacctgtgcccaaaagttgaattccttttcgttgcgcccaccaatctaagtgaggaatgtcacaatctttactggtagcgcgggaaaaacgagaatgaatatgtaaatcggcaatatacatgatgtcaccttctgtctatcaagattagcctcattataatattttttgacattctgtgcaataaggaagatttttctatagatagaaaaagtttgatttttagtcttgtcatacgataagatatttttcataaaataaatataacagaaatggcaaatattttttataaacaataggaaatattgcattttgtactgtttaattttcctgttgacattagtatggttatctcatataatatgttacaatacataggagaaaggaatacactgattattatggacgacgccgacagtaacgacgctgaccaagttttgattcgtattcatttttattatcatttaatgtaaattacaggcatgacttgcgctcttttttagaaagagcagcaggttatgtctgtttgtgtttttactgagtttgtctttcagacattcagaatatcaatattttattaagaaaggtgtggtatatccaatatggatactcacaaacaaatgccttggcacacaaaaaagttggaagaggtttatcaagtcgtaaacacttctgaaaaaggattaagtgataccgaggctgcagaaagactcaaacaaaatggaaaaaatgaacttcgagccaaaccgcccaaaacactgcttcaaatgctaaaagagcaaattttagacccaatggtgtgtatcttaattgttgcagctgttatttctgccgttttgcaggaatggacagaagcaggtgtaatatttgctattgtgattttaaatgcagccattggcattgtacaggagaagaaagcgcaatcttctttagaggcgttgcgagatatgagtgcgcccactgcacgcgtattacgccagggagaagaaagtgtgattcccgctgctgaattggtagtcggcgatattgtgttgctttgtgacggagacatggttcccgcagatgtacgattaattgattctgcaaacttaaaaatacaggaagcttcactgacaggtgaatcggtgcctgcggaaaaagatgcagacgcagtattgccggaaacatgcactttgggagacagaagtaatatggcatattcatcctccattgtaatatatgggcgtggtaccggtgttgtaatagccacaggtatgaatacggaggtgggtaacattgcgggaatgctggataaccaagatgaattggatactccgttaaaacgtaagttaaacgcagtaggaaaaatacttaccattgtaggtttgattgtttgtatattgatttttgtgataggtgcaatttatcaacgccctttgattccgcagcttttggttgcaatatctttagccatttccattattccggagggtctgccggcaacagcaactatagtcatggctttgggggtacaacgaatggcaaagaaaaatgccttgatacgaaagcttcctgctgttgaaactttgggaagtgctactgtgatttgcagtgataaaacaggtacattgacactcaacaaaatgacagtaacacatttggcgttggaccaagatttttataatggcacggcaacaccgataaaagaagtaaaacagatgcattcaacgatatatcaagagttgatttatgcttctgctctttgcaatgatgcaagcttcgacccagaccatgagggagaaatcattggagacccaacggagggggctctcatctatatggcgcaaaattttgggatgaatcacgatgcgttggaagagagatatcctcgtttatttgagcagccgtttgactcagaccgtaagcgaatgactacggtacacaaaatagaacagcaattgattgcctatacaaaaggtgcggttgatgaaatgctgccgctatgtactcatatgcttacatccgaaggaatccgtccaatgacggaacaagacagaagaaatatattaaactgttgtatgaagctgtcagagcaagcattaagggtgttgggctttgctaaaagagacatagatgagctgcctgaagatgatagtgagaatttagaatggaatttaacttttcttggcgcagtaggcatgattgaccctcccagaacagaagttgcagagtctgttcgcgtttgtcgtgaagccggcattcgtactgttatgattacaggtgatcataaagtgactgcacttgcgattgcaaaggaattggggatttgtcaggagggtgactctgtgatttcaggagaagaactgaatcatatgaacgatgagacattggatgcaaaagtaaaaacaacagcagtgtttgccagagtatctcctgcggataaattaagaatcatacaatctttcaaaagaatcggagaagtagccgctatgacaggagatggagtcaacgattctcctgcgttaaaagcggctgacatcggtgttgctatgggtattacaggtacagatgttgccaaagatgca

SEQ ID NO: 2530 - DNA, 15332 bp, Unknown
  16S sequences of unknown bacteria
ttcgtaaccgatggcaaatgtcgtccactttgtgctgttcatttctctcttaatggcgcccatagcggcaaagcaaggtgcgcagagcaagttaaagataaggaatgacataccgctgagttttgtaaagctgcgtgccaattcggcatataccgacaactcgccgccgccgtaaaggatacccaaagtaccgacgatgttttcctttgcaacaagacctgtgatagatgcaacagctgcctgccagttgccccagcccaaaggcttaaagattacagctacaacgctaccgatagatgccagcaatgacatgccgatttcgtcttctgagagcattctgaagccatccggagtgaaaccgaagtatgttgtgaaccatacaaagattgttgaaagcaagatgattgtgccggctttcttgatgaatgaccagcctctttcccacattgaacggagcaagctgtccaaagtaggcatacggtatgcaggaagttccataacaaacggtgtaggatcgcctgcaaacatctttgtctttttaagaataatacctgaaataataattgcagccatgcccatgaagtatgcacctgttgcaatataaggtgatccgccgaagatagcacctgctatcatagcgataaacggctgtttagcaccgcaaggaatgaatgttgttgtcataacagtcattcttctgtccttttcgctttcgatagttcttgatgccataacaccaggaataccacaacctgtaccgataagaatcggaataaatgacttacctgaaaggccaaatctgcggaatactctgtccaaaacgaatgcgatacgagccatgtaaccgcaagattcaacaaatgcaagcaagaagaacaatacaagcatctgcggaacaaagcccaaaacagcgcctacaccggcaacgataccgtcaaggataagaccgctgagccattcggaacagccgattgcttcaagagcattgccgataagtaccggaatacccggaacccaaacaccataatctgccggatcaggctctgcaaacccaaaaccgtcaagtgtttcaacagcggcctttgcgtctgcaatgtagtaaggatcggattctgaaacttccaatgtttcctcatcttcaacttccgttgtagcgccgtccttgtaatccttgtactgttcaaggtaagcagtcgcaaggctcttagcctctgccggatcaaagctctctgactctgtatccaaagcgtcgctcaattcgtctgcgccctcgccgccaaggtcaataaatgcctgtaaagcctggcttgcgtctgtgtatgcgtctacatcatcttcataagctgaagtaccgatgccgaacagatgataaccgtcaccgaacaaaccgttgtttgcccagtctgttgcggcagaacctaccgtaaccattgagatgtagtaaatagcccacataacaacagcgaatatcggcaagcccaaccatttgttagtcacaatgctatcaatacggtctgtggcagaaagtttgccggcagacttcttaatgtagcaagagccgataatagaagcgatatatgtatatctttcgtttgtgatgattgattccgcatcatcgtcaagttcgtcttcgcatctcttgatgtcccgttcgatgtgatcgagtacttcttttgaaatgccaagtttttcgcagagcttttcgtctctttcaaaaatcttaacggcgtaccatctctggctttcctgaggcatatcgtggagagcagcttcttcgatatgtgcgatagcgtgttcaacgctgcctgtaaatttgtgctgtggaattgtaaccttttttgcctttgcaatttcgattactttttcagcagcctctttaacacctgtgccgttcaaagcagaaatttcaacaacagggcagcccagagcctttgacatattttcaatgtttagcttatcgccgttcttttccaagacatccaacatattaacggcaacaaccataggaataccaagttcaacaagctgtgttgtcaaataaaggtttctctcaaggtttgtaccgtcgataatgttcaaaataccgtccggcttttcatcaataatatagtttcttgcaacaacttcttcaagtgtgtaaggtgaaagtgagtagatacccggcaaatcggtgatgataacctccttgtcgcctttgtaacgaccctctttcttttcaacagttacgcccggccagttgccgacgaactgatttgaacccgtaagagcgttaaacaatgtagttttaccgctgtttgggttacccgcaagggcaatcttaaatgacatttttcttcctcccgaaatatgtacaaaaaataagaatttgtttttatcagcatcaatcaattagcgtatgctaattagtgagtgctaaccgatgagtataaataagaattattccacttctaccatctcagcgtcttcttttctcaaagaaagctcgtaacctctgactgtaaattcaacagggtcacccaatggagcgatttttctcacatatacctcaacgcctttggtaatacccatatccatgatacggcgttttaccgcacctgaaccgttgagctttacaacctttacggtttcacccggtttggtgtctcttaatgttttcatcatttttctccttattcatttatttcttcaacaacgatacgatttgacatttccttgctgagagcaattctgctatccttaacggcaattatcaagttgccttccaactcgttggcaatctgtacagtttctccctctacaaagcccaagttattaaggtgtcgcttttgttcatctcgaccgttgattctgataactttatatttcttgcccattgtggcaagtgataatggtaacataaaatcccacctcttttaaagtttacttttctctgattagcctttgctaattagctcttgctaactgtgaatataatacactaactttattatcttgtcaatagtttttcgcaaaaaagttgtcttaggctaactaattttttattttaatatttttgtttacatttttagaataagtgatataatataagtgcggttagctttcgctaactcaatttcaaaaatctaactttttaaggagattatatattatggaagttgccatacttgcaataccgtttatcggcacaagcttaggtgcttttaccgtgttttttatgaaagataagataaatcccaaaactgaaaaaattcttttggggtttgccgccggggttatgatagccgcctctgtttggtcgctgttgataccgtctattgacttagcccggcaacggggcaaaatttcttggttgcctgctttaataggttttgccttgggcattgtttttcttttgctgatagacagcattgtaccccatctgcatttaaaaagcacaaagccggagggcgttgacagaggcctgttttccaaaacagccatgatgctttttgcagttacgatacataacataccggagggcatggcagtcggggttacctgcgccggcgcaataggggaaaacccacggatcacccttacaagcgcacttgcgctgtccgtgggcatagctatacaaaattttcccgaaggtgcaattatctcaatgcctttgaaaggtgaaggtatgggcaaaggcaaggcatttttctacggcgttctctccggtgcggtggagccggtgggagcgataataaccttgctgttgacatcccacattttgccccttttgccctattttttatcatttgccgcaggagcaatgatgtatgtggttattgaagaattgatacccgaatgtcaaagcggcgaacattcaaaccttggcacaataggcgccgccgtgggctttgcccttatgatggtacttgatgtggctttgggataaaattcagcttaaacccgtgttttcacttggcaccgtaacccggtggaaatgctcatcggtgcccaaacgcattacggaagatatttttgacaagctacaagctataacagacatttcaaaatattccgactcagaagtcataaagccacaaaacataccttgaaaacagcacaaaaatattgtatgatacagagaagttggaacaatttgccgacttttccgtctatacaaataatgaagcagccagacaaaccggaatttgataaaggagtgcgattgcatgaaaaaaggtgtcattttgaaagttattagtattgcttttgtcctcatagccattttagcaatcgtctgtgccattacaggcacaggaaacggtttcttggatttgagcaatattgcgagagctgtatgcatcggaattgctataatctgtggtattctcgcatttataacttggaaatgctctaagtcaaaagcgtgaccaattctgatttgttgaactaaatactaaccgatatgagcaaggttgaaatataccttgctccttttcatgtgcttagagttctgtcaaatcgacgaatgatttggcggataggcttatatcaacacaaaaggtaaaaagaataaaattcctcgaatttaaccgaggaatttatctatatcagcctataacagcatattttttctcaaatactttcaaattctgttcgtattcttcgttgtgttttctgtaattgcttacactttcgtgcaaattaaggttgtgctgccgtgtatccataacacaggcggctatgtttgagcaatggtcgcttactctttcaagatttgtaagcaaatccactaaaacaaaaccggtttcaatactgcactcccctttttgtaatctcaaaatgtgctttgccctgatctcttccttagcgtcgcaaataacttgttttaaaggctctaccttttcggctgtttttatatcgctgtttataaaagcggtaaaagcaagattgcaaatttcttcaacagcgccggtaagaataacaagctcatttttagcctgaggagaaaattcaagttccttttccctcaactccgtcacagagtttatgatatttacactgtggtcggctattctctcaaaatcgcttataagccttaaatattcggcggcggtcatactgtcgttttcgtttatcttttgtgcgcttagctttacaagatatgtgccgataaggtcctcgtaatggtcggttttattttcccaccccttgatttcatctatcgcatttttttctttgtcaaaaattgcggtaagactgccggtcaaggccaaaagtgaggttttcgccattgtgttcatcaaatcactgcatctttccaatgcgatggcaggagttgccaaaagacggatatcaagctcggtctcctcctgaggctttttgccgtcggggataatcctacaaactattttttccaaaacatcactcataggcacaagcaaaacagtacacaatacattaaacagagagtgcgaaacagctatacccaaaagcgaagccggttgatttaaaatagccggggcgaaaatcgcttttactatgcagaacaccgtaagccatacagccgtacctataatattaaagctcaggtgaacaagagccgcacgcttggcgtttttgtttgccccaaccgaagaaatcatagcggttacgcaagtacctatattttggcccattatgataggtattgccgctccgtaagaaacccggcctgttgacgccaaagcctgcaaaataccaacagaagcagatgaggattgaattatacctgtgagtatagctcctgccaaaacgcctaaaatcgggtttgaaaacatcaaaaatatctgccggaattccgggacatttttaagccccgacacagatgacgacattgtttccatgccgtacataagggttgcaaagctgagtaagataaggcctacatcctttttgcggtcgcttttgccgaacatatataggataatacctatgagtgcaagaacaggcgtaaaagatgaaggttttaaaagttttataaaaatattgccgctgtcaatacccgcaaggcttaaaagccatgctgtaacggttgtgccgatattggcgcccattataacatttattgactgctttaaagtcataagaccggagtttacaaaacccacaaccataaccgttgtggcagaagagctttgtataaccgcagttatgcccaagcctgtaagtaaacctacccacttgcgatccgtcatttttgcaagcagtgtacgcagtttactgcctgcccggcgttcaagtgcttgccccattaaattcataccgaacaaaaataggcacaaaccgcctatcatattcaaaagatcaaatatagtcatgttttctccttatatttcaatttacgatatgataatatcaaacagatataaaatcgggtatcaaagttttgtaaaattccggtaaaaaatcctccgtcccgaaaggcggaggattaaaaatattaaacggtttactcttttattgcggttatgcactcataagggcggagggtgatttctttttcaatttcctttacatccccgtagtttgtaagcaagactttaaatttgccctgtggcagttccaccttacaggttgtgtttttaaagttgttcacgcttataacggtttcgtcctcaaatgtgcgggcataacacattgtgttttcgctttcaatatcaaaaggtacaacaatacctttttgtacgctctttaaattttttcttacttttaaaagctctttgtagaaattgagaggtgaattttcatcattttcctgaacccgaacatttatactcttataatttccgtttgtcttttgccaaggtgttccaacggaaaaaccgccgtttttgctgtcattccactgcatagggcttctaccgcagtcacggctgcggctgttaaacaatttaagccacttttcggcaggttcgccgttcttaattacattttcttcgtatgttgccaaaacctcaacatcgtggaagtcctttacatcggtgtaatcaagatttgtcatacctatttcttcgccttggtaaatgtaaggcgtaccctttaacatatacatggcgttaccctgcattttgcaggacaaatcgtgatattcctcactgtcacagccgaaacggcttacacttctggcttgatcgtgatttgagaaaaacagcgccaaatggccaaaatcctttaccacatcctgccagtggaaaatcgcctgcttaaatgcctttacatcaaatggaagcggtttgaatttatcatagccctcttggtcgaaattcaaaaggtcgaaaatataaagcatatcaagctccgggcggtgaataccgcagtattcccttgccacctgcggttctatatatgcaacctcagcaacggtcatcatattgtaaggggcaaaaacttctttgttcaatcttgcaaagtggtcgtttacctttggtctgttggcgtaaaattccgtgccgaaaccgtattttgatcccggcataggctcaacatcaggaaatgtcaaatctttgtccaggtaatttatggcgtcaagtctgaaaccgtcaacgccgaactccgcccagtctttcattatttttataatattatcaaccgtttctttgttgttccagttcaaatcaggctgttttttatggaaggtgtggagataatacttgtttaagccgggaacatactcccaagcgctgccgccgaaaacgctccgccagttacatggttcttccccatctttcgggtctctgaaatagtagtaattcatataatgttcatcgccggcaagagcttttttgaaccattcgtgttcgtcggaagtatgatttgccaccaagtccattacaaatttaaggcccatattatggcaatcgtcaacaagtcgccttaaatcttcatttgtgccgaaaatgctgtccacggtgtagtaatcggaaatgtcgtaaccgttatctgcctgtgggcttttaaaatacgggcaaatccaaataacatccactccaaggctttttatgtagggtaatttttgtcttataccctccaaatcgccgtagccgtcaccgttggaatcataaaaactctttgggtaaatctggtacaccgaggcatttttccaccaatctttttctttctgcaaaatcattttacaatctccttattttatttattatattatatcacttattttaccaaagcacgatagcgcactttgtccaaattttacaataaaaatttataacatataaaaaagcagaccgccccgcaaaaacatttttgcctttgcacggttgtctgcccttaaatttttaaattttagttctgtgccacttcaacaagctttaaatccgggttcttttccgttgcccagttgatgttccaccggcttgtgaaaagaagaagttttctgttctttgcatcttcaagaagttttgtatcgcttgtgatattcaaggaacgagggttcacctcttcattttcaatccatctgatatactgatagggcaaatttgccattcttatatccacgccgtattcggttttaaggcggtgttccaaaacttcaagctgcaaaacgcctacaacgcctacggtaacttcctcaaaacctgcgcccacttctctgaatatctggatagcaccctcttgtgcaatctgctccatgccttttacaaattgttttctcttcattgtgtcaacctgggtaattctcgcaaaatgctcaggggcaaatgtaggaatactgtcaaatgtaaaaggttcttttgcggttgtaacggtgtcgccgatagagaaaatacccgggtcgaaaataccgataatatctccggcataagcctcgtcgacaatttctctctcgctggccataagctgtgtactctgtgacagccttactttttttccgccctgcacatggtaaacatccatgcctctttcaaacttgccgcttacaatacgcataaacgcaattctgtctcggtgagccttgttcatattggcctgtattttaaatacaaaagcggaaaaatcatcgctcatcgggtcaatcataccctttgacgaatgtctcggcaacgggctttgtgtgagatttaaaaattcttttataaacggctcaacaccgaagtttgtaagagccgagccgaagaataccggtgtaagctgacctttatcaactttttccttgtcaaactcataggaagcgccgtccaaaagttcgatgtcatttacaagagtttcatgtaatggtgccgtaatcaaatcatcaagacccggatcacccagctttgcgctgatggcctgtgcctgatgcacgccgactttgccgtcgctcttaaaagccattatctcgtggcggtttctgtcataaacgcccttaaattctttacctgaaccgataggccagttcatcgggtatgtctgaatacccaaaatattctcgatttcctccataagttcaaatgggtcacgggaatctctgtccattttatttataaatgtaaatataggaatatggcgcaatgtgcaaactttaaaaagttttattgtctgcgcttcaacgcccttggcacagtcgataaccattacggcgctgtccgcagccataagtgtgcggtaagtatcctcggaaaagtcctggtgccccggtgtgtccaaaatatttacacagtaaccgtcatagttaaattgcaaaacggaacttgtaacggaaataccacgctgtttttcaatttccatccagtccgatgtggcggctcttgcgccttttttaccctttacaatacctgcctgctgaattgctcctccgtagagaagtaatttttcggtaagagttgtcttacctgcgtcagggtgggaaattatggcgaatgtacgccttttttctatctgatttaaaaagtccttcacaaaatcctccgatttggtttaagcaataaaaacatttaattcaatacatacagctaagtattttaccatatttatttaagaatatcaactttttaattaaatttttaaagaaaaatctttcagcccattgtcgacggattaaacacgcttggggcctttaaagttgcaaccaattcggcggcctgttcccgattaagccgggcaggctccaccccgtaatagtgtaaacttgcttgttttaccccatagcagttttcgccgaaatacgccatggcgcaatacagcgccaaaatatcattttttgaatactcgtcctccagcttgcttgccacaaatacctcggctattttgcgttcgacctttttctcaaaagaaaaatacatattttttgcaagttgctgagttatggtactgccgccctgctcgtatttgccttttgtgatattaacaacaactgctcttgcaagggctatggggtcaatggctcggtgatagtaaaatcttctgtcctccgatgccaaaagcctttcgataaattccggggatatttcatcaaaatccgtgtaccgccggctttggcgtatctgccgaaccttttcttctataggttgccgcaaaacagcctgtttgtacatttcataacctgattttatcataggcccacacaccacgcaaacagccacagccgaaaacaaaacaatgaccgtaaaccttttaataaattttttcaccgatacaccctcttactaaattatattttttattgattattttgtgcaaatcaaattgtaatttgctccaaaacctgtccgacactgtggtttattattaaatcggcttgtccgtcgtacgcggttgcgtccctgtttataagaataagattatccccgccgaaatatcttataagccctgcggcaggataaaccgtcaatgatgtacctgcaacaataagtgtatctgcattctctattgcctttaccgaccgtgatacggtgtactcgtcaagactttcgccgtacaaaaccacatccggctttataacgccgccgcagtcacaatggggcacgccgttactttgtgctatgtaatccatatcgtagaacttgccgcatttcaaacagtgatttttatgtaccgtaccgtgcagttccaatacacgcttactgcctgccacttggtgcaagccgtctatgttttgagttataacccgtgacaatttacctgccttttcccgccttgcaagccacaagtgggcggcatttggttttatatccggcgtaagaagcattttatccctgtaaaatctgtaaaattcttccgtatgccgaaaaaagaagtcatggctcaatatttcctccggcggatatttataacgctcgttgtacaatccgtcccgtgagcgaaaatctttcagccccgattccgtgcttacgcctgcaccgccgaaaaaaacaatattctttgaattacaaacgatttcttgtaacttgcttaatttttcctgtaaatccataatcaaacctctttttaaagcaaaaagcgacctgttacaggccgctttgtttgcattatttttactcatgccttatggcgcttaaagctgttacctttacggccttaactgccggcacataaccggaaattatacccaccattgtggagaacgcaagaccaaacaacgccagcggtatggttatgattgaaatttttgaatcaccgcccatatagcttgcggcaaaatagttcatagcccgggacaatgcgtaacacacaatcaaacctattgcaccgcctaaaaatcctattcctgcagcctcggtaaggaacatctttttgatatccccaagttcacagcccaaaactttcataacaccgatttcttttgttctttcgtaaatagccattgtcattgtattggcaatacttatggcggaaaccaccatcgctatactgcccaaaccgcccaaaataagctgaataagctgtgtttgctttttcatttcgttgcggtaacttgtggccgaccatgtggaatagcccatatcttctatggactttacaacccggtcaacattttctatatcgtccacctttacaatggcatttgtgtaagcacgcttttttgaatttgtacttttaatgttgttagccttgttgtattcttcttcaagagcaataacatcatcaatatccataacaagaccgtacaatgtttcgtacttactgccgtcctctttcataacgcctacaacattgatttccttttcaatatttttaacattttcatcgtaaccgtctgtctttaattttatggtgtctttttgaacatctacaaaaggtttcggcgggttgccgttttcgtccacatcatagcgatccacataattgttactacgcttagaagtatttgtaaactgatagcctaaatactgtccggccaaaacagcgtattctttatccttttcgttgggaaaacgcccttcttcaagttcgtatccgtaaatagacatggccttttttcttataccctgtatgttggcataggtttggtatttatcattattgccgcttacaagatttaccgaaaacgaattgaattgatacacaggcgttgcaacaacaacatttggcattgcgtcccaaccgtctataatctcatcggtcatagggtcaacgcttccgccgtccatacttccgccccagttgtaaacctcaattagggttaaatctcccatgccttgcatcatatcgtcaatactcttattaagagcaacgcctatggaaagcatcataatgatagagcatgtacctataaacacacctaaaaccgtaagaatggttctgccttttcgccttttcagattattgagtgaaagtgttaaaagatcagatatcttcatcttcgtcctctaattcggcagctctccgtgcctttttctttttaataatcacaaatgcggcaactgcaccgacaattacaacgccgccgataacaaacggaacaacgcttgttttttcctctgtcggggctgccgggtcaacatccgggtaatccggctgaacatactcagtcacttcgcttgtaaactctttttctattgttgtaaccttgcccgctgaatcctcgtaagaaacaacgattttacccttgcctgttcccacttttgtggcgttatagtcaatatcaacggattttgaagagccgctgtctatattgccgataaattcaacatccgcacctgtaaagtcttcgcttataagctcaacctgaacattataaaccgcagatttgcccttgtttaccaaactgaaacttacattgccggtttctgtctgatagaaactgtcggaggcagaaaagtcgttcattgaaaatctgataggttgctgtacatttacggaaacctgctgttcgcttgtaaactgctgtcttttaccgcctacaaaagcctcgaatgtgtaaacaagagaaacgggaagtgttgcgttttctccctggatgctatcggcaacaaggctgaaattatggttgattgtgccgtttttacctacaccgccgattaaaacctgtgtattgccgcttgccattgaaaggcctgttggcaaaacaatcttaaccgaaacattttcaagatcaagatttgaagatgtgtttacggcagaggttgaaagggtaaatttatcccctgcgttaacggttttgccgtaatttgcgctgttaagaataactgtaggtgcagcaacatcgtcaactgcctggctgattgtcattgtatttgtcacctgaggaacgccgatcggcatattgttatctgtatttccgttatcattggaacctgtgtagcttacggtaaagccaaaatcctgcgaaccgcctacataggttacatttctgaattcaagagcgtagcaaaatttgccgttaacaggtgattttactcttgcaacaatatcgtcatttgaaccgattgtaaaagccccctgggacatggttgtatgtactctcggtgttatcacaccatcaccgatattaaaaagcgaccgatcaattctgctgtcaaccatatatgcaacaactataactttatcccccggcactacctttgtaagagggttgcccaaagaatccaaaacccgatagtttgacacatagagttcgccgccatttgtattttcaggtgtacttgtaccgttatttccgccgtttccaccgtttccgccgtttccgccatttccgccgctttcaccgccctctgccatcggcattgcttcttggttctcgttacttaccgaagaaacaacggaagaagtattctgctgtgaatttgtgtcaggagtgctttccccctctgcgtaaacggcaaggctgcccaatgtaccgaaagacagggtcattgccaacaacactgccaaaaatttgtttgatttgctcattatcatttcccttttctgtaaaatatatatcactgccgctgtttttcttcggctgtattactttgttccgtcacctgtggcgaagccgcatcttcccgccgtggctttttatccgcatcgtcggtaaaatcaccccgagaaatttcggcgtcctcatccataaggcttacaccgtcacgcatatcgcttatcactgtgccgtcttttaaagtgataactctgtgagccatctttgcaagctcgttatcatgggtaaccattacaaatgtgatgttgtttttctccgaaatatcaatcaacatcttcataactttttccgttgtggcactgtccaagttaccggtaggctcgtcggcaaatatgaccttaggtttatccacaaatgcccttgcaatgcccacacgctgttgctggccgccggacatttcccccggtttgtggtccattctgccctcaagttccatttcttttaaaattttccttgctcttttttctcttgtttttcggtctacgcctttaaaaacaaggggaaaagccacattttccaccgccgtcattgtcggcataaggttgtatgactgaaaaataaagcctatattgttctgtctgaatttggcaagttctttttccgtcattttacttactattagcccgttgattttaaccttgccttttgtaggtttttcaagccctgcaagcatatttaaaagagttgatttaccgctgccggaagtaccgacgatacagcaaaattctccccttggtatttcaaggctcacattgttaagagccacaaccttttcattgccaaccttgtaaacctttcgcaaattttgaacttttatcatttgttcacctgtaaaaagtaatttagtatttcataaaaattctatcataaacaatgacaatattcaacctatatggtataatgttaagaaaagtttaacaattattattggggagggcagtcctatcgtcagatttgtttt

SEQ ID NO: 2531 - DNA, 9899 bp, Unknown
  16S sequences of unknown bacteria
ataccaaatttagcccctcttgtcaaccccttttttcactttttttgaagttttttcggatttatttttgaattgtgtcttatggccgatgttcgacacaacctgtggtagttatattaaaaaacggaactttcgaaccatcccgaaagctccgcttaaactttatgttataggcaaatcaggcttttaagccgttgatttttttctatcgcgacaaaaagcgcgataccgagcgtgaacaaaaccgcaagctcgcccagcgccacaagaccggcgttggtccaaaaaacggcaaaaaaggcttgtccctccgaaaaaaacaaacctatttcggctccgaccaaaagtccgttaaaaagggccggacaagcaagagatataatcggcagcctcgccgccctcttttttctcagcaaatacataaaaagagtcgcaaggaaagaggcgagcggaccgacaatcaagtcgattgccccgagccccgcaaaaatattgcttatgatgcagccgactgtcagccccggaacggcggccggcgtaaaaagggcaagcacgcacagggcttcgcttgctcggaattgcacggcggccgaggttgtccccggcagcagcgcgttttgcagcagggtcagcaccacatacatggcggctatgagccccgacagcacgatttttttgacattcctgttcatttttttcactccatagttttattttacgtcaggatggtttcgaactgacgtttttaacatcttaaaaggacatatcggaatttatgggaattacgtcctcaaaaacggcggtatgcacatttgtgataaccctgtcctcatgcatacttccgaaataccaatggcggaatttgcagaccctgttgagctgctcgaaatatccgttcagtttatttacgttttcggtgtctcccgaacggagcagcatggtgctttttacgattgagggaggctcatgcgttataatatagtcaacctcgcagccgacctcgtcaattgccttggccccttcctcaagctcggagggagatggcatttcctccttccaccaggagatgtgctcggtacgcatttcgcggtcgacgctttctccgccgccgaaggtgaaaattctgaagccctctatggtgaaaatctgtcctctcatcatgtggaaaagatttcccgacactcggtgaacctttccgccgttccacaccgtcatgcggtatttgtcaagcaggtcgaaattctcgtgggtgccgtcgataaaacagacgttgtatttgcggctcccgagaaaatcaaggattttcttttctctgccgcttccgtcccacacaaatccgaagtcgccgcagacaataagagtatcgccctcccgaagctttttcatgctgcgggaatagagacgttcctcctcgccgtgaagatcaccggttacatatatcataaaatcacctgcattttttgaaaaaaatcttttatttaaaggtttaatctgttataataaaattacatttattatgataacatatttaaaggaatatttctatgaaaaaatacactttttctttaattttagcatttgcggtgattttcacctgtttttgtccgatttatgcgtcggcctataccctccccgcgggcaccgaggtcgaggcgcagtcggcgatactttataatgtcgaaaccgacacggtggtttatgaaaaagacgccgacaagcaaatggagccggcctccaccaccaagctcatgacggcgcttatcgtgtcggagcacgtcaccaatttcgacctgcccgtgaccgcctattcaacggtggaaagcgattttaccggactcggcgcatcggtcattaacatcaaggcgggcgagcagatttctacccgcgacctgctctatgccctgctcattccctcggcctgcgacgcggcaaacgtgcttgcggttcacgtctcgggaagcaccgaaaaattcgtcgagcttatgaaccaaaaggcggcggctctcggcatgacgggaacccactatacaaatgcccacggccttgcccaggacgggctttacacaacggcaagagaccttgtcatcctcggcaaagaggtcctcaaaaattccatgctggccgaaatttgctccaaaacctattatgaaattcccgccaccaacatgagcgacgtaagaaagattttcaccaccaactacatgatggaaaccacctccccttactactataaaagagtcaagggacttaaaaccggctacaccgaaaaggcgggacgctgtctagtttcatatgccgaaaaggacggcgccgaatatatcggggtggtcatgggctgtaaaacaaaggacgaaaacggaaacgagcatcattatgaattcgacgacaccgacgcgttgctgcgctgggcatttacaaatctgacctactcctgcaccgttacggcttccgacccggtggccgaggttaaggtcaggctgtgcagcgagaccgaccatgtgctggctctgccgaaagaagatttttacgccatgattccctccggctcaaaggattcgattataatagagccgcatcttgactccgacgcggtcaccgcccccgtcgaccaagggcaggtgctgggatatgcctcggtgctctgcgccggagaggaaatcggtcaggttgagcttgtggcggccgagccctgcaacagaagcggatggctttcctttttagacattctcaagaccatattcacatccaaaatttttctgacggcggtggccgttgtaatcatagttattgccgcgctgacggttttcagcattcacgacacccgcagaaggcgccgtcttttcaactccaaaatgcggaagaaataaagggcacggaaaattccgcgccccttggattattttttcccctgcagttttaaatacttttcccttgtagcaagaccgcctcttatgtggcgctgcgccttgttgacatcaagcaccgatttgacctcggtataaagcttcgggtctatggatttaagccgctttgagacatccttatgtaccgtggattttgaaattccgaagcttttggccgcgtctctgaccgtggccttgttctccacaatatattctcccaaaataaccgtccgtcggtcgactgtacctttcaaagaactctcctcctgaaaatgtctttgttaaggtatatgcggaaaagacacataacattcacacaggaaaggacagaaaacaatgaataaaatagaaagctttaaggtggaccacacaaagctgctgcccggactttatctttcaagacgggattcaaagggcgatacggccacctccaccttcgatttacggttcacccaccccaaccgtgaacccgcccttgacggaggcgcaatgcacaccatcgagcacctttgcgccacatatctccgcaactcaaaggcggcggacgacgtaatatatttcggcccaatgggctgccgaacgggtttttaccttgttatgttcggtgagcttgaaccgagcgatgttttggaaattgtcaaatccgcctttgaatttacggcggaatttgaaggcgaaattcccggagcaaaggaagaggaatgcggaaactatctttaccacgaccttcccatggctcggtattatgcgaaaaaatatcttgccgaccttgaaaaatacaagtcctttgaatattaaaagagctctgcttcggtttttccgaggcagagcctttttattattcgtttataatttcgccctggcccgactgaagcacaagatcgaagaaggtatgaatatcaacgtatttatactcgtatttcgggtcgtgttcctttgcataggcgataaaacgctcgacaagctctttggtctggtcgggtgaatcgcaaacggtgcggtaaccggcaaaattaaacttacccataaactcggtcatataacgatacatttcgggaatgctcgcttctatgcgctcgggcttgcccgaaacctcgttttgaaggtggagatagggcgttccgttataaacggttatggggcgggcaagagaattatggaacgagcccttgggagaaatctcgttgaaggcggccataatttcgtttgtaacggtctcgttgccgttgattataaagccggtaatgtcataatcaaagcgctcgtaatagggctttgaatactttgcccattcaaatatcgcagggggattttcgcgatagtcgcaggcggcggtcagtccgtagggaatgacgtaaccggcgcccgaatcgcctgcaatgaagaaatcgttgtcggtcatgttttcataaacataatcgaaaaccatgggtgcgcgctcggaaagattggggttgaaggcccagtttatgggcagcgttcctcttgcgtttttgtgcgagaagaaattccaaacgtgcatacgcagccatgcggccgaatcgtaatctccgccgtagatggtgaaatacttggtgttcttgtcgaatttaagtctttccttgggacggggccaatgatattcctttatgtggctcttatagctgcagtatgcgctggcgttgggcattgagcagggatgagcggcgtcggcctccttggcaaggttgaacgccgaaccgagacaaacacagtcccactcaagaacggtggctatgacgctgccggttcccgagtcctttgtatatttcatccaccagggagggaatccgagcagctgaccgatttcgccgtttgctctgttatagcggcggcggagaatttttttgaaggtctcgcggtcggttccgaggggctgattcggatcgtcgatgggagcctctttatcatagacggtcaaatcgaagaaaaagcagcggcgggcaatgtaatagtcgtgattgtaaatgcagttttcaaaaacattgctgggattttcgggatggaagcagggattgtttctcgagcaggaggctccgtcgagaatgtaggcaatgtatcttgaggagcagcggtcgaaatatttgtccatagcccaaagataggcgtcgcacttggcgctgccgctgcccatatccaccgagccgtctttgccgaaaagacccacaaggctctgcttttcgggcactcccagctcttttaatttgagatagaggctgccctcgttctcatcgaatttaacgggcaaaaatccgtcaagaccgcacaccgtggcggcgacgtttgcggtggcggcaacattttcgtcccacagcaccatgccgcactccttgataatatctccgaaaattccgagatattcgtcaaaggtgtttatgtccttaatcgcaagaccggaaaagcttctgccctcgcctgtgatgtaatcaagccagaattcgtccacaccgtcgtttgaaagatagacaagtatgttgccgttggtctcataatcgcggtttataaggccctgaaggctgcaaatgaggcgggcgtcgtccttttcgaaaagattttccataccgtcaaaaaggcaatgatttatgcggtagagggtgttcttttcaagtcccgtcacgggaacgccgaaggacatatcgggggaggtatctttttttatcataaatatcttcctttttttaaaaagggaccgtatcgggtgatacggccccttttgtaatttgatttacaggttcttatgcgaggttacccgaatagaacttgtcgagctgagactggagctgacccttaacctgatcgataacggtggaaggattctcactcttggacagaacggaggtgtcaacgctggaagaaacgttagcgtcgatagcgccggttctgtactcgggggatgcgttgtttacagcatacttgtaagcggcaaccgagttcttgtcaaagccgtttctctgcatttcctcagacttggcgttgatgatcttaccgttaacgttggcaagctggttgaggaaggtaacggaaacatttgcggtcgattccttgttcttgggaacgatgaaaccgtttccgtcataagcgcccgaaatatagttgctctggtcgggtcccttggggaagagaacaaagccgaactcgaaggtagcgctcttggatatgtcgggatagtaggtcaggttggaggcgaacatggcggccttaccggcgatgaagtcgttaatgctggtggtgatgtcgttgttgtatctgtaggacttatcggtctgcttaagctctctcatgaactcaagagccttaacgccgttctggttgcacatggtggcaacgatcttaccgctggaatctctggtagcggtaccgccggcctcggaggtgatagccataccgatgatattggtgttggaggttacgcccgaaacgtcattggcctcgtcggtgcagttcttggcaatctctctgaacttgtcaaaggtccaggaaccgtccttgtaagcggttgcaacaacgtctttgccgccgttgtactgcttaatgaggtccttgttgtagatgatacccatgggagtggcacccattgcggggaaggcaacggcatatttcttgccgctgtaggtgcaggactcggtgaagccgttggtgtaggccttgccgaggctgtaggaagcgagatcaagtgcgcagccctgctttgcaacgtttctcaggcactcaagggagagctcgataatgtcggcgttgcaggtgccggccatgacttcgttaacgatttcgttaggatcgttctgataggtcttatactcaaccgagcaggaatatttgctcttgatcttttcgatctgagtcttgtaaacgctgccgatggtggagttttcggtgtatttgctggcttccttacttcccagaacaaagctgtagtttgtcagggagctggttgtgccgccgttattgctgttgttggcgtttttaccgttgcttgcgctgacacggttctgtttatccttgttaaattcctcttgggaaacaaccttgatgtcataacttgcaacctcggtgtcctcttcgccctcttcggtggccttgaggtagaccttaagaatcataccgtcttcaatcttggcagcggggtcggtaacctcggtggttccgtcggccgcaaagatcttgatggcatatccgtcaacaggaacaacgtcctgaaggaatttttcaagggtggttccttccactacatcgaaatagctgttgccctcttcatcggcaacaagctcaaccgaagcgccgtcttcttctttaacggtgaagtattcctcgccgatagcaccgacatcggaagttacgaccgaatcgatagacgaggtatcatctacgttctccttcttcttacaggaagcaagagtgaagacgaccatgactacggcaagcataatgcttatcagtcttgtaatatttgccttcatagaagcatctccttaaataaattttgtatctcaaaaccggttttccggcaaaagatcctatattgattatatcacaccgcaggggaataatcaacagttttttatccgacgataccgctttgtgaaacaccttgcacaaagaacttttgaccgaagatgtagacaatgacaagcggcaaaatcgaaagcacgataccggtatcgattattgcgttacggaaaacgttggtaaaggacgcaatgtttacgccgtaggaacgaagtccgatgagcgcattggtgataacggtataatcgctgtgcccgaggaaaagctgtgaataatagttatcggtccactgccaagagaaggcaaagaggataatggtaaccatcatgggcacggcgttggggagcataagacggaagaaaattcccatatggctggaaccgtcgatcattccggcttcctctatctcggtgggcagtccgcggaagaactgacgcagcatgtagatgtagagggagtttttgaaggccacggcagtagccgacagcagaatgaagggcaggacaccgttggaaatatcaattcgtcccacgccgaaaaggcttgcaaggccgaggggattcaaatgggcaaagttcatgtaaagagaggccattaccacctgaggcggaatgagcaggaccatgataacacagccgaaaacaagtcctctgcctttaaatttgaaacgggcaagtccgtaagccgtcaaagtgcagcttaaggtttggagaaccgccgcaacaacgctcaagaaagcggtgcgcacaagtgtcatccaataatccataataccgattgtggtgattacggtataaagcgaaaaatgctttggaatgtactgcacggtgctgtcgctcagatcgtcatagctgaggaacatggtgcagaccttctgaataaacggaaacagaatcaggaaaataattccgataagtacaatgtggcagagaatgttgccgccgtggtcgatataaaactttttggtaaatatcgccttgggcttctttttgttttccgccgcaatgttagcttcttttacagcttccattcaataacacctcctgataaatttccgattttacttgttctcatagaatacgaagtggtttaccacgcttaccaccaccgcgattatgacgccgacgaacgcaagataaacaaatgctcttgccgaagcgtcctcgtaagcgccggccgtgatctttccgaagatttccgacataacgctgttgcttgcgctggtgaagctgtcgactatggtgtaaaccatgttaacaagaataagagggcttatcatgggaatggtgattttccaaaagctttcccaccaggtggcgccttcaacggtcgccgactcgtatatggcgggagagatggactgaagtccggcgaggaagatgataagctgaacaccggagttggtgactatactgtaaatgttgtcgattgcgcccgaaacaaaggatgtcagctggggacttatgctcagagagttgagcagcagcttgatgtcaacctcggtgaaaagtcctccggcgacgtttccggcctccgacgcaagagccgcagccgaaacaagcgacatattgtcggcggttacgataacgccggtggaaataacgaccggaaggaagagcatggcgcggtaaaatcccttaccgccgatatttcggttgagcagcgtggcaattatgagcgaatagatcaaaatgatcagcacgttcataagcatgttacccagcgactcgactatacggcggataaagtaggcgtctccgaagattgcctctttatagtgatacagcccgacgggagtaaacacatagcttaccttatccacatcgcttatactgaatcggaaggattccacaagcgccggcaggtaaattaaaatcagaccgatgaggaagggcaaaataaagatataacccatggcgtttctgcgcgccgtcaaatccattctgcttctttttcttctcggttttgttttgagcgcagcctcgccgccgtttccgacgacattcgagctcgcgctttgagcaacgtttttaagcttcatttgaaatccctccttccttatttactcaccacggcaaagttcatggaaccgacggtcacaccgtcaacctgaacatcgctgccgctgtagttaacggcaatctttctgccgttttcgtatgttgtgacataaactccgtcggacacacgctcatggccggtgatgacgctgctttgagttccgtcgagagcctcagaaacgcgtttatagtccgaaatcgcggtatcaagccatctttcatagcttgtggaataaaggtcggagtagttggtgtctttgaccatttcgggcttggcatagttcatgatgtatctgattcccgcgccgtattcaacggacttgagtatcagcatatcgtagttgtccgaaaggttcagagcctctccggtgtataatgttggtgctgattgacctaatttaatatatgaaag

SEQ ID NO: 2532 - DNA, 1754 bp, Unknown
  16S sequences of unknown bacteria
aattccgcttgctcctccgttgttgccctgttgccagtctatccaccagaaatcaactccagcattttcatgtggatgatgtacaaacttaaaatacgcctcaacaaactctttgttagtcatatcaaactctatagtttttttactgtcaggattaatttctagatactctgccatatctttatacattttttcaaaattccggatacctgatgccggatggacattaagtgttacatgataattatgttcatgcagccatgacaaaaatctttccggattcggaaataaatcattattccatgtatatcctgtccatccgccgccagattccatcggcacatcgactatatgccagtccatatccataacagcaacggaaaatggtatatttcttttttcaaattccgtcagcagctccatgtagctttcttcactgtatttccaatacctgctccaccagtttccaagagcgtatcttggaagaagaggaacagcccccgataatttataaaaatcacgcagacacgcaaaataatcacgcccatatgcaagataataaacatcaatctcttcatgtttcctttttgatggcatattttcttcatcaaacacaaacgatttgctgtcatcaaaaaacgtccttccactcttatccataagtccgtattcaagttcaacttccccgtcagccctgtcaagagttctcattgtgcctttgagattatgctcccgaggcggaaaactatacgtctttgcaccaaaataccaccttccaccgtaattggtaaaatcatattttacatctataaaaagtccttcttcactaaatttctttttatcgtatatcatatgaaatgcttctgtctctatctcaaggcggtcgtcactttgtgtcactgtatattccggtaccggaaattccctgttaagcacagtctgtgtctgtaaatcttcaaacacaccagtctctgaatattccattctcatcataaacggcgtaagcaccgaaaaacgatatttttccccctgaacaatacatgctttgttacaacaacttttagccatttttttcctccgttattaaaataatctttacttgaagattaacacagtcagttatctttgtctctgtaaataaaaatcaaaaatgcaaataatacagaaaaaaagctccaaaaccctatcaattttaaaatcatttcagggttctggaactctcttctataaattatttgtattctacatagtcaacagtaacatatcctgcttctgtttttatgctgttatcatggcatgcaaacataccgctctttacaccaacccagcgtcctgcttttgcttattttatggccgactgcggcgattccccctgcatactttgctccttttacataaccttcaaaagaacagtttttcaaggaatttttccgccaaggggcaactgcgcccattcggtgacaggtgccacctgtcacggtggaaggagaaagtgaactacccaactgaaaagatatatcagcagaaaagaaaaacagtaatgttccattaagccgcagcaaacagcttgttatcaaaaggcaacggcgaaatcacattcaccgccgctgccttttttctttctgctgtgaaagagttaaatcaaattatttttttaccgcttgtgctgtttttttgactgtttgttccgtttgaaggctcctttggttatttgctcatttactctttgttaagtttgtagctaccgccatcgg

SEQ ID NO: 2533 - DNA, 11857 bp, Unknown
  16S sequences of unknown bacteria
atgatatgcacctccaaaagtcagacacttttggaggtgcattttttatgagcaaaagaggaaaaaattatttccacaatttttccggatacaggcctatatcgtgcagatgtttgagagaatttgcaaccatgggcttgtcctctttataagtaacgccgtaccatttgtcggcactgtgcaaaacctttactctggctttgccccgattgattagctttgtcacaacgctgggcaaatagtattcgcctttcaagggattattcacaagggcatcgtttaaaaaatctccgaagccgttccaagcctcgtccacaaattcctttgaaaatccccaaagattcatagaaacaagggtatcgggttcaagttcttgccatgtggcgccgtcgtcctcggtgtatttggcgccccaccggccgtctttttctatgtgtgtgtgttccgttacgcttaaaagcatatcgttggcatcacattcgcaaacccctctggaaacatagccgttttcggtaagggtgttatccaactcatatgccaccatggcaaactcgtacatattgccgtttttcaccgatgaaaggtactcaaaagacaccttaaatgcgtctgcgccgtaatagtcgtctgcgtttataacaacaaacggaccgtttataacccctctggcggcacatattgcatgggctgtaccccatggtttaactctgccctcgggaacagcaaagccctccggcaaatcggccaaatcctgaaaaacatattccgcctgcatatttttgggtatgcgtttctccataacggatttaaaatccgcttcaatttctttctttataataaaaaccactttttcaaatccggctcttgcggcgtcataaagggaataatctattataaattcaccgttagggccaacagggtcaatctgtttaaggccgccgtaacgggaacccattcccgctgccataacaaccaaaatcggtttttccataaaaatctccttagtaaacattacaattttattacaatataacagtattttactacaacccacctgcaattacaagccgaaaaagactttccggtaaatttttctaaaacattgttttttactgtgttttgtggtaacatataaagtatataataattatcacaacggaggcgtgtatatatgatgatttccacaaaaggccgttatgccttgcgcgtaatggtagaccttgcaaaacacaacaccggggaatatgtaccccttaacgatatagcggaaagacaggacatttccgaaaagtatttagagagtattgtatcatccctttcaaaagcaaacgttgtcgattccgcccgtggcaaaggcggcggatatcgtctaaaccgtgaattgaaggattaccctgtgtcggaaattcttcgtgcgacggagggcagtatagccccggtggcctgccttgacaaagaggtgaacgactgcgccagggctccggaatgccccactttggcaatgtgggaaaatttgcaaaaacttatagacgattattttgcaaatgtcacattggaagatttggttttgggcaagctcaacgccgataagctttaatttaaccgagaaaaataaaacaaggtggctcattatgccgcctttttaaaacagaggtaactatggagaaaacaaaagtaagagtgacatataaactttatatttccggcaatgatttggacgcaaaggcggcgcaaaaattaaaggccggcgatgaagtaaaactggtaagattagacgatgaactggacacatacgaaattttgataacaacacgggatggcaaggagcttgatatgctgtcctatcaggagagcatcggcatcactccgtttttggacaacggggatttgaattttatttccgcaaccgttgtttcttcacaggtgaacccaggtaaaacaagagccaaggacgaaaccgtagtcgcatttgatgtgctgtacgaatatgaccattatcgccttaaacaggaagtgataaacggcgtaaccgcttttataccaaactatgatgtggttttgacctgtgccatatacaagtgtatagaaaccgaagaataccctgtggaaaaagtatatcttaactgctacgaattggatcggcccttgccggaggacgcctatgtgtgcggccttgacatacacagtaaaaatcttcatttctactgctccgtgctgtttaatccggaatttacaaagtgtaaaataaatgctaaaatataccatgcaaatggggagtttaccgttgagctggatgaagaagcgcaggaaaccgcccttattcttgtaaatcatgtgagaattttcgagggggaggaccctcttgattgtgtaatagaaaattgaggtgctatgtatgaacagtgaaaaactttactacaaagactcttttatgaaagaatttgacgcagttgtagcggaatgtaccgaagaaaacggagtttttaaaattgttttggataagaccgcattttacccggagggaggcggtcagcctgcggacaaaggggttataacctttggcgaagacagcgccgaagtgtcggacgtgcatgaaaaagcaggggtaatttaccacacctgcgacaaggaaattcagcccggcacacaggtacacggagttatagattggcggcgccgctttgacttgatgcagcagcacacaggggatcatattttctccggaatggtgcttaaacactacggatacaacaatataggttttcaccttactgacaaagagcttgtaatcgactatgacggaacacttacaaagtctgatattgactttttggttgaggagagcaacaagcggatatgggcggatatgcctgtggagtccggttttccggaaaatgtggcagagcttgaataccgcagcaaaaaggaaattgacggcgatattcgaattgtgcgccggggagatgcggacatttgcgcctgctgcggaacacatgttaaaagcactgcacaggtcggcgttataaccgttatttcatcacaaaaatttaacggcggcacaaggattttcgccgcttgcggcaagagagcagtggattttgcagctgcaagaaatgccgactgccatgagataagccgtttgctttccagcccgttagacgccattgtaccggcagttgaaaaaaggcttaaagaaatcgaaggcaaccgcctgcggctggccggaatgagaagccaacttgttgaaatttggatacaggacgcaatttccgacggagaaattcggattgttgcccaaccgggtcttgaagcgtcggatctgcaaaagattgctcttgctttggaaatggaaagcaacaagacatctattgcattcggtcaaggagttgaaggcggcaggatttgcgttgtttctcacacggacgacgccattaagctgggcagatttataaataaacagcttggcggcaagggaggcggcagatccggtatttaccagggtgcaacagagaaaaatgccgatgaaaatatacttaaagtcctttacagagaatataagaacaaataaaagcaaaaaccccaccgccggtggggtttttgctatacactttaaaatatatgcttaattttggccgattaaaattactcaaaatcaataagctcagcctgggcaagcatattgtaaatttcatctccggtcataaggggctgatgtcccggtatggccttatcgaaatccatcttttgcaaaccgttcatcaacttggcgtgcttgttgcggtagtaaaccgggcgtataggcaataaatcttcatagcaaatatcccctaagaaaattgttttttcctcgggaatgtatataacccggctgtcatagctgtgagagttttctataactttcatctgtgcgtgcacgccgcctaagtcaacggtcaagtggtcgtcatattccacggtaggcgttgcgatttttatttgagatttatccgggtactcggcgtttatgtttgggtatgaaaactccaaatcttcgccggtttcaattctgtggcgcatttcctcatccgaccagccccatgtttgcatattgcgtatcagctttatggtgtctttgttggcaaatgaaactatgttgcccaacgaggccaatccgtaggtgtgatcccagtgccaatgggttatggcgcacatatccggcataggcaggttgttttggcgcaaccggtcaaaaaacacgccggtgtggcgccggctccggccggaatccaacatcaatgtgtgtttatcgcctattacaagacccaatgtaggccagtcaaaagcctccaagttgggcaaataataaattctgtcggtaactttttgtaatttcaaatccttaatttccataatttcgccttctgtctgtaaagaaaatatatgaaataggcagttttaataatgtgaatttttaaaaccgcctgtcaataaaattcatattatgtttctatgtttattttaatacaaactgcaatttttttcaatattgtatatcatttttcctgtaaatatggtaaaatataacaaaaaattaaaggagtttttgtgtatgagtaatttgataagcgaaagacttgaaaagtttttagaggaaaacaagcagttccactatgatatgacatgcgaattaggcaagattgcctcaccttcaaatcatgaagaaaagcgtgcccggtggataaaaaaatatttcgacagctacggcggcacacagagttatatagattcacatttgaatgttgttttgcctattaactgtgacggctgtgatgaaattacagttgttatggctcataccgatgtggttttcccggatacggaagaattgccgatgaaaattgacggcgataaaatttgttgcccgggtatcggcgacgatacggcaaatcttacaactcttttgcttattgcaaaatacatacttacaaacaacttaaagccggaaaagggtcttttaattgttgcaaacagcggtgaagagggtcttggcaaccttaaaggttctatgggcattatgaacgactttaagggcagaataaaggaatttatctcatttgacggatatttcggtgttgtttgcaacgatgccgtaggcagccaccgttacagagttactgttaaaacagagggcggccacagctacggcaatttcggcaaccgcaatgccattgctattttgtcatctatgataaacaccctttacacaatgaaagttcctccgatgggcaaaaccacctataatgtaggcacaataatagggggcacaagcgtaaatacaatcgcacaggacgcaagtatgttgtacgagtaccgttccgacaaattggaaagcctgcggataatggaaaagttctttgagtccgtagtagagagctaccgcaatatgggcattgaggtaaatgttgaaattttgggcaaacgcccgtgtaaaggtgcagttgacgaagataagctccatgatttgacaaaccgcataaaggatatttgtgaagaaatcacaggcatgacctacggcacaggcgcagccagcacagatgcaaacagcgctctttccatgggcgtaccgggcgttgttacaggtgttgtaaaaggcgcaggggcacacacaagagaagaatggattgacggtacatctctgccaacaggcgcaaaagttgccggacggattatcggcaaatacttcaaggaattttaatcaatttaaatcggttattaaccgttaaataaagcaagaataaccccctttgcaagcgtttttaatcgcctgcaagggggttattgtctatgagccgtataattggacaatcaattacaaaaattttaaattttttattttttcttttttgaccggacgtaaaactgtttgttggcccttacatttacaaatgtcatggagtatatccgcaaaaaaacatagagcagggatacagagaaaaaagtgtgacctgcccttgtgccgttaaaccaaagcacaaaggcggcttgtacaggtgattcgccgaattttgagccataagcccgaaaaattgccgtaaccattatgcaaagggcagaggaaagaaccaaaaggggagatataatcataaaaaattttgcttttcccgcttttttaccctttaactcacggagggtgccaaagtattttaatacctcgtttttaacatcaaaggtgagcaaaaattcatattttgacgggtcaataagtttgtttaaaaacaggaatttttttatattgtcccaccaacagggcagggcaagtatgataaagacttcgcacacaattaaggcgaaaataaacaccgtatatgtgcagcctacaactcctaagataagtattgcgcaggtgcttaaacaaaggcctgtgaatatgcaaaagcgctttttgatgtttattttgtccccgggtgccacatttttaaaacacataaacggcacaagggcgaaaattatatcaagccatgcaaaggtcattgtgtacttcgggcagccgaaggcggaacctatcataaggcaggttagcatcacaacggcactgcctaaaattttttgtaaaaaaattgttactttactgagcataaattctcccataagaaaacccggcttattttaaccgggttcgtaatttttattctttgtctttcaaagcgtcgttaagtctgtttgaaagcactgcaaggcttgttgccatattctcgttttgcacgataatacccggtttaaccgacagtgacaccggtgcaaagttccaaatcgccaaaacaccgttttctaccaaaaggtcgcttatttcctgtgcggcagaggcaggggttgtgataataccgatatgtacatttgagttttcggtaaattccgccaattttgaaatatgataaaccggtttgcctttaacgcttgtgccgtccaacgccggattggaatcaaaagccgcaactatgttaagaccgtagctttgaaaaccgccgtagcctaaaagagccttgcccaatgcgcctgcgcctattaaaatagcgtcctttgtgttgttgtaatcgaggaatgtttttaaatcgtgtattaaaacttttgtttcgtatccgattttcggtttgcctgcattagaggcacatgacaggtcttttcttacctggacatggtttaatcctaaaatattggcaatggttgttgcagaaatgtactctacaccctctttttccttttcttccagcaaggaaaggtatgagggcaatctgtgaagagtccgctttgaaatccgattgttcatttaaatctctccttatacctcttaaatataataaatcactacatatcaattttatagtatttatttaatttgtcaataaaattttaccgtttatttactaaaagttgatagatttttcaaaaaatttgatgtaccataaactttgaaatgaggtgatgtgtaaaaatggtaacttatgaccaaataaagaatgataaagacataaaaacatatataatgatggcggatcaaactctttccgctttgggttttacggaacatagcctgccccatgttacccgtgcggcagatgttgccggacggattttgacaaagcttggctacgataaacgcaccgtggagcttgcaaaaatagccggttatatgcacgatataggcaataccgtaaacagggtggatcacgcacagtccggtgctataatggctttcagaatacttacaaatatggatatgccggcggcggaaataagtcgtattgtaagcgcaataggcaaccatgacgagggcaccgctttcccggtaaacgagcttgccgccgcattgattttggcggataaaagcgatgtaaggcgttcaagggtgcgcaacaaggataaaaatacatttgatattcacgaccgtgtgaactacgccgtggaaaagtcaaagctgactttaagcaccaagacaaagaaatttattctgcatttgactattgatgagagcataagccatatatccgaatactttgagatatttttaaaccgtatgttgctgtgccgcaaagcggctgattatttcggctatacatttgaagtaaacataaaccatttgcgtgttatgtaaagataaaataaggcggtttgtatggcgttagataaaatataaagcctgtgggtaaaatccgcaggctttttgtttattgagaaacagtttggtaaacagagcctattgccttaaaaggtaacattgccgccctttgataaatgcgcttaatataaaatgatttgagcctatttgccgtaggtaaatattgcggttcccgcagttatagccaaagaggtggcaatatataaaactgtgccgtcgatttcggcaaagtattcttttattacattgccaaaaatatcggtgatatatccaagtctttgtccctgttttatttcctgttccgtgtcaaattcacagtgccacatgccgtcaatgtctgcgtcaaggtagatcacatcggtcatctctttccggggcgttttcggcaaaaccggctctttatccgtaattcccaaatatgccataatattgtaaacatcctctttgtaatcggctgcttctttctcggaccaaagccccattccgcctcgctctacaagcagacagggaagccccaaaatggcccggctgttgtaggcaccggtagtggactttgattttaccatatacttggcgtttatatattttgcccggtcataggatttttgcaaaacagtttcatccccaacaccggggcggtaaacataagggggcagtttttcgtgcagatcaccgccgtgtaaatcaaggtagaaatcggctcttttttggtaattttccgttaaaaaatatgccaatttatcaccggctgtgccgttggggtcgcctgggaaaagacggtttatatttttgccgtccaatggggaaatgtacgaaacccttgcataaaatgccgctgtgtttacgcagtttattattacaacacccccgtttatttttgccgggtcaatttctttggccagctttgtggcagtttctatacaggggtattcgccgccgtgtatgcctgcggttataagcaaaagcgggccatcctgccggccgtttataactgtaaccggaatttctatttccggggtaacggttgtaaatccatgggcttttttgcccctttctgcggttatatttacaaatgtaaggtcatttttcatggctttgctccttttttgttttgcttggttagtgcttgctaacttaaatttactatactcaacggcaaatgtcaatattttgtggtgggttctgtaaaaatttgttttgttgcacaaaaaatcttccgccttattgacaagacggaagatttttaatattggatttctctgccggtgaccgaaaaaccccttaaattataattagcccaagtcggttgttgatgtaatgtcaactttaccggatttaatcatgtagttagagtagataaagataagaactgtaacaacaactgtgccgattgcaagaggcattgtaagtgatgtcaatgagaagaaacctgtaagtgaggatgctatcattgaaacaaccatcaaagccttaaatgcgccctcggaaaggttaaatgcgttgttaggccactgttccgggaacatcttaggcatcttcatagcacgaaggtctgtaaggaatgtaagaaccatacctggaaccatcatcattgaaactatgttgtcaagtgagacgccgctcatgatcggaatagcagaaagcaagaagataactatcaaagagtttctcggtttaaggaatatcttaggaatccaaccgtcctgtgcaatacctgtgtacatatggctgaaacctgtcaaaccgcccagcaaagcagttgaaagggaggccatagcaccgccgataacaaagaatatgtacaaagccttaggcaaaaccatctgtgccaggtagccaaggttctggtttgcaacttcaccgtaaggtgcaaggctggagcctacataacccaaaagggcatagataacagcgcaggttacagaggctataatccaagctttcggaatatctttcttaggattttccgcaacagaagcaaagttgataatggttgtgataccctcgcatgtaaaggacatcaaagcgatagcggtaataaagcttacgccgccgttgataaagaaaggttcgccttcaaatccgccgtggtgacataccgcaaaaccgaatgcgataaataagcctaatgcaacaattttacaaatgctcaaaccgttttgaactcttgcaaagatatttgcccctgttgaggcgaggaaacagaacaagcccataaaggccagtgccaaaattttctggtaaggtaccaaagccggaacaagtaatacggtgtagctggcaagtgaaataccgaaaaccgagaaggaaagcatacctacaaggttgttcaaagcggcaacgcctgtgagcataggggttaaaacaagggcggactgtgaataaacaccgcctgaaagattgaacattgaagatgttacaatcatacgggtttgctgcgacattttaaacaacatcgcaattaaaaaggcaatggcaaccgaacgaccggtaaggcctatacctacgcccagcattgagtagatacctgcgccgatacagccgccgatacccataaataccaggtcaaaaagtgacattttcttttcgctgtgcataaaaatttctccttaatttttattttgcttcaagtacacatcatcaccaagtgtactctcttgacgtacacattctaacattttgcatggactgtgtatagatttaaattcaacaatatttcataaaatattttataaattttgccaaatgttcagttttagcccatttgccgatttaaggtgtgtatctctttatataaaaataacctcacagaatgttgaattattaacctttacaatatataatgtagaaaacagtgacaattagaaatttattgcgaggtaataatatgagctgccaaaaggattgtatgctgataggtatcgccgggggaacaggttccggaaaatccacttttacaaacagaattaaaaaacagttcggcgatgatgtaactgtcatctaccatgacaattattacaggcgccgtgacgacattccctttgaggagagaaagaaaataaactacgaccaccctgacgcccttgaaacggatatgcttatcgagcatataaaacagcttaaagccggcaaaagcgtggtttgcccggtttatgatttttcggtgcataaccgcagtgataaaaccgttgttataaaacccagcaaggttattttggtggagggaattttggttttgcaaaacccggaactctgcgaccttttggatattaaaatttttgttgaggcagacgcagacgaaagaattttgcgccgagttcttcgtgatgtggaggagcgtggccgtgatttaaggggaattatcgaccaatatttaaccacggttaaacctatgcactatcggtttgttgaaccgtccaaggcaaaggcggatattgttataaattccggtcttaacgatgtggcttacgatattgtaagcacaaaaattcaggcttatttggacgggaaaaatgacgattaagtaaaggcggttatatttggtggggcggcaagctgttttatatgggaaaaccggagggattgaccttggtacaataaactgatttgcaagcgaacttatagctaaatatcgtatacaaacaaaatgctttcaatctctcagtcagctacgctgacagctctctttaccaaagagagccttgc

SEQ ID NO: 2534 - DNA, 27317 bp, Unknown
  16S sequences of unknown bacteria
tattgttttttctgacggtcatcggcgcttttatgaatacttacctgtttaatccgacgaaggataaattctacgcggtgatgctgatgcgcatgaacgcgcgggaatatgcgctgacagattacacgtatgcgattctgaaagttatcgtgggatttctgccgttctcgctgtttttcggtctgtacaaaggggtgccgctgtggatttgccttctgatcccgttttttgtcgccggcgccaagctgctgatcgtgatggtcaccctgcaccgctatgaaaagacgggaaagatcaccaatgaaaatcagctgggaaggttcggatggattgtcttcgctctgctcatggctgcggcatgtataccgccggccgccggctttgttcttcctgcggcggtttctgcgggactgatgatcgcggtcaccgccggaggacttctgtccgtatggaaagtcgccgggtttaaggattacaaggacgtctatcgtcagatcctgagtcaggcgaaaaatcagatggatcttcgcggacagatgaagacgcagaccagggaacagagccgtaaaatgatctccgcggacacgacgatcaccagccggaaaaagggatttgaatatctcaatgagctgtttatccggcggcatcagagacttttgtggaagacttccaggaaaatcgcgctggtatctctggggattgtctgcgcggctcttttggggttttatctgtctccggaattcaggaagacgaccaacgaattattgatggtttatctgccgtattttgtattcattatgtatgctatcaaccggggaaccggctttactcaggcgctgtttatgaactgcgatcacagtctgctgacgtattctttctataaacagccaaagtttgtgctgaaactgtttcagattcgtctccgggaaatcgtcaaggtcaatctgctgccggcggcggtgatcggcggcggtctggcgggactgctgtacgcttccggagggacggaaaaccccgtgaactatgcggtgcttttcgtgtcggtcatctgcctgagcattttcttttcggtgcattatctgacgatttactatctgctgcagccgtataacgcaggcacggagattaagagcgctacataccgcatagtgacgatcgtcacgtatttcatatgcttttttatgatgcagatccggatgtccaccatgattttcggcggaatgaccatcctcttctgtgtcctgtactgtatcgcggccagcgttctggtatataagttcgctccgaagacgtttaaactgagagtatagaaaaataagccgcagcttgcggaagaggaacatttctgaagcgccgggcggactgtccggcgcatttttacgggactatttccaggattctggtgcgacggcgatcacgatttctccgcctccggtgagataataacataccgccgggacggaaaggacgcttccgtcttctgcaaattcaggctgccggccgcctttcacgcggtaaccgaaaagcgccgggatgtcgccgatggtgtcgctcaggatatccatgcctctgccgcggagcgtctttcgctgcgggtcgtattccatggtgccgggaagtgcttcgcgcacgtcttcaatgtatttcaccccggtcagcgtgatatcgtcgccatcggtgaagatgagatcgtaggaaaaggtcacataggggagaccctccgcctccgaccagtcgcagacgatgacctgttcatcgtggatgaggattccggcgttctgacctccggtgagctccgttagattttttattttttcgccgatatgcgccggaagttcttcctggcgcagttttgtgctgattttcatgggattcctttctgaccggtgatcggtcctgaattgtattttttcccgcgggcaggagagccgctgagtcttctgacggacgacaatctgtttccgccgttttctgaagcggacgggttccgttgaaaatgcttgtcttgatcagattctaaccgagcggcggccggccgtcaacttcgggacgcattcttttcatgtttttcagacatggcggataatacatgatacgcatttgactccggggatacatgggaataaaatagcgaaaaaagccggtttctgccggcgggtaagaaaagagggggatttcatgagtaaacgaaggatgaaagagcgcgggacagcgcggaaagacgtgtggtttcgtcgcagaggaaaatttgccgccgctactgcactgttgctgtgtctctgtacggcgttttccggctgcgccggctcggagacagcgacgagccggcaggcggaacttcgcgcagaggcgaagcagtatgatcaggcggtgaatgagcagggaattgcggtggatctttcggaaaatccttattatatgaaggaacatccggaatttcagtacagtcagccggagacgatcacctatgactcggaagtgaccggtacaaagcgtcacgcgaatatccttctgccggcggattatgatgcggatcggcagtacccggtgctctatcttctccacggtctggacggaagtcaccggacctggaagaataaagacaggcatattatccttcagaatctgacatatctttacggcgtgccggagatgatcgtcgtctttcccaacagtgcggtaaatgaaaacgaggatactgacgggctgagtctccgggaaaaggtcgaggcttatgaccggacggaggaagatctggtgacttcgctgatgccgtatatcaacagtcactattcagtgaagtcgggcagagaaaacaccgctgtcgcggggaattccatgggcggccgcaatgcgctgaatacagcgttccgtcacccggagctcttcggttatgtgggcgccttttcctcagccagagttcttggggatccggattcttccggacagtcggcgatggcgcctctgatccgcgagtttactgtagatccgtcggcggggaatttcgaaatgctgatgctgtgcgtgggccgtcaggacgacgtctgcggagcggagacctaccggattcacgaaaacatgacggaaaacggtgtggagcacatattttacgatatggaaggcggccatcagaataccgtctggcagaacgcgctctacaatttcggcctgagactgttcgacggtacggaagcgtgattttggccggcagtttctgatataattggaaaattttgagagataagtctccctgcggtgcagacagttgttttgcaaagggagattttctttttctgcggctgaaaaaagaaaacgagacaaggcgtgtcatttgtggtaacctgtcatgagcggaaaatacggttacgaaagactgccgctaaagaacacagagggcattatcgttggaaattatcaggaaatatttcggggagagagaatgaaaaagaacgtatggacggagcttcctccggacagagataataagatattcggaatttttaccagagaacggaatttttaccgcacgttttttccgcttctgtttatcatttcactgcagcagctcactgcgctcaccgtaaacatggcggataatatcatgctgggaacttattcagagctggcgctctccggagctacgctggtcaatcagatacaatttaccctgcagcaggtctcttcgggtatcggtatgggtatcgtagttctcgcttctcagtattggggaaagagagcgacggaaccgataaagaaaattatttctatgggtgtgaaactcggatttctggcgggcgttctgtttttcgccgctgctgtgatcgcgccggagggactgctgtctctgtttaccgacgatacggcggtcatacaggaagggttaaagtatctcaggatcatctgttggacgtatctcatctattctgtatccagctctctgatgtattctctgcagagtgtagagaccgcggtggtggggacggtcatgtctctgagtacgatctgcatcaatgtctgtctcaactattgcctgatctacggcaatttcggagcgccgcagctgggaatcgcgggggcggctgccgcaactctgatcagcagagcggtggaactgatcatcgtatttgtctatcttctctttatcgaccggaagcttcagatgaagctgcgggatatttttcagatcaattttacttatctgaaggactatatccgggtagcttctccgctaatggtcagcggcgcgctctggggtgtggctcaggcggcgcagacttccatactggggcatatcagcgcggaggcgatcgcagccaacagtattgcagtcgtcatctttcagatctttgccgtggtgggaacagcgtgcgccaataccgcatctgtcacgatgggaaagacgatcgggcagggcaggctggatatcgtgagatcttatgcgaagacgatgcagggtatttttgtagtgatcggcgtcgtttccgcaggactgctgtttctctttaaagatctgattgtgggaatttatgcgatctccgacgagactgcggtcctcgccgtgcattttctggtgattctcagcgcggcgaccgtaggaagctgttatgaatatccggtagaggcggggattatcgccggcggcggggttacgcactatgtggctctggtggacaatctgttcatgtggctttttacgattccttccgcttttctcagcgcttttgtgttccggtttccgccggagatcacattctgctttctgaaagcggatcagattttgaaatgtattccgaatgcgatcgtctgcaacagatttcgctgggtgcggattctgacgaaaagtgcagagggggcggacggaaaaaacggaggcgccgggatgcgggaagtgtcagaagccgggaaaaacaggaaagaaaatccggaagctgacggcggaaaaatactgaagaactattgcagagccgacggctgtacagagacggaaaataataaattgacataaaatgtaaaataatatataatatggataatgttggaagatgaaataatcatacctcactctgtgaggtatgtctccggcgttgacattctgtattcagtgcaggagatcaatccgctttcggtgacgatatagtctgcgggaatatctccgggatctgccggcagaatgccgctgaccacctgaaaatcgtaagcggcgccgatcagcgtcacaggacgcgttctctgcgcgagaaaacggtcatagcatccgcggccgaagccgattctgtttccgcagcggtcgaaaaccacgccgggcagcagaataaaatcaggttcctgcacggaaacttcgggactcacggaaggatccggctccctgattccgagaggagatacttttagttcatcgagatggtgtacgcggcaggggtggatgacaaagttcggatctgtgaagggaaggatcagctctattccgcggtccagcactctctgacagaaatcttgtgtgggaaattctccgcggaatgacatatatgccatcaccgtcagcggtgtttttctttttttctgagcagacgtcagcacgggagaaagaaaatgccagagcgatccggaaactgatgtggtctgagattccggaagctgatcccgtctgttcagcatctgccggcgaaggatgtgtttgtgagaattttcgagatgggacatttttttctccttttcacagaatcaacaaaaaaacagagtagagtaatatggtgtataagcccgaatattgcgggatattgtcgtatgagagaggaaaacggcgataaatttgcactttttcttccaatatattataataaatacgtatgcggccggcaacgcggatccgcataaaacagaaaagaaaaatcaggaaggacagccgatgatagaatttaaaaatgtcacgaaatcctacggcgacaaagcgggactttcggacgtgaatctttcgatcgatgacggcgagttcgtctttttagtaggtcccagcggggcgggcaaatcgacatttatcaaactgatcctgaaagaaatcgatccggaaaaagggcagatttttttccggggcagggatattacccgactgccgaaacggctgattccggggcttcgaagagatctcggcatcgtatttcaggattttcggcttctgccgaaaaagaccgtctatgaaaatgtggccttcgctatggaagccgttcatcagcgcaaaaagctgatcaaagaacaggttcctcatattttgaagttagtggggatcagcgagcaggcggaacgttatcctcacgagctttccggaggagaggcgcagagagtggcgattgccagagctatcgtaaacaatcccaaggtgctgatcgcggacgagcctacgggcaacctggatccggaaaaatcctgggaaattatgaatcttctggatcagatcaacctgcgggggacgacggtagtcatggtgacccatgcgaaagacatcgtagaccgcatgggaaagagagtcattcagatcgcggaaggcagagtcgtgcgggacgatgccgccggtttttacatacagaccgacgagccggacatgccggttcaggctgttttggacgatatgatcgcggagagcgaaagcgacgtccttcaggccgggatgatcaacgaaagtctgacctcgggtctcagcgaagaggatctgagcattttcggcgaaatcagccagatgagcgaacttgtcggtgaagatgagattccggtgagtgctggagacgggagagggattctgccggaagacagtgcagagccgaaagtttccgggtcagcagtggagacctctccggcatctgcggagactgtgaagaaagacgagccggaaaacgatacggtctctcaggaaaaagacgcatcttccgctgcgccggcggtgaaaaccggcggcgccaagcgaaagattcgcaaaaaaagaggaggaggtaccgatttatgataaaatccttcttctatacattgaaacagtcgctgctgcagctggtcagaaacaagacgatggcgctgacgtcgctgttttctatcacagcgatgctgctgattctggggatgttttttattctggcggtaaatgtaaatctgatgacagcgaatatggagcagcagtttgacatggtggaagtctaccttctggatgaaacgccggaagaagagattcagaccatggtaaaagagtttgaagctctcgatacggtggcagaggtagaatatctcaccaaagaggacgctatgcaggagatgcagacgcgctggggggaaaatgcctatctgctggacggtctctcggaaaatccgctgccccggtctattcaggtgaccgtcaaagacgtggaggattcggaaagcatcgtgaccttcgcggagaacttctctggagtagaagatatcaaggacagtcaggcagaggtggacaaaattctgaagattaccggcgccgttcaggcgggagccctggtgattatcatatttctgattatcgtctccgtcgtggtggtgtccaataccgtaaagctgacggtactggcaaggggccgggagatcagcattatgaagtatgtgggggcgacaaactggtttatccgcgggcctttcctggcagaaggcattatcatcggaatgatcgcagcggcgatatcttccggactgatctcgctgctgtactactatctgtcaaatgcccttagtctgcagtttctcgtgctcttctccaccggactggttccgatcggatttatgagcgccaatctgattatcatatttacgtcactcggcataagcatcggcgcgggaggtagcatcatttcgatgcggaagttcctggatgcttagacgcagataagatcagagcggacaaaaaaggtcgaaagacacgaaagagtcctgtgttacggcagatattgcagcagacaacgaagcttgaaaggagaaagagaatttatgtgcagaaaacgaatgattgcaatcctcacagcggcggcgcttctgacaggtacggtaacgtcggggttcgtctatgcggagagcagttcttccaaactggattcggtaaacgatcagataagttcagcaaaagataagctaaaagaaggcgaaaagaaggaaaatgagctcgtggctcagatcgatgcgctcaacgatcagatcgaatcccgcgaaacgaagatcgcggagctggaagcggagattcagaagacagagggtgaaatcgcggctgccgaagaacagttagccgagacggaatcccagatgacagagcagaacgattctctcggcaagcgtcttcgcgtgatgtacaaaaacggtgaaaccagcattctgcagatcctgctgggttcctccagcatttctgaattcctgacgaatctggacatggttcagaagatttacgacaatgacatggatgttttggagcagattcaggaacagcacgatctgattgaacagaaaaagcaggagctggaatctctgaagacaaagcaggatgatcagcagacggagcaggagacggaaaaagaagaattagcggctgagaaaagcgatgtggaagcgctgaaggctgaggtggccagcgacaatgcggctatcgaagcgcagatcgatcagctcaataaggaagcggatgaacttacggcgatgattcgccagcaacaggcgtcttctaatgtgagctccagcgctacttctcagtataccggaggacagatgctgtggccggtgcctggttattataatatttcttcaccttacggatatcggattcacccgattctgcatacgaagaaattccattccggtctggatattccggcgcctacgggaacgccgattatcgcagcggccagcggcacggttatcatggctcagacttacggcggttacggaaagtgtgtcatgatcgatcacggcggtggtctggtgacgctttacggtcataatagctccctggtggtcagcaaaggacagactgtgacgaaggggcagacgatcgcgaaagcgggttctaccggacagtctaccggttctcactgtcattttgaagtgagactcaacggttcgacgacttctccgctgagttatgtacagggatagccgccgtatttttctctgtccggcccggcggctgagaccggcggagcatcaatctgcggattttccccgggaattccgctctgaatcagagtaaaaacaagacgtaaaaataaagcaagcagaataaaaaattgacaagagggtatttcagcggtccgtcaggcagtctgtctttccccggcagagctaatttttgtcttcgccgggagaaagacgggctgtgtaagcctgccggcttttgaaattccctctttttcagatggcagcgaagagagcaaaaaatatggaaacgatcaaacttcatccggtactgaccggtatattgaaaaaaagaggatgtcagacggcagaggatatcgaggaatttctttctccgattccccgtaaaacttatgatcctttcgccatgaaggggatgagggaagcggtagatctcgtgctgcagcatatcgaagacggaaagaagatctgtatctatggcgattatgacgcggacggcgttacgtcagtatcccttctgtatgagtttctgtccaatctcacacgcaatgtgatctattatattccatcgcgtttttccgaaggttatgggctgaatctttcggcaatcgatgaaattcatcggcggggcgctgatctcatcgtgacggtagactgcggctgtgtctcttaccgggaagtggagcatatcaaagagctggggatgaaagccatcgtgacagaccaccacaatgtggacggcagaagcccggattgcatcatgctgaatccgaaacagacagacgatacctatcctttttcttatctctgcggctgcggcgtagcgtttaagctgactcaggggttacagaggactctgaaactgcctaagaacgacatcaactgtctgctggatatggtctgtgtcgcaaccatcggggatatcgtgcctctggtggatgaaaacagaactctggtgaaatacggatttgaccgcatcgccagaggagaacgcccgggtctcaaaatgctcatcgagggcatcggaatggatccttccaagctcacttccaccaacgtagcttttgggattgtaccccatatcaatgcagccggccggatgaaagaagcggccgaaggggtacggctgcttaccggcagacaggatgaggaaatcagcagtctggtggaggaactgaagactctgaatgcacagaggaagtcgattcaggacagaatttttgaaagggcgcgggaggcgatccgtgcggatgattctcaggatctttttctgatctatgatgccgggaacggacacgaaggtgtgatgggaatcgtagcgggcaagctgaaagaagaattctatcgcccggtcatcatcgtcacagatacggaagaggaggggattgtcaaaggaacggggcgaagcgtagaaggcatcgatcttcatcagatcatgtctcgctgcaatcatctctatatcaaattcggcggccacgcgggagcctgtggattttccatgaaacgggaaaatctcgcggaacttcgccgatccctcaacgaaagtgtccgctgtctggtgtcagaggatcctcagctcctgcattatcaactgaactgggatgcggagatttcttccgcggatgtgacgctggattttgcgatgcagattgcaaagcttgaacccttcggcgaaggcaatcctcagccggtctttctcattcgggatgtgttggtcaagagcgtaatgaggatgggaggaagcggccaatatctgaaacttcgctgtgaaggcgaagggggaactctttttgacgcggtatggtttgatgtggaagaggaaatcgtcgggacattaaatccgggctgtgaggtccggctgatcgcgtctttggatatcaacgtatggaggggaagaagttcggttcagtgtatgatccgcggtatacgggtgtcgtgagcttttcgcgtccggcgcatcctggaggagcgaagtcttttgcagaatatctcaaagaagccgccgcagattctgccgctgcaaaatttgtgaaaagaatattgcggaacaaatcctgcagggatattgtccttctcactctgctgtagtataatactgtagtgtataaaagcgctgaagagcggttcagcggagtgatgctctgtctgcggggaaacggaaaaacgcaggcggacaaaattaggaggagtgagatgggttatgaatccaaaataaagaacagggcggcagacgatcttttcgatgcgattatgtctatcgaggatctggacgaatgttacaagtttttctctgatctgtgcaccgtcaaagaaatccgggctatggcacagcgttacggcgtagctaagctgcttctcgataaaaagacttacagcgagatcgaggaggcgacaggcgcaagtaccgcgaccatcagccggatcaaccgaacccttcagtacggtgccgacggctatatcagtgtgatcgaacggatgaaggaagaagaataaccggcccgacaaaagtccggatatagtataccgaagataatttgccgctcgggggtttcccgcagcggcattcttttcttttccaatctccttgtttttctgcaacgggaaagatttttcttcatattatataggaatatctgcaatatacccggcgtaaagaagagaggaggcgatcttccatgagctgcaaaagaagaaagagaccttccagaaggaataaaaactgtaaagtgatatctaccggcatgattctgatcatcaccggcgtattgattttaagtctgtttgtactgccgcataaagttctcatcattttagccgcaatcgctctgattgctgtcggctgttttctggcatagacatctgagcagaaaaagagcagtgtttcagtctcggtaatcttcctatttgaatacagagaaaagaagggaaatgtaccggaacgggaaaggcagaaagcataacagaaagaaagtaaaaacggtgaagcaggaaagaacagagcaacagcgaaaacgagtacaaaaaagcggacgcttcttgaagcgtccgctttgagaatctacaataaaaacgggataatgtgctgatcggaaaagactgcgtcaaaccggaacggagccaaccgtaaaccgatctataccttcagctgccgagatgattctgcaacagcggtaataaaatgttatcgattaaaaatcatccagtggatcgacgaactccgaagtgtccatttccgcaaaagaaatagaaaaatcgtaaccgccgatgcgctgcgtatgttcgatgcgtacaccggctctgaggcagtcagttttgcagccgcctggacatgtcttgcagatttcgccctgcgctacgcctctgcggccgatactgtctgtagtatgaacgattctccccacaatatctccttctttcttttcaaatttaaaaacagagcggcggccgattagaaccagccgtcatctcctgtataactgatggaattgtcgatgttcttcatcatttcattccagtcgtattcctttttcttttcgtggctctctaagattctgatgcagtctgttctgcagccggaagcagtgcaggacttgcagatcggtaagtgtctgttgtgtttgtttgtgtacatgctgtctgccatttgaagaccttcctttcaatgcgatagatcgactctcaaagtgttttagcgtttcagcctcgtacgttacataaataaatcgaagtttgtttatctaacataaacagttgaaatgcctttccgcgcagggatcgcagaagtccggattcctgcggttctgcttattcgctaagtaaattaaaccactattttaaacatatgtcaataataaaacgataagtttgtgcaaataatttgtgtgaaaatattttgcacacgatagatttacgctcagtgacatccataggttcgaacgtcgcaggaacagccgcagattctgtgttcgcagctgaatttctggcagcaagtatcgttgttttcgcagaccacgtaatttcctccgcagacttcaagcgcagtccctttgacgagataaacggccagttttttgcgggcgtcggtatacaggcgctgcaccgtggtacgcgctacatgcatctgctcggcgcattgctcctgggtgagaccgatatagtcgatcagccggatcgtctcgtattcttcgagggtaagggtcattacctgcatgtcgtcctgattatcggcgttttttgcataaaagtaattattttttggaaggctgcaaatcctcttgcatttttctggtcttgccataagttatcctcatttcatgtagattcggcattgtgtgaatgcagtataactgctcttatctacataatatcacttttttccggcaggggtaccggaaagacagatttttatcaaaaaatatttttaaaagtggtcagaaatcgttttacacaggtcagaatctgtgttataatttcgattgttcatgaatttatgaaattaaatggctttttgcgccaagcggaaaaagccgtttatcagaatatatgccgttagcgataacggtcggcgaaggaggtgtttcagttgtcaagaaaatgcgagatatgcggaaaaggtcaggtttcaggaaatgctgtaagccactcaaacatccacacgaagagaaagtggaatccgaatattcagacagtaagagtgaatgaaaacggtagagtaaagaagatgaatgtttgcacacattgcatcaaagctaacaaggttacaagagctctctaatatcattgtcaatcgaggcgtctgatcaggttcaggcgccttttatcgaattgccgaacctgcacaactgtacggaggatcatcatggaatacgaaggcgatatgattgcggtctacgacgaccagaacctgccgctggaatgcgacattatcagtaagtttaaaaacgaagagacgggaaagagctatcttgtctatacggataattccagaaacgaagaaggcagaaaaaatatgttcgtcgtctcttacagacctgacattcctgaagaagataagctgacaccggtcgagactgcggaggaatgggaatctatcagcggtttccttcaggaactgcgtaaagtcatcgatgagaaaggcttagacctctgagatcactcggcttctgtcgtgaaaaaatgattgcaaaacccctatacaggcgttatcgtctgtataggggttttttacagatcgtccgatgttaaaaggaggtagataggtgatacaagccgaagttttgtatgggatttttattccttttgccggcacatttctcggatcggcctgcgtctttttcctgagaaacacgatgagcgaccgggtgggtcgggctctgaccggttttgccgccggagtcatggtggctgcttctatttggagtcttctgatacccgctatggaagagtcctcttccatgggcaagtggtcttttctgcctgcggtcgccggcgtctgggcggggattctgtttctgcttctgctggatcatgtgattccgcatctgcacagaaacagtgacaaggcagaggggccgaagagcgatctgtcaaaatccacgatgctgatgctggccgtgactcttcataatataccggagggaatggctgtaggtgtcgtctacgccggttatcttgcgggaaatatggagatttccgctatgggggctctgacgctctctcttggaatcgccattcagaattttccggagggcgctgtgatttccatgcctctgcgggctaccggcatgaagaagagccgcgcttttgtctgcggcgctctctccggtatcgtggaaccggcagcagcgtttctgacgatcctggccgcgggacttgtcatccccgcgctgccgtatctgctgagttttgccgcaggagccatgctgtacgtggtggtggaggagctgattcccgagatgtctcagggagagcattccaatgtgggcaccgtatctttcggcgtgggattcagtctgatgatggctctggacgtcgcgttgggatgagaaatgacaaagaaggcgccccggtttcggaaagggcggaagagccgcgatgggaagggacgccgtgactttaacggatacgatagaatttctgagatacgggaaaagcctctgaagtctgacggcttcagaggcttttctcatgtttggtctttgcaggcagtctgaagactgtggtgcggagatctgtcttccgtttttttcgccggcgtcatgtcgatgacgacgatgccgatatttttcgtcttcggaaagtagtagccgcaatccgcgggctgaaatttcaggcggacgaattctttcagctcttcttctctctcgaaccgatagtaatatctcacatattcttccgcttcttccagcgtagcgcagggttgtccgaattccatggtcagcggaatgagccggtaggagaccgtgcgctcgtctaaaaattcggcgatggcctccatagtctcaaaggagcggcctttttttccgtctgtttttttattcttttttgtatctcccggcgtatcggaaatcttttccgccgccgtgtccgggagatctgtgtatgcgccgttccgggtttttggcaggccggcgggcgtcgccggagagtcttcttccgcagtcctcccaaaacggcttcgcgtggcgaaagctttctttttctcttcgatctcgtcagggctgtaacgcgggacgacggcgatgatttttttttcggccagctgccggagtgcgtcccagtcggtgaagatcgcgctgaaatagctgaagatcaccgtatcgaattttttacccgcgaggacttttctccagtctccgggaagaaattccaaattagcgacgggttcctgattctgaagcctggagcagaattccagcgagctgggatcgatatcgttggcgatgtaccgggcggtgaggggcgccagatggcgtgccagcgttcccgcgccgcaggccagttcgcagcaggtttccttcggattcagataaggtgcgatatgagtttttaatttttcatgatagcgcgtgtattttgatgccgcttcgtaccattctgcggaatttccgctccaacggctgaaactgccctttttctgtgtattcatgattcctcttttctgtgctttggtttttatcctgtggatcgagttcgccgccggggcggcgcgggcttccgcctgtcaatctcttttatacgttattttaacacgtctgcagccggtcttgtaccgggaaaacagaaaattcaccggatcggcaagcggaatgtcccggtgccggaaaatctgttttttgccaaagaaaagcacgacagctgatctgccgcgcttttcctgtgtttttgttgccgatatcttttgtattttttgtgctgcataaccgtagaaaacggttttctgccggcattttccggatcaccgtcctgcaaaacggagatcacaaccgtatcatttccatatcacaaatcgtaattttaaggagagtttattatattgtgttttgtcatttaaaataatgaaataaaactaacttaacctaagtatagcataaaaggtttttatgtcaataggaaataatagtttttgtttgtttttgtttgataaaattgatataatagggaggaagatgttgcttctgccgtcggcagagggaattgcagtttcctgtcagagaccggagactttacggaagtccgggaagcggacgcttttcggtgtcttgttcaaatctttcacatattccgcccggatgatttcatcagaattttatggtttatcgtatgagataataaatagagaatgttctcatgtcggaataaaataaaatggctcaatgcccatcggcatggtatagtattaatataacagaaataaaattttttaccgcagccgcaaggcatgcgggcgatatagacggagtacagagatatgaatcaggaaagaaagcctgcagggctgatattagcggcgggattttcgtcgagaatgaaagattttaaacctctgatgaaaatcggcagacacaatccgctggaaatcctcatccggcattttaaaaaagccggagtggacgacatttttgtggtgacgggatttcaggcggaactgctcagcgattttctgagagacgagggtgtgcacgcagtatataatgaaaaattcgaagagggaatgttttcttcgattcaggcgggagtccgggcggcgtacgaaaacggaaacgactgtttcttgatgacaccggtggatgttccgctgattccgccttacatcatcaaagcgcttctcaaccggtacgataaggcgccggggcgctttatcgtaccgtgctacgaaggaaaaaaggggcatcctctcctgataccggcggcttttgcgccggaggtgctggagtgttccggtgagaacggtatgaaatcggtgacgtcgcggcatgaaaaagaaatgatctatctggagactaactgcgagagcattatgctcgatatggatacgcaggaggcttatgcgaatctcatagagtactatgatcggaataaatatcctacggaagctcagtgccggaagattctggaacgcatgggtacgccggaacacgtcatacgtcactgcgatgcggtgactcggacagcggtgcgcatcggagaggcgctcaacgagaaaggttgcggtttcagcattcctctgatccgggcggcagggctgcttcacgatgcgctgcgcgttcgaaagaaacactggcaggcgggcgcggaaatggcgttcgattacggttatccggaagtcgctgatatcatatacgatcatatgaattatatgcatccgataccggtactggatattacggaaaaagatatcgtctgcctggcagataaactgcgccaggaggataaactggtgaccctcgaagaacgtctcgcgcccgtgaaaaagagatgggcggataatccggaagcgatacagattatcgaagacaagatcgaggcggcccgggaggtgatgaagtttatcgaaaatatcatcggtgtcaggatttatgatcttttagccaaagacgatgagcagcagggcggaagcgccggcgaagagaaggcgaagagacgccggctcattctcgtccggcatggagagacgcagcgccatgaggaacgcgtctttatgggacagtacgatgtgcctctcgacgcggaggggaaagaacagtgcaccattgtagggctggagcttcagcattttgatatcgacacggataagatttataccagcgatctgatgagggctgtggaaagttccgagattattgcggggtttctgccttccagaccggaggtcgtcgcactgccggagctgagggagatgtctctggggtcctgggacgggaaatttatccgggagatccgggaaacgtatccggaggagtatgcggcccggggggaaaatctgctcacttacaaaatcgacgacgaggcggagaattttgtgcagctgcaggaacgagtgatgaaaaaggtcaatgaaatcatccgttctgccgagggcgacgtgctgatcgtagcgcattccggcgtcaaccgggtcatcatgtgcagtctgatggaaaaagagctgaaagatatcttccgcatcgaattcggcagaggaacgtatcagattatggagctgtgacagcaaaaacgggcggcagtcttccgaaagccggcggccgctctgtaaaaatccgcaattcccggcggcgtttctgattttgtcacaaaaaaggaaaaaaggacagactgaccggtcatttttgtgcggcagttttgtataagaaaaaccctcccgcagtatatctgttatgggagggcttttttatgaggaaaaataacagaaaaaccgcgaagctgcggatgaagatcggaatctgtatcgctatcatcatcgccgttctcatcgtgaaaaaatttgacggccatgagaaaaataaattcgtcggtgcagtagcggaatattacggcagagattattccgtggaagacgtggtgtccgccatgtccaagggaatcgaaaaagcggaaacgattccggatctcatcggcggcgcggataaagacgattagagaagaaaaaagtgaaatatatcctgttttatctgatgacctttctgttttcttttctgcatgaactgactcacgcaggggcggcgaagctgttcggatgcggtttttccatcggaacggcgggaattttcgggaatgtggtctatgtcaggagcgaaggaagcacggtttttatcaagacatttattcagatcgccggtccggcgctgaatctggtcatcgccggcgttactctcgggcttgttcactggaggattcttccggaaagcgatctgacggaaatggtgatctattccaacggtatgctggccgcttttaatctgctgccgttttttccgctggacggcggccgtatttttgaatccctgatcgcgtatctcgtcggagacaaggcggcgagaaccgcggtcacttttttttcaaagggatttgcagtttttattttcttttcaggtctatacttggtaaaatataatttaggaaatgtaatactttcactggccgccatctatttctggcggatgatcgagcgtgaaaatgaaaactggctctattcgcgcgcggaattaaaatggaaagaaaggcaagtacagggaaatgaaacttaccggacgtatcgaggaacttttgatgagagttgagaagcctgcggcttacatgggcggagaactccattcatatgataaagaggaagagagcgtggatctgaatttcgggttctgttttccggacacctatgaaatcggaatgtcgtatctgggtcttcagatcatctatcacgtgctgaacgagcgggaaaatatcttctgccagcgtttttttgcgccggcggtggatatggaacggctgatgcgggaaaaggatctgccgctcttttccatcgaaaagaaacagccggcaaaggagatggacattctgggatttacactgcagtacgaactgtcttttacgaatatcctgaatatgctcgatctggcgggaatcccgctgaggagcagcgaacggggagaggcgtatcccatcgtcgctgccggcggcaactgttcctttaatccggaacccctggccgatatcatcgacttctttatgccgggagacggggaagatgttctcatcgaagtctccgaggcgataatcgcacataagaaatccggcggaaccaagcgtcagctgctggaaagactggcttctatcgacggtatttatgtgccgtctttttatcagccgaagtataaggaagacggcaggatcgcgtcttatgaaaagctgtatgaaggcgcgccggatcaggtggtcaagcgcattgtcatggatatggacagtgtctcttatccgatgaaacccgtcgtcccttttgtggaagtggttcacgaccgttcggtgatcgagctgttccggggctgcacccggggctgccggttttgtcaggctgggatgatctgccgtccggtgcgggagcgcagcagagaaaaagtggtggaatatgccgagcagcagctaaaaaatacaggatatgacgagatgtctctcctgtctctttccaccagcgattactcggaaatcgagccgctggtcaccgatctgatgaagagctgcaaagcccgggaggcgggactctctcttccgtcgcttcgtctggattccttttcttacgatgttctgaacgagattcaggaataccggaagacggggctgactttcgctccggaagcgggaacacagcgtctgagaaatatcatcaataaatccattaccgatgaacatatctattctgcggcagagcaggccatccgtctgggatatcataatatcaagctgtactttatgatcggcctgcccggcgagaccgatgaggatctggacggcatcgcagagatcgcccgcagagtcaatgaaatctaccgcgaagtctgcgaaaagaggacgaggtttaatgtcaccgtcagcgtctccaatttcgtgcccaagccgcatacgccgtttcagtggtccgctcaggatacgccggaggaattcgaccggaaacatcattatctcagagaaaagctgaaaaagataaaaggagtgtcctttcagtatcacggtacggagaccagctttctcgaagcggtcttcgccagaggcgaccgccgggtgtgcgaggtcatgctgcgggcttacgagctgggctgccggtttgacggctggtcagaacatttcgactattccaagtggctgcgggcctttgaagatacgggggtcgatcccgctttctattctcagaggctgcgggacgccgatgaaatttttccgtgggacattatcgattccggcgtgacgaagaaatatctgcagaaagagtacgagctggcgaagaggcaaatccaaacgccggactgcagaaagggctgtaccggctgcggcctcaaacgttttgtggagtgtccgcagtatgaacagggaaagaattattcatagcgagggagcgggaaatgggaagatatctgctgaagttttccaaggaaaacaatttaaaatatatttcgcatctggatctgctccgggtgtttcagcgcgcctttaaacgggcgcatatccggctccgctattctcagggatttaatccccacgcgaagatcgggttcggacagcctctctctttaggcagcgagagcacgggagagtatatggaattcgagacagtggaggaccgcgccggcggagagtatctgacggctctttcaggatgtatgccggatggcatccggcttctcagctgcacaaagctgaaagaagaggggaagacatccctggccgcggcggtagcatacgcgtcttatgtggtgaaattccgcggcgatgacgaagagcggcaagttctgagccgacgtctgaaagaatatatcagtcgggagtctattctctgtgagaagatgaataaaaagaaaaaaatcgtggagaccgatatccgtccgctgatcctgtctttttccgaggtaaaggcggacggggggcaaaacatctattccatgacgctgaagaccggcagcggaggcaatctgaatccggagatgctggtgaaatccttctgtgagttctgcggcgtggaatatctgcgtcaccggtgggattaccggcgtacagagatgtattttatatcgggggaacgtggggagattcagcctctgacggagttttcaggttaacagcttaacagcgctctgtcccggcgcctctctcgaacggagatatggccggtttgaaaagtaaagtaaataacagacgagaggaaaataaatgacagaaaagatctatcagaaagacgcgtatctgcgggagtgggacgcagaattgatccggatagaggatggagcggcggttttcacctctacgatttttgctccggaagccggcgggcagccctgtgatctgggcacggcgggaggattcccaatagtgagcgtcgaggaaagaaagggtgaaatatttcataaattgaagatcccggagggtacggagtttccgcagcccgggcagaagatgaaaatgaaactggactgggatcgccggtttgatcacatgcagaatcatctgggagaacatatgctctccggtctgtttaaatcggaatacgacgcagacaacaaaggctttcatctgggtgaagagaccggttgtttcgacatcgatctgaaggaaatcacgccggaaatgctgagaaatatcgaacgaaaagccaatcgtgccgtctacgcagcgctgccggtgacggtcagtctggtggaaagcgcggaggacgccgccgactatcctctgagaaaacctctttcggtggacgaggacatcctcatcgtcaccataccggggctggactgctgtgcctgctgctgtccgcatccctccgacacgtctcaggtaggtctgatcaaactgctgcgtacagagaagtataagggtatgacccgcatctactataaatgcggtatgagagctcttctcgattacgagcagaaacacgatgtcgtatcggcgctcagcgaaaaatattccgcagatgaatttactctgctggaaaaggaaaaaatcgcggatagaaagcatgaagaactgcgccgggaactgaataatatgaaggacaagtttgccgggctgatggcggaggaaatcctgtcggaagcggaaaagacggtttctcacgaattcgaagcggagaccatcgacgatttgaaacgcatcgcgaagaaagtgacggcgaagacggatctgccggtgattctctcttcggcgaaacatctatgcgttttcatgacccatacgggcaagagcagactgcgctgcggcgcggtagtgaaggaatttgcggtgggtgccggaggaaaaggcggcggaagcgatactcaggctcaggtgattttcagcagtctggataccatgcgaaacttcattctcatcgctcaggcgagcgtatagaagagaccggcggaaaaatccgcggcggaggatgccgctgcggcagacggccggaaagaacgggagaggaggttttttcctgtgacgaaagacaaaatcaaaaaactggattttgatacggtggctctttctgatgacggaagagcgctggttatcatcgatcagacgcttctgccgggagagatgaagtttatcagactgtcggaacagcgggatatccgggaagcgatttaccggcttcaggtaaggggagcgccggcgatcggcgtggcggcggccatcggcatttatctggcggcgctggagatttcggaaaacgtttccgaagaggacacgttttttgaaaaactgtccgaggcgaaaatatatcttcaggaggcgagacctacggcggtcaatctgagatgggcactggaccggatgtacgatttcgctctgagcaaaaaagggctgggcccggaggtgatcgcagcgcagatgaaaggcgaagcgctggcgatccgtgatgaagatatcgaagtctgccgcaaaatcggagaacacggtctgcatctgctgaagagaggacaggggattctgacccactgcaatgcggggcatctggcctgtgttcgctatggaacggccaccgctcctatctatctcggctgcgagcggggctatgatttccgggtctttgcagacgagacgagacctctgctgcagggcgcgcggctcacttcttttgagcttgccagagcagggatcgacgtcactctgatctgcgacaatatggcgtcttcggtcatgaaaaagggctggatcgacgccgtcatcaccggctgcgaccgggtggcggccaacggagatgcagccaataaaatcggaacttccggagcggcgatcctggcgcaatattacgggattcctttctatatcgcagcgccgacatctacgatcgacttcggtaccgccacgggagcggacatcgtcatcgaggaacgttccggcgacgaaatcaaaaaaatgtggtacagtgaacctatggctgtcgacgaagtgaagactttcaatccttctttcgacgtcaccgaagcatctttgatcacggggattatcacggaatacggtgttctctatccgccgtacgatgtatctctcgcagaactgaaggaaaaaatcggcagaaaggagaaatgagatgagcggtaagattctgtttcccgatgataaagaggcgaaacgcctgatcatcgaagtgggaaagcgtatgtacgataaagattactgtgctgccaacgacggcaatatcagctgccgtacggaggatgacgcactctgggtgacgccttccggcgtttccaagggatttatgacggaagatattctcgtaaagacggatctgcagggcaatatcctggaaaatccggatgagcggcggatttcatccgaggtaaagctccatctgcgggtttaccacaacagagcggacgcaggcgcggtggttcacgcccatcctcctgcggcgaccgcttttgcctgtgcgaggaaggcgctgacgcgcccggtggtctctgaggcgattctgcatctgggagaagtaccctgcgcgcctttcgccgtaccgggaaccgacgcgctggcggagtctatcgtgccttatctgcacggacacgcggcggtgctgatggccaatcacggcgcagtgacctggggcagcggaatgatgcaggcttattatcgtctggaaactctggaatattacgctaatatgctgatccgtgtcggagaactccctcagcccgcagtggaactgacggaggaggagactgcggaaatcgcggcgttgcggcagaaattcggtatcgtattataatacagcgccggtaagatccgcgtctgcagacgcagatttcatctcccggttcctgcggaaatcacagtttcatgcacggccgggaggagcggatgctccccgcgctgtatcggaattatcggcgctctgaccggggaagtctgtcatagcccggttccggtttgataaaagaggtgaatttatggcactgaagccgattaccgtttcacaactgaatcgctatatcggaaagattctgtccaccgatcccattctcgggaatgtgtccgtgcggggagagatttccaatctgaaatatcacggatccgggcacgtctatttttccctgaaagatgcgggcagcaaaatcaactgttttcttccggcttcttccgccggaaatctccgttatcagctgaccgacggtatcgaagcggtggtttccggctatctttcggtctatgaagcgggaggatattattctctcaacgtccgcgatgtggagatctccggtgcgggaagcctggcggcggccttcagggcgctgtttgagaagctggagaaagaaggtctgtttgatccggaatataaaaaaccgataccggaatttccgcagaagatctgcgtgatcacctcggagacgggagccgccgtccgggatattctgaaaattatccgatcgagaaaccgattggtcagcgtattggtctatccgtgtctggtacagggaaaatcagcggcggcagatatcgccgatgcgattgtgaaggtcaatgaaaagttccccgacacggatgtgatcatcacgggccgcggcggaggatcggcagaggaactctgggctttcaacgaagaaatcgtagcgaggagtatttttgcctcgcggattcccgtgatttctgcagtgggtcatgaaacggatttttccatatcggattacgttgccgactgcagggcggaaacgccgacggccgcggcggtgttggcagtgccggatacggcggagatgatcggcagagcggaggagtggaaactgcagatgaacgcgcggatgcacaggattctggagctcggtgaaattaggctgcaggcctgccgtccggaagtttttcttcgtactctgaaagaacaggtgatgatcagagaaaacgacgccgcctggctcgaccgggagatttccgagggaataagggactttctgatcacgtatgagcatgaggcggaaaaagagaagctgcgcctcgaagcgggaagtcctcagcggattatctcccggggatatgcggcggtgcgcgactcagagacaggagagatgatttcggctgtccgcggagttttgcccggagatgaactgggaatcgtactgaaggacggagaattgatctgccgtgttcaggagaagcgggagaatacgtgaaagccgcggaaacagaagaaatcgaacagcggccgataaatgcccgcacagaatttgtcacttgaaagagaacggtccgcgtcatgattcgatcaggcggaccggccgagaaaggacaggacggcagatggaagagaagaaagaagatctgaaattcgaagaagcttttgaactgctccggcgcgaggcggagatcatcagctcggacagcgtctctctggaggaagccatggagagctataaaaaaggaaaagaatattttgaaatctgcagcagaaagctgcaggaagcaaaacagctgattcagatttacgataaagaaaacgatacgataaa

SEQ ID NO: 2535 - DNA, 6593 bp, Unknown
  16S sequences of unknown bacteria
tgacgtctccccacaccgtggggagcaaccccctctgtttgctgtcgcaaaagaatggagcctttggtctgtacaaaccgttgcttcctttacacagggggggagcgtttgtattaatcagccgtttccttcaagaactccgaaattctctcaagcgcttccttgatgtgctcggtcgaatagcagtaggaagcgcgcacaaagccctccccgctgtttccgaacgcagtacccggaatgactgccacacgctttgaataaagcagcctttcgcaaaattcctcgctgctcataccggtggctttgattgacgggaaagcatagaaagcccccctcggctcgcggcagataagccccagcttattaaagccggatactataagcctacggcgcatatcgtattccctaaccatgcgctcaacatcctcatcgcagcttttaagcgcctcaattgcagcgtattgcgaggtggtcggcgcgcacattatcgcaaactgatgtatttttgttatctgcttcattatttcggcaggcccgcaggcgtaccccaaacgccagccggtcattgaaaacgcctttgaaaatccgtttacggtgacggttctctcccacattccgtcgatcgacgcgggagaaacatgcttttcgccgccgaaggtaagctccgaatatatttcgtccgaaagcaccaaaatgtttgtacctttaagtatttcagcaattttttcaaggtcgcttttttccataatagctcccgtgggattgcagggatacggaagaataagcagctttgtgcgctcgcttattgcggcagcaagctcctcggaggtaaccttgaaatcgttctctgcctttgtttctattatcacaggcgttccgcccgcaagccgtgttatcggttcatagcaaacaaagctcggctgcggaattataacctcgtcccccggggctaccgccgcgcgtatacatgcgtcgattgcttcgctgccgccgacggttataagtatctcgctttccggcttgtatgtaagggaatatttacggctgacaaaatccgcaacggcgcttcgcagctgtgcgataccgcggtttgccgtatacttcgtatgccctttttcaagcgaatttatgcctgcctttcgtatctgccacggtgtttgaaaatcaggctcgcctacgccaagggatataacatcgtccattgtagaggcaatatcaaaaaatttccgtattcccgacggctttatttccgctaccgtggggttaataacgcgggagtaatcaatcatatccagagctgccccctgtcgtcttccctgtcatttacaagctcaacatccatttccttgtatctgcgcataacaaagtgggtcgaggtttgcgtcaccgaatcgatggttgcaagctcacgggcaacaaagcgcgctatatcctgcagcgttttgcccttgaccacaacattcaggtcatatccgcccgacataaggtatacagactccacttcatcatacttcataaccttttccgcaacctcttcaaagccgagtcccgccttgggaataacattcagctcaacaattgccgaaacaaaggcgctgtcaagccgctgccagtcgattatcgccttgtagcctttaataagtccgtccttttcaagctgctttatttcggaattaaccgttgcttcttcggttccgagcattacggctatttcctcggcggtatattttgcgttgcgcgccaataatttaagaatttcgtatttcattattttttcctccttaaaaattaaaaagtcccgggcgcaaaacaattgcgcccgggacgaataaacctttatccgtgttaccacccggcttcggagatgcttctccgcactctgcggtacttaaaaatacctttgccgataacggcggctgccgtctgccctttcgggcgccgctcaggggcagcttcgtcaaatgccgcaagcagggactttcagcaagcatcccctctcttatgaatgcggacaaagattacttatccccgtcgttgcgtttcagtaatattattttacgccaaagcgctctttttgtcaagcattaaatgctgaaaagcagctcgccgtagctcggatacggccaacaatcctttgaaactaccgcttctgcgctgtcggaatatttgcgtatatcgttcataaggcgaagcaccgtatcatgatacattcgtgagcgttcaagcatgttcggaattttttccgccgtcataaccgccattttaagctcggaggtcaacttgtaaatttcaccgtccgctgcggaaaggcgggcaattatttcggtatcggcatgctcatcgagctttatccccagcttgcgcttgttaataagcgcggtgcagaggcggtcggtatattcacttattgcgggaatgacctcgcggttcatcatttcaataagcgtaagcgcttcaatgtgcaggatttttgaataattttcaagcactatatcaacgcgcgactcaatctccgcacggcttaaaaccccatggcgctcaaacagcgcaatgttctcctccgttttaagcagcggcagcgcgtccggcgtgctttttaggttcagtaatccgcgctttgcagcctccctttgccattcatccgaatatccgtcgccgttgaagattatgcgtttatgcgcctttacggtttcctttattatatttttaacctcggcttctatgtcccccgccgtttcgagcctgtcggcaaagacggcaaaggtgtccgccaccatggtattgagcattacattcgtatcggatatagatgaggcggagccgagcattctgaactcgaatttatttcccgtaaacgcaaagggcgaggtgcggttgcggtcggtgttatccttccttataaagggaattatatccgcgcccacggtcatctttaccctttcggcgttatcatgatgctgaccgctcgctatcgaatcgagcagctcggtaagctcgtctcccaaaaacatggaaatgattgcgggcggcgcttcattcgctccgagtctgtgatcgttaccggcggtcgcaaccgaaatgcgaagcaaatcctggtgcatatcgactgcgcgtataaccgccgcaagagtaagcaggaaaagagtgttttcaccggggtttttgcccggatttaagaaattgatgccggtatcggttgaaagcgaccagttattgtgcttgccgctgccgttaactccgtcaaacggtttttcgtgcagcaaacacacgagaccgtgcttctgcgcagtctttttcatcatttccattgtaagctgattgtggtcggcggcaatatttgtggttgcgaatatcggcgctaattcgtgctgtgcgggagcgacctcattatgctcggtttttgcaagcacacccaatttccaaagctcattatcaagatcccgcataaaggcggcgaccctcggcttcaaaacgccgaaataatggtcgtccatctcctgacccttcggcggcattgcgcctataagcgtccttccgcaatagataaggtcagggcgcttatcatacatttttttatccaccaaaaaatattcctgctcggggcccactgtggtgttcacgcgcttcacacctttaagcccgaatatttttgcaatgcgcagcgcctgcttgtttatcgcgtccatactgcgaagcagcggtgtcttctgatcaagcgcttcgccgcaataggagcaaaacgccgtgggaatgcagagtgtattatcctttacaaaggcgaaggaactcggatcccatgccgtatagccccttgcttcaaaggtggcgcgaagcccgcccgacgggaaggacgatgcgtccggctcgccctttataagctctttgcccgaaaactccataataattccgccgtcttctgtgggcgatataaagctgtcatgcttttcggcggttatgccggtgagcggctgaaaccaatgagtatagtgcgtagcgcccttttcaatcgcccagtccttcatggcggaggctacggtatcggctatgctgctgtcgattcccttgccctctttgattgcgcttttaagcgccttatatgtatccttcggcagcctctcaagcattaccgaatcgttaaaaacattgcttgcaaaaatttcattaaccgttttcaaagctctacctccgagaaattgtaccttaatattatagccataataagcggcgttgtcaatcgcaagcatatattcgtctaattttaaaaggtaaaaagcggttttcagtttattattcttccgttttcgcaaagtcggcttatataatttcgccatgcgaagcaatcgggtacggtgagatccgtatccgatttatcaataatataattaaacgcttcatcctcaagaccgttttccgcaaccgacctcaggattgcgggaattattctgcgcagcagctgctcgctgtcggtgcttcggctcaacatatccgtcacctgaacacctgtgtatcttgtctgttctccgttttcctgcaatgttattccgcccgcataatctatcagtgccgccaaaaccggcagttctccccgaagctcaaaatctcccgaatatccatagtcagtcggatcaaagttctctgcctgcggaattatgacattcatacgctcattttcaaaatcaagataaacaaacgtcctgtttcccgctatatcaaaaagcacgcccttattgtcgggtaaagaaaaggtgtagggaatttcagaagcctgtccctccgcaggcttcaggctgcggtgaagataaaaataacctcccgcaaccaatgataagcagcataaaatacataccgccgttattttaatataaaaaacgccctgctttttcaaccgaatcacccataataatttaatataattattatcgcccgaaacgcccgatcatatacagtgagcgtatcgactttttcgccgtaaaaataaattttcaggtttatagacaaactgagtaatatttctttaatatagataacgcacgagtctccagcttatgcaccgcctgccggctgattgaaagaatgtcggcaatctcacggtcggagtagccgcagaagtatctgtagtctatcactgtacgctgacgctccgaaagcagcatgagcccctccttcaaaaaaaatttactatcgggttcttcggtgctgtcggcgcattcctcggttatttcattgctgattctcaataagcggcttttgcagcgcgaaagctctatgtaacgattgcgaattgataccgcaatgtatttgttaagctcttcactctcatcaggtctgaattttccgatattgagcgaatgcaaaagctctgtgaaaaacagaatcagctcctcactgccgtcctctccgatttttctgccgtagaaatttataagccgaaggaaagcctcatacagctcttcaaagcccgagtcgttaccctcccttatttcctttacatatttaataatttcccgatttttcacacctttttcctcctttttcttttaagaaaggaaaaaaacgcacgatttgtaaacatttcatccgattttttctttctgcgaaagaattgtacaaacaatcggaaaatcatcggatatttcgggagtaaaaggtaaaaaaatctgagtaaaacgctttttttatgcttaattgtaatatttttagaagtttattgacattttatagtaaacgcgttataatatttgttatcgaataatgtcgaaataaagaagcgaaaggacgaattacaatgcggatagcaatatgtgacaaggataaaggatgcgccgaaaagacaaagaaaatgatttacgattatgccaatgaacgccgtttggatctattggtggaaatttatgattcaagcgaagccttacttcgaagcgtaaatgattatctgcttataattctggactatcatataaacgggctcaacggacttgaaaccgcgaagcacctgcgagccaacaactgcagcagcacgattatttttttgagctcatataccgattttgttttcgaatcatttatggtaatgccttacagatttctcctgaagccgcttgattacggcgtttttttcgcggttcttgacgatttttttcttaaaaatattggccgcaggccgttatgggtaaagaacggtgacgatattttctgcataagagcaaacgatattttttatttggaggcagacaataaaaactgccttataggtcttgaaaacgaaagcctccgctgcaaaaaaacaatggcgcgggtctacggcactctgccgaaaaatcagttttgcaaaatcaacagagcgtatgtagtaaatttcaattacatttccgcttacaacagtgacataataagacttgcaaacggcaaggatctgcatgttagcagaaattattacaaaagctttaaaaaagaatacaaattctttgcaaatccgcaggttatttaactgttgatttttttgtaaaaaaaatgtattatatatattagacgattaaattaatgtctactgaataattgcattagcaaatgcaattatataaaatcgagttaaa

SEQ ID NO: 2536 - DNA, 32759 bp, Unknown
  16S sequences of unknown bacteria
ccttgaccgggtccggattaggataataaatcaaatcattttcaaaatccttcatatctcttttctcctcgctccatcataaatacttatgattcatactgcctataatcaattaccagagctattatttaattcttcgttaatctctttgagaatctgatcaccaccctgattcttccagttttcaacaaaagtatcaaattcgctgatatctgcttttcccataataatctttgcaaatgtttcttcttccattttttcaggttagcccattttgcctgcatggtttctgtctgaccgctatatgcattataaaccggtatataggtagtgtcaagagttatacgcaaaattgattacagctctggtagaaatctattacagtgggcggcttaaccgccccttgattacttttcagcaggcagagcgcaaatggtcaagggcggcggtgctggtcacggcgctgggcgcttcgctctaccagaccgccgacctcggcatcgcgccctacgattacctttccctcggtctgcgggactacacaccctgcccgtacttcgggtgccgcatcttcaccgatgcgctcagcgctctataattttatggtcgttaattccgaattcctgcatcgttgcatggatactcagatgttcttttttcatggtttctacaaccattctcttgaactccggcgtatatcgtttgtttggtactccttttggcatagcaaaacaccccacttgttagatagtatatcatactgtctaacaaatggggtgctgttcattatatccagttctatacttactgttcaaaaggagtataggaaatccactgatactctgctgtaataggaagcttgctgtcatcaaaagccttaagccattgatctacgccagtaccgcaccatgcattcatcataatcttacttcttgtaactggaatattaactgtggcagtatgcactttctcaccatctacataccagtcaatactgtcttctctccactcaaatgcatatgtatggaaatcttctgatgcatcaaatccaagatccaccattttctcatgatttccctttccatctgtaaaataattgaactgaacctgtgtggtatccttgccaagaatctctacatcaatttcatcccatgggttattatcactaggacctgtataagtgaagaatgacgatacaacaccatcattcttaatggctttcatagatacttcatatcttccatatccgtaaaaatctttagaacgaagctcagctcctgaatatgggatgctatcacctttaggatctttatctatagtaagctgaagtttgccatcttcataagtacaactggttcttctccatgttacattaaacattgatccattggaccagtcacctgatggctcaaatgaatcaggacagccctttgcaaaatcagcatacatttttttctcagtaattgtcattgaagcctctgtagtatctgttgtgtctgtggcagtagcactgtttgtgtttttacttccacatcctgcgagcattgatgctgtaacaattgtaactaatcctaatataaataatctctttctcatattttttatcctttcaaattaaaacttcacggaaaaccaccgttttcctttacaccactgttgaacgatgcaccatttttggcgggtcattcaagtgttacatcttatatttcccatagccaatcatactatatatagatttcaataatacaattttggggttacaaaatctattatatcattatatggcagtttacactaactgttttttcttgataatcaggttctccggcgacaatataaatattattatattgcttctcggtaagccttaataatcttacaacacctgttttaggtttggcttcatcaattcttcggtaatgcttctctgaagcctttctattctgtactacacgcataaatacctctggaccaattcttatataaccatcttttaaaaggaattttctaagcctcgaatattcagtttttgtcccccacttatctgtaggacttagtgttgctattaacctcattctgtaataccctccatgccgctcagcacactgagtgcatcgtaagtataccgcaaaatcacaccgtccgagcgtttttcgcccaacagctgcccgttcacatactgatactgcgttgtcacgccgcccgccgttttttcaaggcgcagatcgtccgcatcgtatctataagacgctgttttcccgttctgcgtcagacttgtcagctgccgccccgtccacgtcatcgtcatgccgtcgcgataggtcagcggattgccgatctcatcatacgtgatgctctgcccgttgtaggacgtcatcaggtctttccaacaacccaaaaatgctcgctttaatatcctttatccacgtacacatctatcttactcgtatgcacccttattttgtctatcagggactcaggtatgatcaatttgcatttctcgttatagatccattcattgagcatgacttgatcacatacaaagctataaacaaattgatttacctcaaatgtacactctattgatgtattcgtgtatgctttggcgtgatttcggtgcaagcattgcaatgccgtttcagcggaaacatgttgcaaaatcgaaactgcatatctcccccgtaaccaatatgactggtttccaaagcagatattttttatagaagaagcgcaaatatctgcccgtgagaaaaccaaaatcgggctactcggtatctcaagcttttccgttttcttacctttaaatgatgttattattcgatttgaaacagaaaaacactctctgttgggttcaaacaccgaccataacatcatcaatgttcccaaaaatggaataactaaccaataaaatgcggtatccgttagcaatccgacaattatacttaccaataagaacgcaattactaaccatgcacttatatagtctcgggctcggaatttaccgtatcttcgatacttcattgattctcactcccaaagaaacttaaaaaataattttgctcattctcttttccgctatctcttgccatttgatagtaattgatagcaacagggagtatgcttttccagtgttttggcataaagttgtatgcttggctgctaatctcaaaaacaaaccccaattcgtgtaactcttttgcatacttcggaataagtgaatctggatatttttgataatactctgtttcctgcttttttaccttaattaccaaatcttctgagatactttgattgttgttaattaaactcttactcatattttcattcatttaatgggaacaattctattatcccactatctactaatttttgcaacggaccagaagcagggcttttcttcctttgagagcgctaataacctgatctccatgtttgtgttcttctttaactttgttcgtcctcattccgctttgaacgggcttacacccgcgtaagtcgccggtctcagtttacccacccgcaaaaaacgagattttcctctcgtcgcttgacattttcctgtgttttgtccctcgctctttcattttttactttacggtgccatattaatttacagaacaaataaatatgttaatctatttgttcagcatttcaattaattcatatttcagacttcggttcaccaaaatcacggataatcccgtcgtcagcaaaatcatcgccgcaggaatgacgagctccaaaacgcctgtgttctctgcgtcttctgtctccaccacattttcgtcgcgcgcccaaaggctgtattccgtgctgaatgtgtgctcgctctgcccggttaaatcgagcgtctgcactttgtcaaacagcactgaactgcaaactgtgcccaaaatcaccgccacagcgctcaagaccactacgcccgaaacaagcgacacgcggcactgatttttgctcatgcctaaactccgctcaattgccgtgcgcttcttctgctttacgatgaagaaatagagcagcaacaccaaaatcgccagtgccgaaagcagtcccgccgcgaacaagatgatcgccgcagtgcgcagattttccagcccgccgacgacttcgctgtacccgttgtcgtcaaaggtcagctgcaaatgcgtgcgcacgctttccggcacattttgctcatacgctgtcctatattcgtcgatcgtgccgttcgggatttgaaacgaagtggtataccggttcattgcaccgaacgcgcctatattctccgcatcggacgctgtcaccgaggccgtcggcacaataaacatgttccgcgcgatctcccccgtgccgtttttgctacccgcaaggcgaaacgtatcatatagcccgacgatctcatactcctgctcgaagaagaccgaatacggctcgcccgccgcgtttaacaacccggggcttcggccgccgcgccactgcacctgaaaaccgaattcccactgcgggctctctgccttgttcgcaaggtacagcgagagcggcacgcggtcgccgaccgcaagccctgcgtttcgcgcaaactccgcgctgaccatgcacacagccgcgccgtctgcgaactccgcgtctgtaatctctcgccctgccgataaaaacaccgtgttttcgtgaaacgacggcagcagatcgaggctttccgctgcgagcacggggtagctttgccaccgcgtgtacagcgcctgcgcccagtttcggacgatctcccacgtctcggaatcataaaactccggcgtgacctccataatcgtcggcagcgttacgccgtcgttcagccggttcccctcggcatccacctgcggcgtaccggtgatgctctgcggcacgaaaaacatgtcgcccgcgcgaaacgattgcaagctttccgcacttaacgtgacatacgcgagataacgttttcccacttccaaattcactgtgttttcggaaagcatgtcgcaaagcttcatctcgtcgccgctgtatgtgccgtacagcacgcggttcacctgcacggtttggcggcgatcggccctcccgctttcaagcggtgtgaactcgatgacgcacctgctgccgttaaacggcggtgtgtcctgccgctccggcgcggtgtattcttccggcagaagcgccgcgtaatacgtgcgcttttcgggcccgtgcacgtatgcggcgcccggaaaatcgagcacgctttcatcatacactgtgccgtataccgactctgtttcctccgcgccaagccacaggctgtctaacgttttggttttcaccggcgcttcatagtccggcagctgctccaccgtgccgagcgtcacgaacagcccctccgccgcgtcgatcttcgcttgtgtctgtacccacaaatttgcccccagcaccaaaagcgccgtggcggcggccatcaaaaggaagaacaacgcggtcttcatcggcgtgcgaaggagttgttttaagctgtttttcatgttattccacccgtgcgctcaaaagctctatcggctcctgctttaggtttcggttcaccaaaatcacggataatcccgtcgtcagcaaaatcatcgctgcaggaatgacgacttccaaaacgcccgtgtccgctgcgtcctccgtctccaccgcattttcgtcgcgcgcccaaaggctgtattccgtgctgaatgtgtgctcgctctgcccggttaaatcgagcgtctgcactttgtcaaacagcactgaactgcaaactgtgcccaaaatcaccgccacagcgctcaagaccactacgcccgaaacaagcgacacgcggcactgatttttgctcatgcctaaactccgctcaattgccgtgcgcttcttctgctttacgatgaagaaatagagcagcaacaccaaaatcgccagtgccgaaagcaatcctgccgcgaacagaatgatcgccacgtaccgcatattgagtaaaccgccgatgatctggctgtacccattgtcgtcaaacgtgatctccaaattttcccgaacctccgccggaacatttcggttatacgccgccatgtagtcgtcgattgtgccgtttgggatttggaaggaggtcgtcgcgcgctgcatcggtccgctgtctacgatattgccggcaaaatctgccttgaccgaatttgcgggaatgaggaacaaattcagcgccatttcgatggagcccgccggttttccgtatgtgcccacactgtaatacgtgccgatgatctcatactttgccgtccaaaacggcgtgtatgtccggttctgtgcgtttaaaagcgaaaacgtgcgcaggccgctaccgtcgccgaacgtcctatgcggcgagtctttttcgttcacgccgtaaagcggcagctccactttatcgccgatggaaagcccgtttttccgcgcgaattcttcggaaacaagacataccgccgcaccgttttcgaggtcttccgcggaaaacgtccgcccctcccgcacatacaccgtgcggtcgtgaaaactcggcagcagcgccgtatctgtaaccggcaaaacgggcgcggtcgtgtcccacatggaaagcgcctttgaaagctccagccaatattgcccgcgctcggtctcgtaaaagcctgccgtcacttcgtcaaatgtccgtgtctgcctatcgctttcaagcaaatttccgcctgcgtcgcactgtgtggagcgctccgccgcgatcagtgcgtattcaatggagcttttcgcgttttcgtggtgattgacgatcacatttgtatacgccacatatgttttccctgcctccagtggcgcgggattttccgtccagtggtcgcaaacgtaaatttcgtattcgttgttctgattttccgcttccgggtacaaaaatcgctgcacatacacttttatggggtgatccggcaccgccgtttcggcaggcgtgaattcgaccaccgggtaaaacagcgccgtgccgccgtcgcgcaccgcaagtccctgcaaatccgcaaggtaatacgggcgtttttcaggcgctttcaaataattcgcgccgtcaaaatccagaacatcggcagagatcaccgaatcatacacgggttcggcttcgctataatacgccccatcggcggcatcccaccccgtgcgcatctgcgtgcggttcggcttttgctctaccgtgccgagcgttgtgaattgcttttccacagcatccatttgcgcttgcgtctgtgcccacaaattcgcccccagcaccaaaagcgccgtggcggcggtcatcaggaggaagaatagcacagcttttaccggcgtgcgaaggagttgtttgaggctctttaacattctactgccagccttccgtcctgcattttgtagacgacgtccgcttgcgccgcgatgcccgggtcgtgcgtgacgacgatcacgcagtaattttcgtctttcacgagctttttcagcagatcaatgacgatcttgccgttctccgtatcgaggttgcccgtcggttcgtccgcgaggatgacttttgcgtcggacgccaacgcccgcgcgatggcgacgcgctgctgctgaccgccggagagcatcgccggcagctttcttgggtcaacgtcaccgagaccgaccgaacttaggagttcctttgcccgtactttcgcctctttcgtcggtttcttcataatctgcatcgggtacatcacattttcgagtatgttcaaagtgggaaataggttgaaagattggtagatcaccgtcacattttcgcgccggtgccgttcgcttccgatttctttcagcgtttttccgttcgcgataatctcgccctcgctcggcgtgccgaggcccgcgagcatggaaagcagcgtcgttttgccactgccggactgcccgatgatcgcgtagaattttcccgcatcaaacgtgcaggagacatttttcaacgcctgcaccttctggtatttgctctggtaggtatagctcacattttccgccgctaaaacagccatattcacgccgcctttcgttaatcgattttcgtcaggagctccagcgcgtcaaaacgcaggagcaaaatgagcgccaacaaaacgcccacgcacgaggacgcaaggtacagcccgcagatcgtcagaatctgcccgggcgcaagccccgccgtgcaaagcaatatgggcaccgccaccgcgcagccgcacacatttgcgatgagcataccgaaaaagcacgcgcacccgcttaaaatcttcggccgcccaagcgaaagcgagatcgccatgtcccgccgcgtgctgcgcagcaaaagaaacgtcaccagcgtgacaagcacaatgacgagcgcgaaaaacggcgctaaaaaccaccgcagcaccttcaaattctgctccaacttctctgccgtctcaatgaaaagctggtcgtccaccacaagcgtgtcgccgtggcgctcatcaagcgcgttcgggtcgggctttgcaaagcctgcgccgcgcatggcatctttaaaatcgttcagtttcatcgggtcgcgcagcgcacagcggaacgagctgtaataaaaccgcaggttattatccttaacgaccgtttgcagccacggcacagagacgatcatgctgcacggcaccgcgctgcccgaggcgctgtccgcgtacacgccgatgatcttcatgccctgcatgccgaggtgctcgtaccgcagcgaaaagccgtcgtcgttgtagcgcgtcacgtaaaacggcatcgagagcgtgtcgcccgaattcaacccgtactgcgccgcgtagctttggctcaccacgcacagcggctccgcgcgctccaaaaacgagaggtcatacccgttttcaaacgcgatgctctcctccgtcacgccgacgagcgccgaaagcccgctcaccgccgtcacggacgtgtccgcgccctgcacgtcctccgcgcggtactgctcctgaaagttcgcgcacgccgaggccgtgtacaccgcgtctttgatgtccgccttcatgaggttcgcaaagtgattttcgtcgatctcgaaccccacggtgcgcgcgccgctgcggctgaccacctgcgccgtcaccgggatgacctgcgccagattttcctccgcgctctccgccgtctggatgctgccgaggtaaaacgacatgcagcacaccagcagcgccgcaatacaaacagaaagcgccgtccgcccgcggttacgcaaaacaatgtagttcatttctttcaaaatcaccatatatatttctccatatcataaactaaaggaaaagttgaaaaccattccgaatttttctgatatcgtaattccatcacaaaccgcgttacctttaaagtcaaatgacactctggccaaaccttaaatttcaaaatttttcatatggttaacttgctgttaaaatatcatattaacggaaacaagtcaatatatttatcccaaaatgacaaaaaagcgcttatttgggttgatttattggcaaatttgatttttaggtttggataaataccgataaacatggaaatccattgcttcatcgagataatcggggaatgaagtgataataatgatcttaacatacacgtttttttgcatcaattccgcaccgacgtgaatcccacttcgccccggcatttcgacatccaaaaaagcaatatcaggcgtgatccccgaatagatcagctccttaaaaactaatgataatatagttattgtttctctttcttaaccgatttatttcttaccaatctttctatcaaaataaatataacacctaaaaatataccgaacccaacaattacaagagtcatcgcttgcatttttcccgcatattgaagtagctctgttgattccctgctcgattttgccagtatgttcaatgcggaaaaaatctctccaaactcccgcatataataggcggcgtccgtaatgcggtattgcggcaagagagaggacggcagggcgatgtgcagcaggataagcggcacggcgagtagggcgagaacacccaaaacgccgtggaaaatgagctttgcacggttctctttcgctctgcgcgagaggataaaggagtagatccacaaaatcagcacgaaaagcgagagcgaaagcaatgcggccaaaagcggcagctgcgaaagaaagcttttaacgtctgaaaggctgtaaaagctgccggcgttttcatttgcaagctccgtcacgggtaaaattgtgcttttcgcgcggtctgccataaacggctgcggggtgtccgtcacgttaaacagcaatgcgttttcggcttctgcggtcggtgtgagggcgcctgaaagctgcgggacgccctccgggaatatggcaagccatgtgtcatcccggttctccaaatcggacttaatagagatctcgtcgccactgcgcaggggttttgaagcgtaacggacatagctgccgaaaaacttcaaatcaagctgattttcgcccacggaataattattgatttcttcttcataaatgcgcgtgccggtctcccagccggtgccttctctcgggcggtagaggtgcatgcccgtatcgtcgaagaaaagggagtcgagcgcgatgtgtggggagggttcgctttcgtccgcttgcgtgagcaccacttccgggatcatgagctgctcaatgcgcacggaaagcatcgtgcagaaaatgaggccccataagatcaaaacaaaaatgcagagaacgcggcgtttcatatcacttcacctccgctaaaacgatgccttccacaagctcgcggttgaagaaggtgaagaggaacagcgcgggcagcacgaccagaatgcagcagacgagctgcacggatgtctcgctcggcggtgtataggcgagcgccaccgagatggggtactgctcggcttctttcaaaaacgcgatgggctgctccaccatgttccatgcgtcgaggaaggagagcagcaaaacgcacacaaggccgcttttgttcatcggcgagacgacgtaaaacaacatgcgcagcacgccgcagccgtccagcatggcggcatccagaacggtgtccggcaccgatttaaagctttgcgttaaaataaacgtgccgagcggcacgataatagacggtaagatcagcgctgcgtaggtattcagcaggttcatgtagcccagcatgatgaaatcgggcacgagcgtgacctgcacaggcagcgtcatgaggatcattaagaggaagaaaaggaagttgcggcccgggaacttatactttgcaaacccaaacccggcaaaaacggagatcaaaagctgccccgcggcgatgcacacggccatgccgatgcttttccaaaagcggaaaagatattttggggaagccagaaaaacgtcataataatactggaacgtaacgccgccaggcgacagaaaactgcgcacgaacacgtacaaaaacggcgcagcggataacaccacgaccaaagcggcaaacagcccggaaaaaaaccgtttcactcgcggaacgcctcctttcggctgacaaacgcatagaataagccaaagaatacgataatgacgatcaacaataagaccgaagccacggagagcttctggtaattgaggttgctgaagcagttgttgatgaaatgctggagcatgtagagctcatccacggggtgctcgccgccgataagaaagatctcgcggaagcacttaaatgcgttgatgacggagaaaatcagggcgaaaaacacggaataccacatttgcggcgtggtgatgtagcggaacttctgaaacgccgaagcgccgtcgagatcggcggattcgtactgctccgcggggacggtgacgagccctgcgagcagcagaataacgctgtaccccgtgtttttccagaggtacatgaggatcatgacccagaacgcgtatttgccgtccagccactcgacgatgggcaggtctaacgcggcaaacaagccgtttacggcgcccttttcgccaaaaagcagatcgatgagcaagactgtaccggcgacgggcatgatatacggaaacaaaaagacagattttaatagcttatgcttgcccgcctgcttgtgcatgaggagcgccaaaaggtaggaaagcagcatgatgagcggcagcccgacggctaaaaacttcatcgtgttgaaaaacgccagacggaaaaggtcgttttggaacatcttcgtataatgctccataccaacgaacatgccggcggcgccgtatccctgcgtaaacgaatagcgcagcacaatgccgaacgggatgagcgtgaacacaaggcagccgatcatcaccggggcgatcaggatatatccgtgaaaagcttttctcataaggcaccgccttttattttattcctgcacccactgctccatggtcttgtaccattcgccaatgatgggcgcgaggtcggcattggggtcttggtagcgggcatcgctgcacgcatagtagcaatttacaagcgcttcctccaaaccgccctgaaagcgaacgcgggtgatctggctgcgcgcggcgctgaagttttcgtagttttcggcactcatgtgccaatcggtcatgccgtgccacgttacggggctggtatcctgcatggcatcggcataaacggggatgcctacggaatcattgtatacgagccactcggaatagagcgcggaggacagctgggtctctttgcgcagcaaaaggtcggcgaggaagaacgcttcgtccgcgtgctttgtgctgcggttgatagcgacatacgacgtgaccgctgcggtcataccgccgtcgtccgaatagagcggcaccatggtgatggggccttggtcgcgcaccttgacatgcggatcggcaaagtcgctgcccgtaaggccgccgcatgcaaaccagtggtaataaggcgggacattttcaaattcgtcgttcttattgcgcacatccaactctataacgtcggtgatgcgctgcaaaagctcgtcttccgtaaagagcagcttttcactgctgtaatcggcaaggtcgcccagtatgtaggggagcagcgggccgccgcactggttttcaaaattttcctgctcttccatcgtgggtatccaattcgcggcagcagtgagcacgttcgttttgtcgttcagcatgtcctgccatgtggtttccgctgtggtggtgagcgttacgtccgattcgcggaacatggtcagcgggaaggtgtaggtcatcggcagcagcatttgaccctgttcggtgcggccggctgccatgacggtctcgtttagcttattccactccatgaactgcgcgttttggatgtagtcatcgagcggcagaaaaagctcggcttccatcgctttttcgggcacacggaacagcgcttcgacatctactgccatgtaatcgatgccgccgttgcaggcgatgatgaacatatccgggccgacgccggacatgatctcggtgcggacgcggttgagcgccgtttcgcgctctgtgccctcgcgggggaggtactcaaacgatacgttttccggcccgccgaggctttttacggtgttcatcaggttataaaacgcattttccggggtcttgccctccgtgtagccggcgcggtactctaagtccacgcagacgcgcagggcgtctttatccaccgtgccggacgaagacgagccggaggttttgccgcccgaatcatcactttccgtaatgccggcaggcgggggcggcgcaccgcaggatgcgagggatagcgtgcagagcaacgctgccaaaagtacagatagcttacgtttcatatcagacacctctttctggaagctcttatatatatggcaagcagaacctgaccgaaatcaggttctgcttgctgcatgatcagtcaggattattatgcgtaagggcacttgttgtaaatgtaatagggagttcctttaaatgtttttccacaagatctgcactggaagttcgtggtcgtatacttaacttggtgtatatgacttgacccataattagggcaacccgcatacgtcttgtttccaataaacgtatccgtcgttgtggtaactgtattaccgctagtgcagtatgggcaagacgctgcatatgttgcgattgatgcaaatgcaacaactaacgctacaaccatcacaatagctatcatttgtcttgatcgttttttcattattttacttcctttctttgctacatttgtatatgaactcacctttcagctacaaaggcaaattcatagagggttatacagcgatcactgtcttttgccaaacatgatttctaaacgtttgtcacgtcttatcgtagcttcatattatcatttgcaaggcaaaaggtcaagcagctttatatttcaaattctgaatttccaccccataagcgtgtcaaacgtaaacaatctgtaaacaaattcctttaccccgtttataaatcgccgaaaaatgtcgtgtatagtgaagggaactttttcggcagtacggcagcgccgattatcctgatcgcggtcccgcaaaaaactgccatgccgttttccctttctgaaccttgaaaactgaatattaacttgccaaatacgttctctttgcggcgagcgtgcagagcggtacgccatgacctgtttttcagcgagcgaaattcaccgacttagaataccgggcagctcccggttccgctgtgacccgcaaagagcataatgatactcccgtccagtcacagttcgagcgtgataaaaccgtcgcaaacgatgagggcggctctgacagaccgtcagttggggtgaaactcccgtggtgtcggctcgctcccgaccgtttggcaagctacatatcgaaattacccctattacagcgcaaaatcaggaggaaacgcaattatggaacgaactatccgacgcggcgacatttttatggctgatctaaatcccatcatcggctccgagcagggcggtatccgtcctgtgctcattctttccaataacctcggcaacacgcacggccccaccgtcatcgcggcgccgattacaagccgaagacataaaaaggcgggacttcctacacatgcacaaattcccatgctcggcgatctcaccacggattccgtcgttctgcttgagcaaatacgtgttttggataagcagcgtctgcaagcccgattaggcagactgccgtattcctatattcagaaaatcgataaagccctcgtcgtcagtatcgggttatgggataaatgctgaaaacataaagactttgtttttatttgttatccggtacaagtaagctcccatatacttgcaccacgaggtggtaatttggcgcacagagaatttatctatatcggtgaaccgcttccaaaattggatgaaaaggagcatgcagctttctttctgaacttgcagaaaggcatcctccgctccctaaagcagcgaaatctgctgacacccgctcaatatcaagaatgtttagccgaactgggaaaaagagaaagcaaaaatcaaatccgtaataccataaaacagaaacattcactgtaaaaggaggatttatatgaaccgatatgaacgcatgaatcaagagcgaaaaatagtcgatatgcgaaagcgtgtggctgcctattgccgcgtttccaccgaccacgaagatcaggcaaattcctttgagagccagcagcggtatttcagacagtatattgagcgcaaccccgattgggagctttacgagatttttgccgacgaaggcatctccggcaccaacaccaaaaagcgcagcgaattcaagcgcatgatcgcctgcgccaaagagggcgatttcgatttgatcatcacgaaagagatttcccgtttcgcacgaaatacgctcgacagcatctattacacgcgtgacctcaaaaaacacggcgttggtgtgatttttatgaacgacaacatcaacaccttagacggcgatgcagagcttcgcttggcgatcatgtcttccattgcgcaggaagaaagccgtaagacgtccgaacgtgtgaaatgggggcaaaaacgccagatggaacaaggcgttgtattcggcagaagcatgttgggctacgatgttaaagacggcaaaatgaccatcaacgaggaaggcgccaaaatcgtgcggcttatcttccataagtttgcaaacgaaaacaaaggcacacacgttatcgcacgcgagcttcgtgaagcaggcatcacgcctatgcgcgtcaaagagtggagcaacaccgtcattttgcgcgtgatccgcaacgaaaagtattgcggcgacctcgtgcaaaagaaaactttcacgccggattttctctctcacgaaaagaaatataaccgcggcgaagaagaatttgtcatcatcaaagaccaccacgaacccatcgtttcccgagagctttttgagaaagccaaccgtattttagatgaaaaatctctaacgcagaaaggcaaagccaagcactctaaccgctatccgttctccggcaaaatcaagtgcggctgctgcggctccagctatgtggcaagatacaaaaaccgaaataacggaacccgctacaaagcatggcgatgctacaagtccgctacacaaggcagcccgcacaccgataaagccggaaatccgcttggctgctcaaatccaagcatccgcaatgaagatgccgttcatatcatgtacctcgtgacccgcagcctgcaattagaggaaaagaaaatcaccgctaatttgctttcggtcattcaatccgtgctttccgtaaacaccgactattcgcatattgaaaaactcaaagaacaaattcaatccgtcgaagataagcgcacgcagctgattgacctgtgcatatccggcgcgatcaccaagcaggaattcatcacgaaacgcgaagcctgcgataaggagatttccgaactgcaagatacgatcagcggcatagaccagcagcacctcctcgccgatcagcaggaaagcgtaatgaaagaaatcaccgctgccattcatgaaatcgtcagcggtgtggaatatgaagatgcgttttattcacagattttagacaaaatggtcgtccaaagtaaggataccgtcgatgtttacctgaatttgttcccgattaagtggagttacgccgtcgcaaaggcctcaaaaggcgttttagaccccaaaagtggcatttctaaaacagagataccgatatccgtcaatatcgcccgaagctctgggtagggcatggagtagcgctggctgaggtagcgcagggaagcgcctaattctccgtgagggccgccgtattggcttatgatgagctttgcgagcgcggggttcgggtttttgatgcgtacggggtactgcagcttcttctcataaatccacattactcgttcgcctccgtttcccacggccacgggtcgctgatccacgcccagcggctcgttgagcgcgaagtctcgtttaaggggccgtacgctttttcgtactcgaccgtaagcttatcgtattcctcgcggtaagcagcaagctttttcgccgcttctttgcaatacggatgcgaatccagatacaaatgcagctcccacatcgcgaactgcacggcggaaatgtgccgccttaaacgctgctgttcgttcaccgcggctcaccccgccttccgtaaaacggtttattcaaaaccgggaacagtgtgccgtcatcgagtgcgcgcgccggctcataggtttcgctccactgctgaaacggcacgtaggctatgccgggcacagggtcctcgggcaacggcgtacaggtggtgcggcagccgcgcagcatggtgttttcatctgccatgtgctgtgtctcctttcaaactatacttgcaagacaagctcgcagttcatagtatgaaaacggagcgcagcgtgtgcatcatgcgccgtggcgcggaccggacttttcccccttcttttcggaaacacgctgccacaaaacggcgagcataaagccaaacgccaccgcaagcagcacgatggcggccgtaacaagacggtctatctgtgccgcacgggcgtttttctccgcttccgtctgggtcagatccgcgtcgcgcgcttctcctgtcacaacggttgtttcggccggtgcttcttctacattggcttcggcggcttcactttccgcaagcttttcactgcttgccgcgtcttttccctttgcggcggacgacgcgcccgtctttcctgtcaccgccgtcacgggttttgtctcacgcgtgacggccacggtgtacactgccgtttcgccactttcggatgtcacggtgaattcaaaatcgactgtgctgccgcccgcgccgagatttttgcggttcacgcgcacagcgcagtcctctgccggctgggcgtcgaaaacgagtgacgtgacggaaaacggcaccgagagcgagtattggaacctctccgggtcaaagctcggggaaagcgtgcccgtcggtgggatgagcgaaagcagtgccgcgccgatctccggctctttcacgtaagtgaacgtcttttccgtcgtctgcaccgtatcgattagttcttgccccacagcgttcgccgcatcggtcacggaaaagctgaccgtcaccgcatcaaactccgcgccgcgctccgtgcggaacaccagcgtgaacggctccgtgagtacgccgccgtccttcgccgtgtaaacgagcgcaaaacgtccgtcctgctgcgaggtatacacgtggcgcgatttcacgctttccggcaactcggccttcgcattggatatgacttccgcgtcaaaatccgcaaacagcacgaacgcgccgatgtccccgcgcgccggcgtgcaggtcacggcgaacgatccgccgggacgcacctcttctgcctgtgctgcgaatgcgaacagcggctccgtctcttctgccatggccgaaacacccggtgtaaaaagaaacaggagtccacacagaagaaaccacgcgccaaagtcgtgcttcttcatagtgcacctcctgcaaatcatttttatattgctttcagtatagaaaccaccgagcacactgtcaataagttgtgaactttaatcactttttctgttcaaaagctctatcgagccctgtttgaggttatctatttcccgacaacccctttttccaccaaatagtaaaaatcactttaaaattttgcattatccggatccgatcccgtacggcccacacaggccagaccatcaatcaaatcggagtcttcctttgatatctgaaaatcaaacagacgcagattttcttcgatgcgggaaggtgttgtcgattttggaagtggcaatttccctttctgaagacaccagcgcagacagatctgtgcagttgaccggttatacttttcggcaagagccacaagagccggatcagacagcagttttccagagcccaaaggactccaggcctccactaaaatcccatgttcttcacaaaatgatactgtctcaggctgcatccagccaggatgaaattcaatctgatcgatcatcggaacgacctctgcgctctttaacaatgcttttaaatgtttcggaaggaaattgctgacaccgattgcccgcacatatccttcgtttaacagatgctcaaaggctctccatgtctccctgtttacctcctcataattgtcccgaaaagcaatgggacgaggccaatgaatcaggaacagatccagataatccatattcagcctttttaaagagtttccaaattccttcaaagtctcatcatatccccggacatcattccagagcttgcttgtaacaaacagcttttcacgcgctgcccccgacatccggattcctgcaccgactccgatttcattgtgatatactacagctgtatcaatatgggtatagcctgcctcaatggcatgcatcacagcattagccgccgtctctccatccggtacctgccaggtgccaaagcctacacaggggatctccacctgattatgcagtgtatacgtattttctgagattttttcattcatcacactctctccttttctgagtttaaaccaaaccatgctctacccgttttaaatgtaccttctgtgattctttatagtgcacctcccgcaaatcatttttatattgctttcagtatagaaaccgccgagcatactgtcaataagttgtgaactttaatcactttttctgttcaaaagttctatcaactcccgttccctttctgcggggctgcacccgtttttttcagtatagcacagcgttatttcccgtgcaatattttttcaaaagaaaaaagtgcaggtttaacaatttcgtaaaaaacgcataacacaaaaagcgaaaagtaccactatactgataatcgaaaagaaaagatgaatacaaagaggtggttcccttggaacataaagtgaacacgataaacgcgaaaacatgcagcttttaagacgaaaacatcacaacaaagaggagaatgacttatgtttgacatgagaccgtatcgtaacaataatgatagaagaaacaacctgagtgcttacaacccgttccgtgaaatggacgcgtttgagcgtaatttctttaacgatccgttcggcagctggttcgaccacagcgcgctcgcatcgttcaagaccgacatcaaggataacggcgacagctacacgctggaggccgacctgccgggctttgacaagaaggacatccatctcgatgtcaacggtgacacgctgaccattcacgccgagcgcaaggcagagcaggaagaaaaggacgacaagaacaactacgtccgctgcgagcgctcctttggctcgtacagccgtcagtttgacctgagcagcgtagacgccgaccacatgaaggcgacctacgacaacggcgttttgaaacttgaaatgccgaagaaggccctgccggacagcgcgcgccacattgaaatcgaataagcctaccgtcctttgacgcagaataatatagaatgaaaacggggagccgtgcgtgtaccttgcgcggctccccgtttctgttttatttcagcgtttccactgcggatttctccaccggcagtgttgccttatagcgctccaggaacttctcaaagccctgcatgtcggtttcatcgggctctgcggtctcgctctttgcctcggcgaaaatgttcttatcgaggtaatcctccagcgtttcgccgtcctctgcgttcacaaggtaagaagccagcagcgccatgccccacgggccgccctcgcccgccgtttccatcacggagaccggcgtatgcagcgcacctgccatcagcttttgacccacgcccttcgccttgaagaacccgccgtggccaagcagcgaatcaacctccgcgtgctccttttcgatcagaatatccatgccgattttcaatgtcgccatcgcggagtaaagctgcgtgcgcgcaaagttctggaacgtgaacgcgctgtccggcaggcgcataaacagcggtctgccttcctccatgccggtgatcggctcgccggagaagtagttgcacgaaacgagcccgccgcaatcggcgtcgccctttaaagcctcaaagaacatcgtatcaagcgcctgcggcatggagcacttcgcgccgatgagctccgcaaacgacttaaacaaccccgcccacgcgttgatgtcggacgtgcagttgttgcaatgcaccatcgcaacgggcttgccggtcggcgtcgtcaccatgtcgatctccgtgtgtactttagaaagtgccttttcgagcacgatcatcgcaaaaacagacgtgcctgcggagatattgcccgtgcgcacacggacgctgttcgttgccgtcatgcccgtgccggcgtcaccttccggcgggcacaacggcgcaccgggctttaaggtgccggtggggtcaagcaaaagcgcacccgcgtcggtcagctcgcccgcgtcctcgcccgcaaggcgaatctgcggcagaatgtcgcgcagccgccacggcaggttgtgctccttgtgcagaatatcaaacgtgtccatcatgccggaatcgtacacgttgtgctcgctgtcaatggggaacatgccggaggcatcgccgatgccgagcaccttctcacccgtcagcttccagtgcacatagcccgcaagcgtcgtgataaacgcaatgtccttcacatgcggctcattgtttaaaatcgcctgatgcagatgcgcaatgctccagcgctgcggaatgttaaagccaaagcgcgacgtaaggtcggcggcagcctcctccgtcatcgtgttgcgccatgtgcggaacggcacaagcagctcgccctcgcggtcaaacgccaaatagccgtgcatcatcgcggaaaaccccagcgccttcaaatgcgtgatcttctcgccgtatttctcctctaccgatgccgcaaggttcttgtagctctcctgaatgccgtgccaaacgtcgtccatgtggtacgtccacacaccttgctccaagcggttttcccagtcatagctgccggaagccaataccgcgccgtgcggcccgatgagcaccgccttaatgcgcgtagagccaagctccaaaccaaataccgcttcgcccccgcggatcagcgcggcagtctcgttgcgttccatatatacccgtcctttcacggcaaacccgccgtttgtgtgattttctcattccgtcactcgtatcacttgtacgaacaactctatataatcataccgaaaatcatcgcatttttcaagagaaaactttgccgaaattcctctgcggaatttgtatcgtgtgtgaaaccgtttgcttcaaaacaaaaaatgtcccaaaacgaacttccctcttgattttttcctcaatttatattagaatagataatacagcaaaatgaacacgcgggcgtagtttaatggtagaacatcagcttcccaagctgaatacgagggttcgattcccttcgcccgctccaaaaatcacgagtctttttgattcgtggttttttctttatcctatgtaaaattacgtcacaggatagttgtctcccgcaaccagccgtgctatactgatgaaaagaggtcctatcccggcaaaaagttcccgaattcaaacaatatggaggtaacgttatggacactatttttcctgcttgcaacactctggaagacaatcgttttgaatctattgcggaattcaaggactgcatcgggcgcggagatgaaattgaattcgaatggaaaggcgttcatttcggaatgagcggctgccaaccgaaaccggaacatcggatcatggcctatctctggaaccagccggataccgaacaatactttgatacgccggacgacgcactggaatacatcgttgccggcgaccgcctgcgcgacatcatcacgcagatagacgtcctctcgcgtgctttttgattaactctattttgcagtgtgcagcgaccgtatgcctttaggaggtaaatccatgactcatctttattacgtccgacatgcacagccggactatagtattcacgacgatctgacccgcccgctgaccgaaaaaggtatgcgcgactgcgcacttgtgaccgattttctcacggacaagtctattgaccgcgtgttctccagtccttataagcgcgccgtggataccgtgcagccgtttgccgcacaggcgcatcttcccgtcaccttaatagatgatctgcgcgagcgccgcatcgattccgtttggatcgacgattttgaaagcttctgcaaggcacagtgggcggactttgactaccgctacaaagacggcgagtgtctgcgcgaggtacaggaacgcaatatcaaagcgctgcaaaaaattctgttgacctgcgccgggcaaaacatcgtcatcggcggtcacggtacagcgctgagcacaatcctcaatttctacgattcggctttcggttatgaagattttactcgtatgcgcgccaaagcaccgtggatcgtacatttcacctttgacggaacaaagtgcatctccatcgaaacacacgatttgatttaaattggatactcaaaattaggccaaatacaaaaagctcccgcaaattttctccgcgggagcttttgtcatttgcttctattctttttccgctgcaaaacggtctcgcgcagggcgcagtatttatcggcaaggcacaaaacggccgtttctttaaaccgcggcggggcgggatttaacgggaacatgtgctttttgatcatgtcgcgctccgtgtcattcagctcaaagtcgcggtcagcattgcgcaaggccgttccggcatgccgaaagccgtgcagcctgtgcgcggggtcgggcgtgtgccaatcgtagaggaaataatcgtgcagcaaagcgccgcgcacaagagcgcgctggttcacttttaggtgcagtcggtgcacgagccacaggcacacaagcgccacgcacacggagtgctcaaacacgctcacagacccgtgctgcatgttctcttttgcaatctgcatacccggagatttcaaaatatcgctgccgtgcaaaaacagcgtgcgcaaagtggggcgcatcagtttgctcccccggcaggaaactccgccttgatcttcgcgagcacatcgacatctgcggggcagaacacaacgtcgtcgatctccccgggcgtgatccagcgaaaatcctgatgctcaagccgctgcggttcgccctctgtaatcttcgcgttatagacaaacaggtgcacgaacagatccgggtagtcatgcagcacgtccgtaaaaagcgtgcccacttctaccgtaacgccgatctcttccctgcactcgcggatgagggcttcctcgttcgtttcattcggctccgttttgccgccgatgaattcccacatgcctgcgcgggctttgccttccggccgctgtccgatgagaaatttatttccctcacgcacaagcgccgccaccacggtgacgcttcttttattctccactaaaaagacctcccgtcttttgtaaaacaaaccgaatgcagtgtgtatctctgcattttcattatagcacgcaaaaccgggaattcaactgaaaagtttcttacaatacgcaaaacgggcacaacctgtttccaagttgtgcccgcctttcaggaggtagaggcaacaccgaacaaagaacgcctatcggtgctgcctccatgtttatggttaacggagacctcgcggtctttacttctgtgcgtgtgcgcagccgccacggcaagccgcgcagttgccgccgcaggaggacttgccgtttttcttatcccgcctcatcgattttacgatcgcagcgacgatgagaacaacgatcagtaacacgattatcgttcctatgttttgcgaaagccaagtcagcataacgatctctcctttcggcttggataattcctgaatttgcgaatttaaattacggagtaagattacttaaccttaacggctctgttggacagcgtggtgctctccttgtacgggcgaaccagcaggaagataaagagcacgatgagcacaatggaaacgatgatgccgaagacattcgccgtgccgagtgcaatgctgccgagctggttgatgacgaacgctacaagataagcaaagccgcactgataaccgattgcgaaccaggtccactttgcgttgttcatctcacgcttgattgcaccgattgccgcaaagcaaggtgcgcacaggaggttgaacgcaaggaacgcatagccgctgaccaccgtgaagtgggaagccatgttgctgtaaaccgtgccgtcaccgccgccatagaggataccaagcgtaccgacaatgttctccttcgcaacaagaccggtgatggaagccacagcggcctgccagttgccccagccaagcggtgcaaagatccaagcaatcgcgttgccgatggtagcaagaatgctgttgctgatctcgtcttcggtgagcattctgaacgcgccgtcgacaacaccgaaataggtggtgaaccaaacaatgatggtagacagaaggatgatggtgcctgccttcttaatgaaggaccagccgcgctcccacatagagcggagcacattgctgacggtcggccagtggtaagccggcagctccataacgaacggagccggatcgcccgcaaacatcttcgtcttcttcagaatgataccggagcagataatcgctacaatgccgaggaagtatgcgctcggagcaacccacggtgcgccgccgaagatagcgcccgcgatcattgcgatgaacggaagcttggcgccgcaggggatgaacgtggtcgtcatgatggtcatacggcggtcacgctcgttttcaatcgtacgggaagccatgatgcccggcacgccgcagcctgtaccgatgaggatcggaatgaaggacttaccggaaaggccgaacttacggaagatacggtccataacgaacgcgatacgcgccatgtaaccgcaagactcgaggaatgcaaggaagatgaacagaacgagcatctgcggaacgaagccgagaactgcgccaacaccggctacgataccgtcaaggatgaggcccttcagccagtctgcgcaatttacagcgtccagaccgctttcgatgatgcccggcagacccggaacccaaacgccgtaatcggccggatccggctcttcgcagccgtaggacgcataggtcgcaaccgcttccttgagctctgcgcctgtgtaagtgacattctcttccgccagcgtttcttcatcaacgagggtgtaatccgctgttgcgtcgtcagaaacggaagctgcaaacgtatccagcgcagaagccgctgctgccgcgtcaaacgtgtcgctctcggtgtcgatggcgtctgcaacgtcgtccgcaccttcagccgttacgaatgcgtcgatgacatttgccgcatcgccgaactcgccggaaacgtcttcgtactcgcctgcgccgatgccgaacaggtgccaaccgtcgccgaacacaccgtcgttcgcccagtctgtcgcaaccgtaccgaccgtcgtaacggagatgtaataaacaataaacataacaactgcaaagatcggcagagccagaatacggttcgttacgaccttgtcgatcttatcggaaacggtaagaccgccgttgttctttttcttgtagcactgcttgatgatggaagcaatgtaaacatagcgctcgttcgtgatgatgctttccgcgtcgtcatcaagctctttttcagctgcttcaatgtccgtttcaatgtgcttgcgattgtcctgcgtaaggcccagctgctcaatgattttctcgtcgcgctcaaagatcttaatcgcgaagaagcgctgctgctcctcggggagggtatgtaaggcaacctcttcaatgtgtgcaatcgcgtgctcaaccacaccgctgaagctgtgctgcgggactgtcttcgtgttctgggctgcatggatagcggcttctgctgcttcctcaatgccggtgcccttcaaagcggaaatctcaacgaccttgcagccgagcgccttgcccagtgcgttggtgtcgatcttgtcgccgttcttatttacgacgtccatcatgttgaccgcaacaacgaccggaataccgagctcaacgagttgggtggtcaggtagaggttgcgctcaaggttcgtaccatcgataatattaaggatggcttcaggcctctcctgaatgaggtagttacgtgcaacaacttcttccagcgtgtacggagaaagggagtagatacccggcaagtccgtgatcacaacgtcgtcgtgcttcttcagcttgccttccttcttctcgaccgtaacgcccggccagttgccgacgaactggttggagccggtcagtgcgttgaacagcgttgttttaccgcagttcgggttgccggcaagggcaattttgatcttcatctgttactcatatccttccgataagattaaatccaaaggttaggatttgctaaccttcgagcaaaaattaacacattaaactgacaaaggcagcagcaaacggggatggtgcgcgagatgcgccgtcagatttttcgtcaggctgtacggaaagcccgcaggcaggctgacgcctgtcaagggatttacgtccggcatggcggaaaatatgcaagcagatcgagtaccaagccgtcaggcgtgccctgtttggtggtgccttactcgacctcgatcatctcggcatccgctttgcgcagggaaagctcatagccgcgaaccgttacttccaccgggtcgccgagcggcgcaaccttgcggacgaaaacgtctacgcccttcgtgatgcccatgtccatgatgcggcgctttacggcaccctcgccatgcagacgaacaaccttgcaggtctcgccgatcttgacttctttcagtgtcttcattggttcttcctccttatatcatgatcttagcggccatctcgcggctgattgccacacgagagtccttaatgttaacaatgatatttccgcccatggaggtgatgaccttcacggcggcgccggctacaaagccgaggttttcgaggtgagcacggacttccgcttttccgcctacctgcttgatgatgttttcttcaccctctgtggcaaatgacaacggcatcacagtttttccctctttcctgaaaattctccgcgccgagacggcacggttaggctacacaaattagtttttgctaacccagatgctgtaaaataggttagatttctctaaccgtcactaatcataccgccccattcaaaatttgtcaacactttttgccccaaaaagacgcgctcagccccattttcggcgtttagtcaaacacaaagttagttgtagcaaacgcctttgtgcagactgcgcaattttttcggttcaaagccgcataacgcgtctgttcggggccaaactgtattattgtacatgaaaatgtcgccttttgaccctttggcataaaccgtgccgcggcagaaaattcgcatacctgccggcccaaataagcaggaagcatcgatgcaacttgtaaattcaaagtgctttttgatgaaatccacaaataaatgcattttcagtttaaacatctttcaaattatgatgcttgtttttttgccggaagacgtatagaataatagtcacaaagtgttgatggagacaagcgcacggcatcttcctcaaagcgagcggcgggtggtgaaagcgccgcaggcaaccccgtgtgatcatccctccggagcagcggcttccaaagagaacgagtagaggctgacgggttcttcccgttacagaagaaggaattgctggattccgttaagtgcagggcaaacgccctgaattcaggtggtaccgcgtgatttacacgtcctgaaggtcttaaagagactttcaggacttttttattttgaagcagcaccgcgcaaagaacgcctgacggctcagcacacaatatgcttgcatattttccgccattccgcacataaattccttgacaggcgccagcctgcctgcggaatttctgtacgccctgacgaaaaatctgtttacgcatcttgtgcactgtcttcgcgtggtactgcttctttactccactgttccacaccctaacttccagtaaagcgttttttatttcattttcttatttcaatttatttaagcgatctcaaaaggagatccaaaggagcgtttatcatggaaaactacaatgtcaattacagcgtacatctgccgagctattccatcggcccggattgctacaacgaagtgccgtatgtcacgcgcttcttcggcaaaacggctgttgtcctcggcggcgagaccgctatggaaaaggcaaaaccggctctgcttaaaggcgtagaaggctccgacgtcgagcttttgggcttcctcccctacggcggcgattccacctacgaaaacggcgatgcccttatcgcaaacccgctcgtgcagaaagccgacatgatctttgccatgggcggcggccgcgcctgcgataccggcaagtatgtcgccgataagctcgataagccgctctttaccttcccgaccgttgcgtcgaactgtgcttccgtcaccgccatctccgtgatctataatacagacgggtccttccgcgagtattattacccgaagctcgcaaaccactgcttcatcaactccgccgtcattgcagattccccggagcagctcctttgggccggcatcggcgacgcgctgagcaaggagtgtgaagccatcttctcatcgaaagacgacacgctcgcccacaccccgctcatgggccgtcaggtcagccgcgtctgcaccgatccgctcgtgcagtacggcaaagaggcgctcgcttccatccgcaataaaacggcatccttcgcgctcgaccaggtcacgctggatatcatcgtttccaccggcatcgtctccaacatgatgaccaccgtaaatgattattattacaactccacgcttgcccactgcgtctactacggctccaccgtcacagagcacggccaccatcacctgcacggcgaggtcgtttcgctcggcgtgctgtgcctcttagagcatgccggccagttcgaggaagaagaccgcctgatgcagttcaacgattccatcggcctgccggtctgcttcgacgacgtggaaatccaggaatccgagttcgacaaaatggcggataaattcatgcagacgaccgagtgggcgcacatgccgcagggcgttacgcgtgagaacttcctcgagtccatgcgccgcgaaaacgccaagggtcgtgctttcaaagccgcaaagaaatgatttaagaatcctataaaaggtaagaaaaaacgaaacagggcggcacgagttcgtctctgccgcctgttttacgctcaaaaaggggtaatttcctatgtccgcattacagaaattcaaaactttcttctccaaaaatgtgctcttgtgtttgacgattcccatggtcgtcttctccctgcttgttccgcagccgtttgtgtggatgggccagaacatctcgattgacctttccggcatcccgttcctgaaagaaaactttccgagcttcggctttgtcaacatgctcctgtgcgtcatcatgttcggcatgggcatgacgcttaaaaccgacgacttcaagtacattctcaaaaaaccgaccgatgtgcttatcggcatttgcagccagtacgtcttcatggcaggcttcggctggcttgtcgcatcgctgctgtccctcacgggtgtgggtgaccccaccgtccgcgcacagattgccgtcggcctcgttctgctcggctgcgtgcccggcggcaccgcgtcaaacgtcatgacgttccttgcaaagggtgacgtggcgctctccatcaccatcaccatgtgcaccacattgcttgcgccggtgctcaccccgtccctcacgctcgtgctcgccggtcagtggattgacgtcaacttctggaacatgttcatcagcatcgtgctcgtcgtcctgctgccgatcctcctcggtatcgcagtacacaccgcgctcggcgaccgcgtaaacggccttaaagatttccttgtcaaggcttccaccgcctgcatcatcctcgtggagggtctgtgcgtcggcccaaaccgagaccagttcacaacccacggcgtcaccgtcgtgctcgttaccgtgctcgccgttgcgctgcaccatgtgctcggcctgctcgcgggctacgtcaccgccaaggtgttccgtttcaacgaaaagaaggtccgcacgctgtcgcttgaggttggtctgcagaactccggcctttcctgcacactcgcaaagaccgcgttcccggataccatggccatcctgccctgcgtcatcgcaacggtcgtccaccagatcatcgggcctatcgttgccagcatgttcgccgcaaagccgttgcctgaagaagccgagcctgcttccaaaaagaaagaagcaaaggaggccgtcaccgcgtgaagcacttttccgaaatttccctgatcgcaacggtctcgtttatcggtgaactgctgcactacctcattcccctgcccgtgccgagcagcatctacggtcttttgcttatgctgctcctgctcgtcacgcatatcgtaaagcttgaccacgtaaaagccacggccgattggctcatcaccctcatgcccgtcatgttcgtcggtcccactgtcggtctcattgcgagctatgacagctacaaagacattctcatccccatcgttgtcatctccctcgcgactaccgtcctcaccatggcggtctccggcctgaccacacagggactcatccgtttacagaccaaagaagaaaaagaagagcgcgcagaagcgcttgaagcatgcgaaaaggaggaacaaaccgatgttaaatgatattgcgtcgaacacctcgttttttggcattttcatcaccggcgtcacctatgtgctcgcctgcgccattcaaaagcgctttaagtcgtccattttgaacccgctgctcgtctcctgtgtgattctcatcatcttcatgctcgtcagcggcatcgattacaacgtctacctgtatggcaagccgaaagccgacggcacatacgacggcacgggtgccattttcttccagaacatgctcacccccaccaccgtctgccttgccatcccgttgtatgaaaagctcgtgtacctcaaaaagtacccggtcgccatcatcggcggcattttggccggcatgttcgcg

SEQ ID NO: 2537 - DNA, 2293 bp, Unknown
  16S sequences of unknown bacteria
ttttgcggcatgaaaggggtcggggcttttgtgtgaaaagtcacaaaaatcacttgtgtatttttcatattgttcttttgtcggttccatgttactacctcccgaaatattttaccataaacggaatttttcttcaacagaaaagaggccttttctttgattttacggggcgaatactcgttgacagaggtgaaagagtatgttaaaatgaactgtaaaatttttttatggagatagataagaaatggaaaagttttttaagctgtccgagcggggaacaaacgtccgcaccgagttcaccgcgggactgaccaccttttttgccatggtgtatattctcatggtaaatgccaatatgttttcgaatcctttgggcgacgggtcaaatcccctcggggtttcctacggcgcaatctatattgccaccgcagtttcggcgattttcggaaccgtgctcataggccttctcgccaaccttccccttgctcaggcaagcggcatgggacttaacgcatttttcgtatacaccgtatgtctcggtttcggctttacatacgcaaacgcccttgtgcttgtgcttgccgacggtcttgtctttattctgctgaccgtcacgggactgagaaagaggattttccttgccattcccgaatcggtcagaaccgccatttcggtgggcatagggctttttatcgccttcctgggacttcagaattcgggtataatcgtgcccagcacctcaaccggagtgacccttgcttcctttaatattctgcttggcagctggggagacataatgcccatggtcgtgaccattgttgccttccttgccattgccgttatgagcaaaaagggcgttaaaggctcggtattttggggaataatcggcggctttgccctttattacctcctcggtcttaccgtccccggtttttacgcaaatctcaacattgaaatgacaagcccctttgccgccatgaaggagtttgcgagccagtccttcggcgccgtctttaagagcggctttgacttctctgcttattccgaggctcacggaaattccaatctcgtgctgaccattgccacgacggctctcggcttttgcatgatcgatatgttcgacaccatcggaaccctttttgccgcctgcgacaagggcaatatgctcaccgaaaagggtgaggttcccaacatggaaaaggccatgtttgccgatgccgccgccaccaccgtcggcgccgtgtgcggtacttcaaccgtcaccacctttgccgagtctgccgcaggcgtcgccgagggcggaaaaaccggactttcctccatgtttacggcaattttctttgtggcagccatgctgctcagccccattgctcagctcgttccctcctgcgccaccgccgccgcacttatatatgtcggtgtgcttatggccgagtcggtcaagaaaatcgactggaaagacgccgaaaccgccgttcccgcatttttgaccatggttatgatgccctttgcatacaacatttcctacggtatcgctttcggtcttatttcttacattgtcataaagctctttgtgggaaaggccaaggaaatccgcgtcggaacatgggttatcgccgccctctttgtggcgacgcttcttcttacacactgataaattttaaagaaatcgggtgacctttttgacaaaggatcttgaaaaggccgaatactatgtggagcagtgcgattatacctgcgcccttgtaaaaggcgaagaaatatttacctctgccgacaggggagtggctcctcttttaaagcttgtaaacgcgggtaaaacggcctgcggatttgccgccgccgacagggttgcgggaaggggagcggcctttctctacattttgctcggagtgggtgaggtttacacaagagtcataagcgaaggcgcccttgagcttcttaaaaatcacggtattgccgtttattttcggcagtcggtgaaaacggttatgaaccgcaatgccgacggcccctgtcctatcgaagcggcactcgaggggataagcgaccccgaagaggcgcttgaagtcataaaaaatactctgcaaaaactgaagggtgaataaaatgaaaatacttgatatgcaaaacgaaatactgcggcttaaaaaggaaaaggacatttgtattcttgcccattcctatcagcgccgcgagataaccgaaattgccgattttgtgggcgacagctatgcccttgcaaaaaaggcggccgccgtacttccccttaaagaaaacgcacagaaaatct

SEQ ID NO: 2538 - DNA, 24488 bp, Unknown
  16S sequences of unknown bacteria
cctattctcgcctattccgtatgaagttgtggtcattgtcgggaatattgtctgaaatagactccgagaatgagaattgttaaaatcgttactgcactgtaccaatatgtattactttgatacaaccaaataataacatatagttattgatgttgcaactgaaattttgatgtgtttatttgaacgctaccattaggttgtacatttcttccgctttatgctaagataaatcatatttataaggagatattttcagatgaatgaatggcaggatataattacaactttatataagaatggctgtcggctatgtccaagagaatgcggtgcagaccggatacatggacaaactggtttttgtggcatgacagatgaactgatggcagccagggcagcacttcattactgggaagaaccttgtatctccgggacagaagggtcaggaacggtattcttttccggttgtacacttcgatgtgtgttttgtcagaatgccgagattgctgcaggccatgctggaaagatactgtctgtggatcgtctggcagacatttttttggagttgcaggagaaaaaagctaataatctgaatctggtgactgccacacattttctacctttcattcttcctgcactggaaaaagccaaagcccgtggacttaaaattccagtggtctataacactggcggttatgaaaagactgaaatcattaaaatgttggatggaatcgttgatatctggcttccggatcataaataccggtcatctgaactgtccgcaaaatattcacgagcgaaagattacccggaaaaagcagcctcagcactggaacagatagtgaagcagaccggagaacctgttttcgatgatcggggaatgatgaaaaaaggtgtgatcgtccgtcacctggtactaccgggatgcatctcggacagtaaggatgtattggaatatctgtgggatcatttcggaaacaagatttatgtgagtattatgagtcaatatactcctcttcctcatgttactgcttggccggaactgaaccggcaggttacgcaggaagaatatgaggaagtgatagactatgcaagatttctgggaatgagtcaagtttacatccaggaaggagaatgtgcaaaagacagcttcatcccagcatttgactgtgaaggaatctaaatttcaggaggtttttatgatttccaattacgataaacaggtcgatatcggccggaagatttttttagattatgatcaggaagctctgatccggaaatatactctggatgctgatgctgactttctatatctcacctatctgggaaccaaatgcaggatcaaccgtaagactggtgccattgatgagatgattgatgacatctatacggaatgccgggaatacacagtggtcatgactatttatgatatgctctgccacggtgacagccccacacttccgcctctctctggcaaatggacgttggttggcaattttgcggcagccggttccagccccgatgccaatctctttgctcagaaatatgccgatgcattttccgaaaagacagatgcgctgaaagatgcctgcacagccattggcggcgagattcttgactccattgccggtgcggatgtaactgcccggatccctgcattttccttcttcccggttcttctgcaatactgggaaaaagacgaagaatttcccccgcaggtgcgccttctctgggatgatcagtccatgaaatacttaaactttgagacgacctactatctacaaggggatctgttggaacatttgctgcagcttatccgttaaaacaccctttgatctcccacctctactttcatctgcacataagaagcaaattttctcgccgcatagggcatggtgtcccagtttctgaagaccaatgccaccggccgttccatctgctccttcaccgggcggatgaccagatctgcgccaaatccttccagcacccgacggtacagaatggatacacccagtccctgccggatcatagccaggattgaatagtcgtcatatactttatattcgatccgaggatgcagtcctcttctttgaaatgcctgctccggcacactgtactctccctcatccagcaaaataaacgattctgttgccagatctttcaaagagaccatctccttttttgcaagccgatggcctttgggcagaactgccaccatctcgtccctgtacagaatctgcgtatgcagattattcactgcttctgcattggcaaatccaaaatccacacttccttcttccacccacctggcaatgctggtgtattctccctgctgcaggatgaaccggatatctggatgctctttcttaaattccatcataagtcccggcaaaaagatacggctcacgctggtgaacgtaccgatccgcacaacactgtttttcaggcctttcatctcctgttctttgcgttccagattctgttctgcctgatggatctgctgaaaatatggcagatactgctctccgtctggagtcagtgcaatcccgtcctttctccggtctatgagaaccgtctctgtctccagctccagtgcccggactgcctgactaactgcactctgggaatatcccagcttttcagccgttcttgtaaagcttttatgttcaattactccgcaaaaaatcccgtatcttgataacatgttttttctccatcagtttttcttatgtttcaattataatgattcattttacttatgtaaagaaaactgctacaatcatgtacagaaaattttcagtttacaaggggatctattatgaatgaaacaaatgcacaggtttttcgaaaaggtatgaaagatgccatccccatcggactggggtatctggcagtggcattttcactgggaatcgccgcaagaaatgcaggcatgaacgcatttcagggattcttaatgagtatgctgaataatgcatcggccggtgaatatgcaggtatcaccgtgatcgccgccaattctccttatgtggaaatggcgatcgtgaccttgatcaccaatgcccgttatctgctcatgagctgcgccatgggacagcgtctcacaccaggactttccttcggacatcgtctgctcatgggatttgacattacagatgagctctttggcatcgccatcgcaaggcccggatatcttcatccatggtatacctatggtgccatgaccgttgccatccctggctgggcagtcggaaccgctcttggcgtcactgccggaaatatgctgcctgcacgaatcgtcagtgctctaagtgtctccttatttggaatgttccttgcaatcatcattcctcctgccaggaaggacaaagtagttgcagttctgattacactggcctttttattaagcttcttagcttcctgtctgccagtgatttcttccctttccgaaggaaccagaaccattatcctgaccattgtgctctctgccggagcagccgctcttttccctcataaagaaggaggtattgaacatgacgcataacatttatctctatatttttatcatggcgggcgtatcctatgcgatccgtgttctgcctctgacactgatcaagaaaccgattgaaaatgaatttttaaaatcctttctttattatgttccgtatgttacactggcagtgatgacgtttccggctattctgcacgccacagaatcaccgctttctggtgcattggcgctgatcatcggcattatcgctgcatgggccggagccggacttcttccagtagcagtgatctgctgcgttgtagtattgattgcggagttgtttttatgagtcgtaccaatgacctgggacaggatcgcatttcccgtctcgtaatccggctggcaattcctaccatgctggcccagcttgtaaatgtattatattccattgtggaccgtatgtatatcggcaccggtgttggcagtcttgcgcttgccggtgtcggtgtctgtgctcccatcgtgaccctgcttacctcatttggttccatggtcggtcagggtggtgctcctatcatggccatgcagatgggaagcggtgaccataaaagtgcaaagcagactctgaataatggatttttcatgctgcttgtcctgtccgcagttctgacaggactttttctgcttaccaaggatcagcttctcatgtggtttggagccagtgaggccaccttttcttatgctaacacctatgtaaccatctatactgccggtacattttttgcactgatcagtggtgggctcaacagctttctgatcgcacagggattctccggtcttggcatggcaacggttgtacttggtgctgtcctcaacattattcttgatcctgtgttcatctttatttttcatatgggtgttgccggtgcagccattgctacggtcatctctcagatggcatcctgtgcatttgtgctgttgtctcttcgcagccataaaatgcctgttcgtctgggctggggcggatttcaagcaagcgtgatacgccggatcgtgacttttggattttctccttttctgatcctggcaagcgacagtattcttctcattgtgcttaatactgtccttcaaaaatacggtggtccaggagaaggtgatacgttagtcacctgtgctacgatcgtacagagctatcttctgctgatcaccatgcctatgggtggtatcactcttggcagtcaacccgtagtaagctttaactacggaaaaggcgacccggaccggatcaaaaaggcaattcaatgtatcacaggactgtgcgtgatcttttgcatctttatgacaatcgtaacacagactatttcgcctctctatgtacggctgtttaccactgattccgtaatccttgcaagatccgtcacttatatcaaacggttcactgccatgatcattccgttagcaatccagtatccgctggtagatgagaccaccgcgcttggaaaggtcggccaggcactgttctgttcagcattccgtaaatgcgtctttttcacaggacttctgctgctgcctgccctgtttaccgcagacgcagccttcttctctgagcctattgcagacgtgatatcagctacaatgacaagcattctgttcctccatcgatttccgcggatcctgaaggaatgtcagaaccaacatttataattgatatctctcagtcaaaaaaggaacgatcttcagcagtcagcatctgctatataatcgttcctttgctcagctaaatctctgttttctttcttaaatatcttctatttcctgattgatctcatcttcggttgcttttttgtattgcaaagcgccttgtatgctgtggcggaatttactttttcaagttatcctcatactccacgcattccagcgtaagtccttccggcggcatgagttttccagcattggcgcgatccatgctcatgagaatcatgggaatatcttccggttttcgtgccccttctcccacttccaccagcgttcccgtcaggatacggaccatatgatagaggaacccatctccggtataagagatgcggatctcttttcccagatgctctatgttcacctcttctaccgtacgaaccgtggattttttgaatttcttcagggaacagaatgcccggtaatcatgagtcccacacagcagctcggctgcccgtctcatggcatccacatccagcggctgttcgatccaggtcacatatttccgttcaaagactggtctgaccggggcattccagatcctgtacacataagttttacgaactgcattgagtctggcatggaacctgggtgctgcctcttccactgagagcacgcagatatcctccggcaaatattgattcatataggcacagatatcctccggtgttcggtctgtctggcaccgaaaactgattacctgtcctgctgcgtgaacacccgcatcggttctgccggagccgtttacctccaccggctcacctgccatacgggtcagaagagtctctatttttccctgtatggtgttatctgtatttccctgtacctgccagcctcgatatcgggttccatcgtattgcaagattgctttataattcatactatttcctactcctgcctgttcacagtaatcataaggattccctacaactcaattcctttacgtgcaggaattccctgatcaaacggatgcttgatcttcttcatctctgtcacataatctgcaagcttcagcagttcttcccctggatttctgcctgtcagcactacttccagacagtctggacgcttcatcagacattccagtgcctgcttctgttcgatcagaccatgattgtaggcactcataaattcatcgatcaccagcagatcatatccttcctttactgccatatcccatgcttttcggaataatgccgtataggactgctgcgcttctttcttctgctcatccgacatattccagaagaatccaaaatgctccggacaacacagataggtgatccccaacttttgaagcatcttgatctcgccggaagtaccatccttcataacctggcagaacaataccttcagtcctgttccaacagcccggactgccagccccaccgatgcggtagtctttccttttccatctccacaataaatctgcagacatcccttttttaaacaagccataagacaactcctttcaccagtccaaataccagaagagccaggatcgcggttccgtaaagcagtcggttggcacgcgcaatatcttcatattccaccggccgatccggatctcccagggtcggcttttcatacagttttccaaaataaaaggcatttcctgcaagctgaatgtgcagtgccccggctgttactgcctctgtatgcgcagaattggggctgctgtgattatagcggtccctcttgtatatgcgccagccattggccgcatccatgccacagcagccagcggcaccgatcatcagaatggcagacaatctcgccggaatgtagttgaccacatcgtcaaattttgccgctgcccggccaaaatacaaatatttatcgtttttatagccaaccatggaatccatagtattgaccgctttataaaaatatcccagcacaggtccgccaatcatcataaacaacagcggtgcaatgatcccgtctgatgtattttccgcaacagtctccactgctgccttggtgacaccgatctcatccagcacatccgtatctctgcctactaccatggatacggcatatcttgcttttttcagatctccctctttcagcgcatcatagaccttcatggtctccgtcttcaaagatttggtcgccaggagctgataacacatgagcacggacaacgcaaatttcacatacggatgaatacagccggctgcgtacagaaggatccaggctgctcccgatgtgattccggctgtgaggatcaacaggaatactcctgctgtcagttctccacgttttgtttttggaaatacttttcgcaggattttctccagaccgctgatcagatgtcccaccagacggatgggatgatacagccagtgtggatctcccacaataagatccagaataaatcccaaaattactgcaagtattgataattccattgatctgtcccttccaccggtgtcagtctgtaaccacagccatttttcacctgataatcaaaatagtttttcttaggtgtaccaaagcgctccaggatcgccatgatcgtcccaccgtggactaccactgctgcccgaagtgtctgccctgtcttctcttcctgcttctgcaatccttctgtgatacgctgaaacgcctggcagcaccgcttccggaatgcttcattggactcgcctccgggaaacggcaaggttccgttgctgtcgatccacgcctgatactctgcattaccggacagttcctgataatttttgttttcaaatgcaccgaagtcgcattcctgcagattctgtacatactgtatctgagaagaatttgcaaacttaggccacaggatctttgcagtctgtctgcaacggatcataggacttgcatagaccaggtccactggcggataggtaccctcacacaccttttcctccaacgcatggattccttcttcacagagcggctcatcagtccggctcccaatatagcgtccttccagattacctgccgtctttccatgacgtactaatatgatctcagccatgcttgatcaccgtcccgatcccacagatcacccgatgaacctctgtggcctgctttgcgatctcacagcagacccgtccggttttctcccggtattcccggtcaaaacggtcaacagggacaaccccgtagcccagctcattggtcacaaggatcagatctggatttttctgcagcagctcttccacagacaactcctgttcttctttcatgagccgtctgatatattcatgaaaatgatagagaagcttcgtcgtatagatcatatgcaacggacaggtacggccgtctgccgcttcgttccgactgatctgaaacttctcaagtgcatactctgtcttcccctgaaaacagcctcccgtcaccagtatcataataattttcctcccagcatgatcacaaaagcgcaggcaagctcacatatctgtgtaaaaaatcctgctatatctcccgtcgttccaccaaactgcttcatagccagccggtaataacttccatacaccactgctgctgttacgaagagcaggagcgtctgtttccagtccagacagattccaactcctgcgcaaactatcagccacagtgcgagtgtgatcaacagtatcctcttctgagcagcatctgagaacatggacaaagagccgcttttatttgctttgggaaatgtggataatgccagactgcttaaggttctggacactacaaagataagtcccgccactggaagagccttcagattcatctcactccacactcccaatgccagtacaaaatatgaacatcccataataatagcaaatgctcctgcatgggaatctttcaggatctccagcttcttctccctgggctgccaggagctcagagcatcggtggtatccagaaatccatccatatgaatgcctccggtcaccaggacaggcagcagcacaaacgaagctccccgcatggtatctccaaaggagagccaggtgcagagaatccccaatccctgcaagagtactccgatcaccactccgatcaacggaaagaagcacatcatataccgcatattttccttatcccagtcagctcttggtaccgggatcttggaaaacatggcaaatgcgattaaaaaactgttccagatctttttcataatgacacaattccctccagcgttcctttttttaccagcggaatggagtagaccacttccaccaccacatccgccagttttgccagttcacagttcatctctcccaaatattgctgataacgtgtagtctccggatcatattcgattccatcagaaaagatctcgtttgtcacgatcaccagatgttctgtgtgactcagcacatgatggatccctttcaggatctcctgcacgcatgcatccccggaaccattttcctgatacatctcattggcagtcaggttggacatgcactccagcagcgtcgttccagacgaagggatcttcgcgtccttcagaccggtatagcattcaagcgtctcaaaccctttatctctccgcataagccgatggcgggcgatccgacgatggcactcttcatcaaagggatacatggtggcaatatagagattaggacgggtctttaatcccataactacagactcggcaaatgcggactttccacttccacttccaccagttaccaatatcagcatgttccgtactcctcgcatttcttcaaaaatgtataggcagattccggtgcagaccagaaaaacagatgtggaaatcctgcatacaatgtctcatttccattgacacagtcccactgccgttttcccaccggtttcttcgcatggaaactctctccgcactgctcactttcccagtagtgaaactcatgcccacggatcgacatccccttatctcccaacagctgagcttcattggcagtcagattgatatagccaaaccgtcccagcttattggtccggtaagcctttgcatccaacactcctgccatgggataaaagattccatcctgatcctccagttcccgatgcagatataagaagcctccacactctgcgatacagggcatcccttgtttgatcgctttcttgacagactgacgcatggatctgtttgctgccagttcctttccatgtagctccgggtatcctccacttaagatcatacccgatattcccttcggcagctctgtgtctttcaacggtgaaaaaaacacaagctttgctcccatcttttccaacaaggatagattgtcaagataagtaaagcagaaggcatcgtctgctgccactgcaattttcacagaatgctcaagcaccggaagcttcggttcttcatagttgatcggctctgtcatctctgcaagtctgagcagctcatccagatccagtgtctcttccagagccattgccagacgcttaagcttttctttcaatgcttcgatctctcctggcagaaccagacccagatgacggctttccagattcagatccgtaagcttcggcacataaccgagcacctgcactcccagttcctgctcgatcagtggcttcaactgagcatagatcataggggacacctgattaagaatcacagcccggatctgagaatcttcccgaaagcttagaaatcctttgattgtcgccagaacagaaaggctcgctcctctgctgtttacgatcagcacagacggcatagaaagcgtcctcgccacatcataagtgcttccgtcggtactcacaccacccaggccatcataataacccatgactccttccaccactgcaagatcacagtctgccgtattttcagcaaacaggtagcgggtcgtattcgaatctgtaaaaaaagtatccagattccgggatttggtacctatgactcttccatgaaacataggatcaatgtaatcaggtccgcatttgaaagatgccaccttttttccccggttcaccagtgcctgcaaaattccgcaggtgatcaacgttttaccgctgccgctggcaggtgcacacagcaggatccgcggaactgctctctcctttttcacacttctccgcctcctctgcatgtaacaatatagatcggattctgtcccatcatcagatgatatgctcccagcttcttcgcccgggatacattgacacagatcgtctcctcttcaataagattcagtgctttcagacactcggatacttccgccatagtctccagcgtcaccgtattgatcaccagacggatcaatggattcttaccaagaagacaggtaatgatctcttttaaatttcctgcagagccaccgataaatgcatgggtcggtgcaggaaggtcttccatggcttccggtgccagtccatgaactacctgaatattaggtgttccaaattttcgcttattttcctcgatcagatcacaggcttcctgattacgctcaatcgcatagatacatccatccacagccgccagtgccagttcgatggtcacagatccggttcctgctcctacgtcgtagacaacggcatcctttggaagctgaagctttgccaccgaaaggcttcggatctcactcttggtcattggggctttccctctggaaaattcttcatcatccacacaggcacggataccgctgaatggtgtctcattttcgatcagtgccacacaaagtccgtcaatggactgcttcaacaattcttccggtgttcctgacaggatcttttcatcctcgtatccaagctggatacctatatgaacagtaacatgagccagtccatattccatcagttcctgacagagtacatggacactctctccttttccaagaagggtgaatgttttatgatgactcttcactgctcccaccagattggcactgcgtccatgggtgctcagcagacatacgtcttcccatgcagtccgcagctttccacagaaataaactacagaagagattccacacagcgcatccacctcaaaatctctctgctccagttcttcataaagcctcttggctccactgtaaaatccaatatcacctgacagcagtaccacgattcgctgatactctggatgcagctccagataatcaccaatcttccgaggttcataagcagaaaatgttggtttgtgcttatctgccgcagccgcaagcatccggtcagcacccactaatagatctgccttctcgatgacctgtgcagcttctactgtcattccttccggtgtgccaataccgatgccaacgagagttacttttcgctttgcctgtgtcggctgtacttccagtacagaagctgctgccagatgaaaacgaatcctcatcatctccagcacttcatcataggaataacccttctgttccggcggacgtcccaccagcaccagagttgctcctgccacttttgccgcatgaagcttttcttcaaatcctccggcttttcctgtctccttcgtcaccagatacttacagtcaaattgatgcagcatagcaatgttcagctcctcactgaacggtccctgcatgcagatcagattcttacccacaaatcccagcttctcacaggctgctgccacctctccggtagacagtactcttgcaaataccctcttctcaaatccagggatctgtgtatatttaagcagttccttacttccggtcgtagccaggatatttccttctgtcttctttaagtattctacagcctcatccacagaacctaccagtaccgcctgatccaccgattctgcgctgctgccccggatcaggcgcacatagtccacctgttcccgctcacaggctgccgccacattttccgataccaccgccgcataaggatgtgttgcatcgatcacaagctctgccccttttccacggataaatgctgcgatctcttcctgatccatgcgtcctgcatgtaccttcagatattcattttcagttaaaagtgtctcaccatattcagtggcaacacaggccgtcaccggaaccttacaagatgccagatattctgagatcgttcttccttcggtcgttcccgcaaatatgatcaccggttttctatccatgtatctctagtcctccatacaaacagtataatcttttacagcagctgccacagtcacaccattatgagctgtttttcgaatcagcagtcggctggttccggctcctttgagtgctgaccgttcacacacatttcccacacctgccacagaacggacaaacgcagactccgtaaatccatcctccgatcgcacctgctccagttcttccgcactccaggtcacaaaaggaactcccagttcttctgcgcagatcctgattccctcttcatcctttttcagatcaatagatgcaatcagacagatactctccttaaagatctgattctgttcaagagtttccctgatcagtgcacggatcgactccgcttccgttcccctcttgcagccgattccaagcaccactgtcttcggaaccagatgaagtgtgtgagggaagggccggttcttcctgtaggtgatggagaatccaagaggaagcaagttctgcttctccgccttcgtgccatcggactccacaccatacagattctccacctgcgtaagctctgccggaaccgttcccagcaccggaaatgcactgcatatccctacttttttatcttccaccaacgctgcagcgatctcttttgccagtggcatggaatctatgtagagatcccttctggctgcaaatgcatccaccgcaaattttccatgaagatctgtggccgtcgtgatcaccggctctgcaccgatccattctgataccaggagggtcagcgcattggcaccgccaatatgaccggacaacagcgagatggcatgccgtccctgctcatctaccacgatcaccgccggatccgtctttttacttctcacatacggagcaatactacgcaccgcaatgcctgtggctccgatgaaaatcatggcatccaccgctgcgaactgctcttttgtccactcccggagactctgtgtcagaacctgcacatttctgcagtcaggtatctgtgcctctttcttcttaatccatgcccggcaggtcatctctctttctgaaaattctttcgagagtctctccgccagaactgccccatgctctgtaaagcaaatcactgctatgttcatgtcttatctcttccaatcttttttaccaggtctggtacgttctttgtctgaccaaggatgccgaatacattggaaaatgtaatcacgcccagttccagttgatgctgagcacgctggttcacatagaattccattttttccatgatccgctccatgactggttccatcagatccgcttctttcagatatttcagtgcatcatctgtagtcacacactccatcatcttctgaagcagctccaccggtgcacccagcaacgccgcgtgaacagtcagaagctccattcgcgcatctgcattgtgcgaatgagtattcataataccgcctgcaagctttacaaattttccaatatgtcctaccagtaacacgcctttggctccaaattctaccgctgcatccagtgcctctcctacgaaattgctgcatttcacagcatcttccaactgaagtccatgaccatactgatccagaaaatcaattccgtagttgcccggaaccaccagcagatactccatgccatttgccagcttctgccgcatctctacccggatcgtgtcgatcaacgcctgctcactcataggctccacaatgccactggttccaagcaccgagatacctcccacgattccaagccttggattaaaggtctttgccgccagctccacaccagatgggatactgatcaccacagacagttttccatggtaatgatactgttcgcagacagcttccagattttcccgaatcatctggcgcggcaccttattgatggcagcagctcccaccggctgttccagtccaggctttgtcacccggccaacaccaatgcctccatcaatgatgatctgtacttcatctgccggctcccggatgactttcgcatagatcaggattccattggtcacatctggatcatcgcctccatccttctgaatcgcacagctgactgcattgtcctcacggctgatatccagcacttccagccgaagatcgattcccttcggagtatgaagctccacataagaaatctctttgcctgaaagcagcatggcagcagctgcttttgacgccgctgctgcacaggagcctgtggtatatccatatcttaattttttatgattcttatatacaaattgttccatttttgtttacacctgatgcgtatatgcttccacatgaccgccctcaaaagtagccacatgataataaacattcaatgcctgatcgatcagagacagacccataatcgcacctgttccttctcccagatgcatgcctgcatgaagcggtgcttccattcccagtttttccatgatcatttttgccgctggttctgcggaacagtgggtcgggatcatatattcctttgcagtctggttcagcatacatgccagataagcggatacggcagagatgaatccatcgatcaggatcggcatctgacagattgccgctcccagataacagccaaccattcctgcaatatcaagtccacctacttttgcgatcacatcaatggcatccttggggtccggcttatttacggcaatcgcacttcggatggcattgatctttctgtttaatccttcactggaaagacctgctccccggcctgttacatctgcagggtcttttccaaataagaccgctgcacaggcagcgctggtggtcgtatttccgattcccatctcgccggtcacgatcagctgataaccttcttctttcaattcctttacgatctcaattcccgtaagaattgctttcacacactcttctcttgtcatggccggttcttttgcaatgtttccggtaccataacgcaccacccggttgcggatctttggatgtacaccatccgtcagtcctccgatgttgaccggaatcatatcacagccagcctgatgactcataacgcatgcggtagacagatcatttcccatattttccaatacctgcatcgtcacagactggtctgtctgcgtcacgccttcctttacaactccattatctgcacccatgatcacaaccgcacgcttatctggatgcggacggtcatctctcataatccctgcgatctggaccaatgcttcttccagccagccaagacctcgcagcggcttacaaagtccatcccagtttttccaggccgcttccatcacctgtctgtcaatcggtgtgatttcttccatcttctgcttcagttctttttccagttccatcatctatccttctcctttgtcttactgctctacgatctgcacaacaaccttattgggcatgcagacgatcatatcatgttcctgatcgatccatcccgtgtgcacacagatctgatccgggcagtctgcatagagcatgtggaccgctccgtctttgatctccagccggttcccatctcccacatcaataactcgatcatccttaaggcttccgatctcctcattatccttactgatcatcacacaacttcccgtctgacgccccagcagcaaatatgcccctaagattcctgccgccagcaaaactgccgtcgccaggatccagtcatttcttttcatgaacgattccattactcctgtctgtactcatttggataaaattttaacatatttatagaaaaaaatctacaggcataccttcaaagaaaccttcctgtgacactgtccggattcttcgccacctgttccggtgttcctgctgccacgatccgtccgcctgcttctccgccgcctggtcccatatcaatcatgtaatcggcgtttcggatcacatccagatcatgctcgatcacaatcaccgtggcaccattgtccaccagtgtctgaaatacctgcagcagtgtgaatacatccaatggatgaagaccaatggtcggctcgtcaaacacaaagacagaatctgactgaccttttcccatctcactggccagcttcagccgctgtgcctctccacctgacaggctgggtgtctcctctcccagtgtcagatatccaagccccagcttttccagcacttccagcctctgatggactgtcttcagatccttggttgcctccaacgccatatgcacatccatctccatcagctgcggcagcgaatatttcttctttgctttattttcgtaaaagatctgccatgcttcttttttatatcgggtaccacgacactccgtacaaggaatgtccacatcaggcaaaaactgtacatccagactgatctcgccggttccgtcacagaccgggcaacgtaatgctccggtattataggaaaaatcgcctgccttataaccggcatttttcgcatcggctgttctggcatagaccttcctcagttcatcatgtacattagcataagttgctactgtggaacgaacattgattccaatgggtgtggcatcgataagcttcacatgagtaatgccttccgcctgaattgctttcacataagccggtaactttcctccactggtcaccgcctgcagtcccggtaccagactttccagaaccattgtcgtcttaccagaacctgatacacctgtcacaacggtcagccgtcctttgggaatatctacctccagtggctttaccgtatgaattgaatccgtagacagatgaatgattcccattgaaaacagttcctgctctgcggtctgttttcgcatctttgcatctgcctttcccgacaggaatggtcctatcatggatgctttattctctgcaatctcagggatggttccctgcgcgatcacatgcccgccgcctgcacctgcttctggtcccatctcaatgatccagtcagactccttgagaatctgcgtgtcatggtctaccagaagtacagaattgccatctgcaatcagatcatgcatcaccgcattcaatcccacaatattcgatggatgcagaccaatcgatggctcatccagcacatacaatactcctgtcgtacggtttcttacggctcttgccagctgcattctctgcctctctccggtagacagagtcgatgccgcccggttaagggacagataagaaagtcccagatccatcagtctccttgctgctgactgaaaagattcacagatacgctctgccatgggacgcatctcctccggcaaagattccggcacacctgccacccattccaccagttcaccaagcgtcatccggcaggcttcatccagactgattccccgaagctttggtgcccgtgcccgatcagataaccgacttccgccacattctgggcaggtctcttccttcaggaatttttccacacgtttcatgcccttttcatcttttacctttgcgagggcattttcaaccgtatagactgcattataataagtaaaatccagttctcctgcctggttactcttctttgctttataaaaaatatgctttttctctgccggaccatgatacacgatctctttttcctgatctgtcagatccttaaatggaatatcggtccgaactcccatctcccggcacacatccgtcatcaacgaccacatgagactgttccagggagccaccgccccatcatcaatcgacaatgtatcatccggcaccaatgtatcaagatccactgtcctcacacttcccgtaccgccacaccgcttacaggccccctgggagttgaatgccagttcctccgcggacggtgcataaaaatgcgctccacattccgggcagatcagctcagaaccagccgccacagcaagagttggtttcagataatgtccattgggacagcgatgactggcaagtctggaatacatcagccgcagactgttcagaagttctgttcctgttccaaatgtactgcggattcccggcactcccggtctctggtgaagtgccagtgctgccggaacatgcagcacctcatctacctgcgcctttgcagcaccagtcattctccttctggtatacgtggacagagattccagatatcgtctggaaccctccgcatagagcacacccagagccagcgaagattttccagagccggagacacccgcgatgcccacgatcttgttcagtggaacatccacatctatatttttcagattgtgcaccttcgcaccccgcacctgaatgcaggatggtgctgttgattcttctctcattatatttcacctgttgtcttgttttattttgggaattgcacaagcacttcccattttccgtaacgctttccatttgtacgacaaatgtagcctttttcctgtaaagatgacacaatacgttttactgtgctcaaagattttcctgtcctatcttttaattcagtttgcgtaatagtcggcttttccaacattgcctgaataacagccaattcctccaaagtacatttcaaagtgtcattttgaacctttggaactttagaaatgatactttgcggcacatattccacatgtaaataccgatttttcaactcatattctgttcccagaattaaattactgaaaaaagcttccagaaattttgttgttgcatggattccctgtttcaaatcattgtaattggctctcacaagcgcatttctaaagtaccacgaatgatccttaaatgcctcattttccacattcaaaccaaatgttttcatatatttgatgataaaaaccgcagttgcccttgtatttccttcacaaaacgggtgaatctgccagatatccgatgtgaacttagccagatgtcgaatggtttcacttaacgatactccttcataggaaaactgtttttccgtggaaaaatcataatctaatgtatcccgaatactttcccatgacgcataaataactgtatttccgttcaacacccattctttttttgtaatattataagttctgaactgacctgcatgagaaaatacgccgtcaaacagtctccgatgtatggtctgatattccgcgggggaaaactgaaacgtcttttctccaagaagttcagtaattctggcagatactatatctgcttcctctgtatccttttcaacttctttgcgttctgactgctcctcataatagctgtggatcctcttctgtgcttctttaatgtcgatttttccctcaatatggtctttggccgtattcaaaaggtaatcagatgttgtaagcccatccacttgctgaagcccaatagcgatctgccatgcctcactcttctcaacctgttcgggttctccctgacgaatatattcatttaaatcaagctgccatttcttcttttcgtccattcctgcactcctttatatcagaatcgcatattttatttattgtatcacaaaaacagcggcaggagaatgcccgccgccattcatttcgttcttaatatgcttttatgatctctgtaactggcatttcacagattcgctttaccggttcccgcattgccacggtcaccgttaaaagcaggaacactaccgatccacagcagaagcggctgctccttccagcactgccgatacctgaaagacactccgacgtccatacacttccttcacaccatccacttttcgaatattctcaaccatctgtgccggaatcttctcttcttcgtcactgaaaatatcaagatctgatgcagccgccgactgtgacatcacataattgaccacatcgatcagcacagaaaagctcaaaaacagaataatgctaagtgcaaaagaacccgtcagtaagatccgattctttctggcctgacgtgcatgccccatgccaagactcgtctcgattctgccccgtccaattttcataggacgccacaaggattccactgatgatccccagaaaactgattccaaagagtggaatatcggtaaattcttcgccaacgcagaatcttaagaccgcgcacagcatccacgtaacgatcattccaagtgcaagtcccatgggaatggctgttttgcaccagttcaaagcttccagtcgtacataatgccgaacctgccgcaccttctcgcaaaatgcaaaacctgtcccgtctggcagcgacacatccaacaccagcaggtcatatttgctttcactccacaaagcatccgcttctcttatagttctggcaacctccagctcatgtccctgcttcttaaacacaagagacagagctgtcaccagactcagatcatcttctaaaagtaatagtttgctcatcatatctgtcagtataacacagaatcctctcactgccgctcttctttagaaaactttaagagatttctaaaccgactcttaatagaatcctgtcatagtaatggaaatgatatccaatggaggaccaatctatgatttttaatctactttcagcatatatgagctttgacatcttttcggtatattcttttatctgctttattctgcccggttccgtgtggcttttccttaacagacaaaaaattgcacacaaaagataccgacagcggcatataatctggatttatatttatatgctgtattgctatctggccgtgaaaaaagttgccggaatcggaacaatctgggatttgatcagccatgaaaaactggattcaaccatcaatctgattccattttcatcagagggttttgccacttatattttaaatattatcatgttcatgcctcttggatttttgctgccactgatctggcgaagatatcgagaaatgggaagaactgttctcacaggtttttgtatgtctctgtccattgagctctcacagttgttttgtctacgggtaacagacattgatgacctgacgatgaatacactgggaaccgccgttggttttggctgctggatcgcatttcgctgcctgtttccgaaagcaggcaggaaagcaatcaaagtcagcagcgcagaacctctggtttatctgtttggtggcatactgggaattatacttttgtataactggcggatctttggttaagcagttttcttttctctgaaaatagttctgaaaatcaatcttaccagcggtccgcaatagaacatctgataacagatcgccatcgggaaattcattccccaggtctgtacccatgttccaaatgtctttgtatccttgaacaaaatagttgccaccaggctcatcagtgggcacatgatacagcaaatgcaaatggagatcgcataggtaataaactgcggtctgtcattcggtgtcatcactgtaaatgccagcattctggcaatctttccgacaacaaagaactccagcacaaatgcgattggcaccatgatcggcagttcatgaactgccattaaaaatgtctgtcctgtcacgcctcctgtgttaagtgctacattgtagacaaccattccgtacaccataatagtcgccataatagccgtgaatactacatcctgaaatttgttttttggcataaaaaatcctcctgatcataatgaataactgttttgcatttttgcatgtgttgttcgttatcatcccggaggagtgtgcgtttccaatagtaaccacaaaagctggtacattgtatcacactattttattttatgtaagacttaattttaattttttcaaattactgccccaccagtctttgccagcgtttatctttcttcaagaatccatagctttcttcattctggaaacatttcagtaaattttcttttaaatctgtcttaaattcatcacttgtttctttgaaatccatgtgttcgtacagtggtgcttttctgaattcaccaatgtgctccacgctggaaagcattttctccatgatagaaataactgtatccgcatcctgttccagtgttgccagttccagacctggagaatcctcataatatgctcccatttcaaagcaatgcgccaattctttttgcttttcaacgattcgatgtgctcttttccggtcattttcctgtaatgcaagcatatagattccctgaagttccacgctggccctcatataatccgaaaataaaagttcttcatatgccttgtatgcttcttccagtcttcctgtttctgcacaaatctgcgcttttttccgcttcttttcaggattttgcagcgacaaatattccagatatttctcagctttgttatactgcttctttcgcatatagaaattagtcaaagcatccgctgcctttgtccgaatattttcatccttgctgtctagtgtccgttcgtaccactcacatataaatttctcatatttttcctgctcagaaactccctgaaaaatcccctgcgcatcaaggattgctgcaaagttcaaagacagtggttcacagtttggatattgctccagcacctgcttcatccaccgaaaaacttcttcataagatttttctttcattatctgcgcagcctgctcaacgagatctatgatttcctgctccgtcagatcctcctgaaatgacagcagcgtatccagagagatgttcaataatctggcaatcggtgccaataatgtaatatccgggcaggaattttccttttcccacttattgaccgccggagcagtcactccaagtcttaccgccatctcttcctgtgttaagtttgcaagctttctgtatttccggattacttttcctatggtcatcgtccgttcctccctgtctgatccagtgttttctgttagaatcatcataacagacaggcagaggacacacaactgagctgttgttaaatcactgattagaaatttaactgatgttcatatttatttagaaattttagctccacccataacttctacaaaccagtccgcagtcacatccaacacatgttccgacatcgttttatcccctgataatacgttgaaaatgtggtctgcaccaggcaatatcagcatcttgctctgctcatttgtaccttctgccataatttctttcgtatgactacatggaacaatttcatccgcagcaccggcaactgccagcaccggacctgtatactttttaagcccatccataggagttgtgttttcaatctcatcaaagtacagtttacaagggactacacagggtaggtatctgacgggaggggttccgcccgtcagattttccatgtgatattcaagctgtcgcttgtggcggctatggtggt

SEQ ID NO: 2539 - DNA, 2529 bp, Unknown
  16S sequences of unknown bacteria
cgagattcgccttagtctcgtgggctcggagatgtgtataagagacagccccgggacagtgcccggatgctctttttatctgccaggccgaattggttgaggtacgactcaaacaacgccccgtcccaagtgggatacacaccgccgagcactcggcccacatcccgtgggtgcagcccttcgtagaaaaaacagtcctccagcaccacaccaatgtctgctttggcctgttccgcctcctgtcccagcagacgcacggtaccgccgtccggccgggccacgcccagcatggtttttatcaacgtagtctttcccgcaccgttttcaccgatcaggcccaaaatggcaccgccgggcagcgtcagattgacaggacccagcgcgaaatccgcatagcgcttcgtcaatccggaaagttcgattgcattgtgttccataagcactccttatgctccctcgttgtatagtgtctgcagcatttcttccatctccgccagcgataccgcaccgacgcgggcttcctctacagcctttgtcaaatgctcctccacccggcacagcacggcctcctttcgggtctcctgatcctgatgggccacaaagcagcccttgcccggcacagtggtcacaaacccgctgcgctccagctcctcataagcccgctttgtggtaatgacggaaatgcgcagatccctggccagcaggcggatggatggcagcgcttcaccctcgctcacctgaccggacagaatcgcccccttgatctggcggacgatctgttcataaatcggcacgccggaggcattgctgataataatatccatggatgcacctctgttattactgtgtatacactgtatctacagtatatattcaatatacacagttgtcaagtcccttttctttcctttacccaaaaagcggagaacggttctgcaggaaccgttctccgcctcaaaagagcacagcagtcgttcacaaacgctcctccggaaggtgatccgcctggccgcgcatgggacgatagactgtgaaatacatggtcaggatgcaaaccgtgccgccgatcagctgagacaccgcttcagcggcaaaaacgccagtgatgcccatccacaggggcagaagcaccgtcagcggcgcgttgatcaccgcttttcgcagcagggagaaaaagatggcataacgagaccggcccaagctgacaaatacacactgccccgccatctgcagcgataagaggacatacaggcaaaagtagatgcgcagagccggaatgccggccgcaattacatttgcctccccgctgaacacgcggatcagcagccccggcagcagcatggccgcagcccagaaagccgccgaatacagcacagtgagcgatacgctgaaacggatggagcggcgcacccggctgtacagccccgcaccgtaattgtagccgatgactggctgcgcgccgttgttcaggccctggatcggcatggtgaacacttcccgcagggaattgataatggtcatcacaccaacatacagatccccgccgtagcgctgcagcgtagcgttgcataccacctgcaccaggctgttggtcaaattcatacaaaagccggacagccccaacgcaacaatgcgccgcacacggccggcatgcagatgcaagaatctgcggcgcaggcgcagcagggcttttggcccggtaagaaaccgcagcacccagagcgcggaacaggcctgcgcgatcaccgtggccaaggccgccccccgcactcccatattcagcccaaaaataaacaccggatccagcacaatgtttacaagagctcccagccctacagtcatcatcccagtgcgtccaaacccctgcatgctgataaatggattcataccaagcccgatcataacaaaaatcgaaccaagcagataaatggtcatataagcgctggcatacgggtaagtggcgtcgctggcgccgaacaaatacagaattggtcgttgaaaggccagaaacactacggtgaccgccgcaccgaacagcagcaggagcgtgaaggaattccccataatccgctccgcctcttcgtcgtccccccggccccggcagatggaacacagcggcgcgccgccggtgccgcacaaattggcaaatcccataataatcgagacgaccggcaaagtcagccctaccccggttaacgccagatggcccggcaagcggcccagatacatccgatccaccacactgtagagcacgttgatcagctgcgccgccgtcatgggggcagccagataaagaatattgcgggcaacgctgcccttggaaaaatcatgctgctgtgtcacgttgaatatccctttctatctgctgtttcctgccttgcaccctcactgctgcttcgcccattccttcctccggcgcagatccgccgtacccaacggcagagcgtgaacgatcagatacggaaccgcttccatagcgttcatggccgcctctttccctcttgcttttttgaccgcaggcatacgccc

SEQ ID NO: 2540 - DNA, 12566 bp, Unknown
  16S sequences of unknown bacteria
gccgccgttcatctcgttgccgctttcgtcggtcacgggcccgccgccgttctctgtcgtttgctcttttttatcatcaggcttaaacttatcccaactcttaaaaccgtccgaaagaaacccgaccaatgccgccgttcccgctattacaagcacaagcagaacggcaagaatactgttccacactttgcttgaattgtttttatatgccattttcttttacctcgtttttacctgttcaccgtgaccgttacttgccccgcatagccgaggacttccgtcaaatcaactttgccgtcatcgtctgcggtgggagtaatgacgattttcgctgtttccgcattttcgggaattgcgcttccgtcaaagtctttggaaaggctttccgttttcgatataaattcatcttttgcgccgtagaagtacaaagtgtacgttaccgtcgcgtcgtccgcgatttcgactttcagtccgtccgttgtgactgcattgcgcgttacaatggaagtatcgccgtccgtcttttcgccgctatcgccgagtgtaccgattatgtactgttccgcgccgatttccgttaccgtcgtttgtctgtccaacttcacgaacagcgttaccgtagtagcgacaagtccgatgatgagcagaaacacgataacccatttcaccatatccgacgctttatgtttgcttaatgccgattttgccattttccttttcacctcttaaaattattttttctaccctcgttcgggtattcttgcttccaaaccgtccaacttcaagccgcgtaaaccgactgcgtaataatctgttccgtcatgttcgatatgcgtttttacccaactcccgcagatttttatttctacgggactgccgcttgtcaattccgtccattcgtccaatgcgaaacgcttgcattcgtttttatacaacggctttcctgttttcgaattatccatttgttacctgcctttacgctgttctttttggctgcgcttatattcggcgtttatcttgtccgcgccgtctttcaactgctttgcgcgccgtaaactgaacaaagcgctttctttcgcttttgccgccatttcatacgcggtatctacgtcgctttttgtgattttgcgccttgccattacttttacctcttgccaatagaactgccgtcaagccgcgctttcaagccgttgcgataaccgtaataaacaaccgcgtccgattttgtcatatgcccccgttcacgctttatttcggcactaattgcgcgaaaattattttccgcgtgagggtcattgtatccgtcaagccaatgccgcgaataataacgctgattatcagacaccgccgaactcgacgcgcgttttttgtgataatttacacgttccgcaaccgaatattttcttcgcttctttgccacttttatacctcgctaaaaattttttgtttgatttccctgtacgtttctttcgttgcgaccaaggaaaatttttctttcggaccgcaacaacaaaaactttccgtttcaatcaatgcacaaccgttttcaagttccgctatcgaacgtatgccttgcagaggaagtaaaaatctgatgccgtcatgaaaatctgtcacttcgataaaatttttcatttcgttcaccccgcaaaagatttcaatatcgggggaagcccggcgaactcgtcgaacggttcttcatcggcggcagggttacgcaagttctcgatttcctgcaacagcatttcccgttccgcttccaaatcgattatcttgtcgcaaagctcccgctttgtccatttctcgaaacggagatacttttcttcctgcggcggttcttccgcttccggcgtttcctcgtcgttctgttgcgacgtcgcaacaagacttttcttatactcccgtatccgctttatcgtccaatcgggctttatcggcttgcgttgttcggacgttaggggcagcagttcgcaaagctgcgaataactatatggctcccattcctttttgaaaccgcgcagcccctcgccgaactcgtccacgatattcatgtaacggcttacctgcgttttgtccaagccgaactcgtcgtaacaatacgcgaaaaaacattccgcgctgcaattatcgaccatacacgaaacacctaacttttcacggtcaaacgtcaaccgatataaattgctcgaatataggtcaattaaatgaacgccgagccaaaagaagtttgttttacttgtttccaaatcttcacggacttttgcggcgtaacttttcaatgcgttccattcttccaaaccctcggcgccgtaacgtcccatagaccgctttgccttaaaatcaatcatatctcacctcgtaaaacaaaacggggctgtttcattcagttttccccgattgaaacaaccccgatatttccttttatgctttcgcgcccgtctgcgccgctgttgcttcacgttcagccacaaaccgcagatagcggatatagttttccaatattgcccgatcgctcggtctgcgcgttgtcagagggaaagtccactcgaaaccgtccttttccacgaccgctgaatacgtccaatactttgttaccttgcccgtattctcgtcgaaacgctccgcttcttccgctcggaaaagaactttctttacgccgccgtcgaacagctgttccaacatttgataacccgcgacgtccttatcgccccgaactttcaacccgacttccgcgacctgtccgcagaatacggccgggagtacatattcccaatatttcttgccgtccgatttgttggtatacggcctacggtagatatacagtgcgggcagttctgctttcgttttcttttccgttgcttcttccgtgtcgtttccgttcaaacccttctcgaaagctgcttccgctacacttactaccgtttccgtccgttcgtcctgctttgccgcttcaatcccgttcacgttcatctcttcggctttctgttcgttctcaactacattctgttctgttcttgccattttgctgctgtttctcctttgcgtatggccgccgccaaataaaaataacgtgttaaaagtggataacccctttcgggttccaacttttaacacgtcaattataataaaacaggcgaaagcgcgtgcaaaacgtttgactattcccgagaaattttctacaatagataaagcaaggtccgtacgccgttcgaggtaaatcgatcggcgcgtcgggcgcagtagcggcgttttatatgccgtttgttttaccgattgcaagcccgacggaacgtttcgggcgacacaaagcgactgtattattggaggtacacatgataactcacggcaacgagatcaaacttttcgccggcaattccaaccgccctctggcggaggcgatcgccaaaaagttgaacacggaactgggcggcatcgacgtaggccagttcagcgacggcgaaatcagcgtgcacatcgacgaaacggtgcgcggaagggatttgttcatcatccagtccacgtccgctcccgtcaacgataacctgatggaacttttgatcatgatcgacgcggcgagaagggcaagcgcggggcgtatcaccgccgtcatcccttatttcggatatgcgcgtcaggacagaaaagcgcgttcgcgcgatcccattacggcgaaactcgtagccgacctcatcaccgccgcgggcgccgacagggtgctcaccatggacctgcacgcggcgcagatacagggctttttcaatattccgctcgatcatctgctgggagggcccaccctttacagttattttaaatccaaaaagatcgtggacgaaaacttcgtcgtcgtatcgcccgatatcggcagcgtgtcgcgtgcgagaaacgtggcgtccaaactcaactgcccgatggcgatcatcgacaagcgccgtcccaaggcgaacgtcatggaggtcatgaacatcatcggcgacatcgacggcaaaaagtgcctgatggtcgacgacatgatcgataccgcgggtaccatctgccagggcgcgcaggcgctcgccgaccacggcgcgaaagaagtgtacgcctgctgcacgcacgcggttttaagcggtcccgccatcgaacggctcgccgcctcgcccatcaaggaactggcgattttaaacaccatcgatcttccccccgaaaagatgctggataaattcaaggtgatctccgtcgcggatatctttgccgcggcgatcgaaaacgtatatcttgacaaacccatgtccaagatctacgactgacatagaatttccgaaaaaccgcttttgggcggttttttttggataagaggacgaaattatgtatttaatcgtgggactcggcaaccccgaggccaagtacgaaaccacctttcacaatatgggctttctcgccgtgggcgatgctgcggaaaaactgggcgtgaaattcaaaaaaaaggaatgcgaagcgtcggtggcggaggcgttcatcggcggagaaaaagtcgttctcgcccgtcccgtcacctatatgaacgccagcgggcgggcggtcaaacaactcgtttccaaatacaagatacctttggaaaacctcatcgtcgtctatgacgattacgatcttccgaaagggcatatccgcatccgcgcgagcggcagcgccggtacccataacggtatgcgcagcatcatcggcgagttgggcacgggcgaattcgcgcgcgtgcgcgtggggatacgggacgaagaagtcgatatccccatcatccattacgttctgtccaacgtgcgaaaagaggattatcccctgttcgcgaaggcgtgctcgaacgcggcggaggcctgcattgcgtttgcctcgggcaagggcatcgagcaggtcatgagcgaatataacggcaaataaaacaagaccctgcaaacgtattttccgcggcgcgtacctcgtgccgcggcgcttggggttacgggagtttttatgatacgcaattttttcacggcagaacaactgggtcctgcttacagcgaactgaaaaatgatctccgcctcggcacgccgacggcggtgtacggcgtatccgctccccacaagtgcctgatcgcgccgctttcgtgggaagggcggctcgtctacataaccgacaacgcgctcagcgccgcctcctgcgccgcgcagatcgcgggatttacgggcgaagagcccgcgctgttaacggcaaaggacgaggtccttttgtataaggacgccgtttccaaggacgcgctgttcaagcgcatcaacgccctgtacaagatccaaaacggcgcgcgcgtcgtcgtatgcgatatcgagagcctgctgcaactctttccccgccgcctcgaatcgctcgcgttggtcgtgggggaagaagtcgatttttcttccctgcccgaaaaactcgtgaagatgggttatacccgtgccgcggcggtggagagtaagggaacgttcgctctgcgcggcgatattctggatatttttcccgtcaatgcggaaaatcccgcccgcgtggattttttcggggacggcgtggaaaagataaaaccttacaatttcgtcacgggcgaacggctcgcgcaggccgaatttctcgatatcgtcgccgcgaccgacgtcacgataaacgaaggggaaatttccgagatcaaagacgttcttttcgacgaattgtcgcggatccgcgacgcgcgcgcgtatgaacgggcgcagaccatcgtgggggaactgtgcgccaaactcgaagcgggcgcgtccttcgcgggcgcctcttttttcctgcctctgctcgcctgcggcgtggattttttcaattttctgggcggcgacgctctctttgtgtatgacgagagcaaactcgtatacgataagttggaggcgatatacaaggagcacgaggagcggttggcaaatctgatgctgggcggcgaggcgttttctttttcgcgctatcaactcgcggataaacaggattttctggcggaacttgccgcgcggcgctcgctcgcgttgcagacgttcgcttcccgcagttactttttcgagccgctgaaaacgtataactttcattcctcgcccgtgggcagatatctcaacgggttcgtcaatctcgtcacggatctgaaaagttggcgcgccgacggttaccgcgtcatgctctattgcggcaattcctcccgcgcgcagaaaatgcgcgaaatgctgtccgacgagtatatcgacgcttccgttctgcccgaaaaattgtccgcgttcaagggtgtcgcagtgctgcaatcggaactcgggcacgggctcattctgcacgagaacaaactcgtcgtcatcgggacgggcgatctgtacacgaaatcgcccgtatccaagcgcatccgcagaaagagaaacgatctgtttacctcgcccgagatcggcgattacgccgtgcatgaaacgcacggcgtgggcaagatcgtcggtacgaaaaagatcgaaacgacggacggcacaaaggaatacatcgccctcgaataccgcgggggggacgttctgtacgtgcccgtcgagcagatggacattctctccaaatatatgggcgaggacagcccgtctttgagcaagatcggcggcgcggagttcgaacgcgtcaaacagcgcgtcaaagcgtcgctcaaagcgatggcgttcgatctgaaacagttgtacgccgagcgctcggaaaagcacggattcgtgttctctccttatcccgagatgatggaagagttcgaaaacgctttcgagttcgaagaaacgcccgatcaactcgcctccgcggaggagatcaaggcggatatgtgttcgcccaaggtgatggaccgccttctgtgcggcgacgtcggatacggcaagacggaagtcgctttccgcgcggcgtatctttgtatcctcaacggcaagcaggcggcgctcatgtgtccgaacaccatcttgtgccaacagcatttcgaaaacgccgtcaggcgcttttcgcccttcggcgtaaacgtggaagtgctcaatcgtttcaagagccccgccgagcaggataaggtgctcgcccgcgtcaaaaacggggaggtagaccttctcatcggcacacaccgcctgctctcgaacgacgtaaaattcaaagacctcgggcttctcattctcgacgaggaacaacgctttggcgtagagcataaagaaaagatcaaaaacatgaagaacgacgtggactgcctgaccatgacggcgacgcccattccgcgcacgctgcatatgtcgctctccggcatccgcgatatttccaccatcgaaacgccgcctacgacgcggctgcccgtccagacgtacgtggtggaggaaacggaaacgctcatccgcgacgcgtgccttcgggaactcgcccgcggcgggcaggtgttcattctttataaccgcgtggaaacgatcttttcctttgccgccaaaatcaaggagatcgtgcccgaaggcaagatcaccgttgcgcacgggcgcatggacagggaggttttggaaaacggcatcctcaaattttacgaaggggagagcaatatcctcatttccacgaccatcatcgaaaacggcatcgaccttcccaaagccaacacgctcatcgtcatcgatagcgacaggctgggcatttcccaactctatcaattgcgcggcagggtggggcgcggcgcgctcctggcgcacgcgtatttcacgttcaagcccgaaaaggtcatgacggaaaaggcgggcgagcggctgaaagcgatcatggaatttaccgaactcggttcgggctttaagatcgccatgcgcgatctggagatccgcggcgcgggcaatgttctgggacgcgagcagcacgggcatatggacaaagtgggctacgagttgtacgcaaaacttttgaaggaggagatgacgggcgtcgaacagacggtggcggaactggatatcaaggcggacgcctatattcccgaaaagtacatcgaggcgagcgcctcgcggctggattgctacaagcagatcgcggagatccgcggcgtggaggattacaaacgcgtctgcctttccatcgaggaaaattacggaaaactgcccaaagaggtgctcaatcttttaattatagccgtgctgaaatcgtacgcggcgaaactgaatatccgcaagatcgccgtcagcagcgcggggggcgagatcgtcctgccctcggtgcaaacgctcgcggacggtaagttttccgccgcgctggacgcgtttgcgggaaaggtgcgcctcgatatgtccaaaaatcccgcggtcctgttccgccccgaaagcgacgcgcagaaactcatgctttccatgacgaaattcttgaaatccgccgcgggcacggcgctttgaaacgcaaaatatcgtaaatgacaaaattttaacgagtttttcatcaaatacgattgcttttcatctcaaaataatatataattgtttatattgcgatttaacggaattcggagtagattctatgaagaaaaaactgatcaaaattttaactttaatcttggtgacggcgtttgcgctgggttgttttgcggggtgtcgtatcattacgaccgataaccgcaaggacatggagcaagtggtcgccgaggtgaatatcggcaaggacaagaccgcgctgaaggacacgtttgaaagcgtatttttcggagaggattttaacctcaccgacgaggacgtggataaaatcgtgactaccgcggaagtttccaaactcgatctcgtttcctatttcatcaattacggatacagcatgttgcagtcgggacaagcgtcctcctatgcagacgtattcgaaacgctgatgaattcgctgaccagccgtaaaatgatgttgcaattcgcgactttgtactacctcaacgcgggcaaagtagtcgtcgatgcggacagcgttcccgatgatgataaagagggcgcggtcatcacggacggaaccatcgagatcgtttccgacatcagtgtagaaggctatctcaaagcggcggacaagagcgaaaacgacgcgctgagatatctcatttccgataacaattacaattatgcgctgtacggtttgcgccagagcgtgaacaacgcgctcgattcttacgaaaaggcgatcatcaaaaacgaagacgacagttcttcctcttcggaaacggacagagccatccctacgggcgccgatacggaagaaacgaattcctatcccaagaacgctgagggcaacgtcgactatcagatctatacgggctacaacaccgcggacgaatgcggcgaatacgagaaagtggagggttccaccgtcgtaacccgtaaaaaagcctataataaattcatcaaagcgctggaaaacaactacatgctcggcgaagaggacgatatcaccgacgttgaaaaacttccttacttcgccaccgaaatgaagaatcaactcgaacagatgatcatcaacaacttcagcgatacgctgcagatctccatgacgagcgcgatcgaggaagaaaatctcggcaaaaaatataacgaaatcgtcaacggacagaaatctattttcacgagcgtgagcgattacacgactgcgctcgacagcgtatccgacgacacgttcattttgtattccccgcagagcggattcgggttcgtgtacaacactctgctcccgttcagcgcgggacagtccgacgcgcttgccgactacaataacagactttccaacaatgtaatcaatcagtccgaatattattattacagaaatcaactcttatccgaggtggaggcgaccgatcagcgcgcttcctggttcaacggcgcaaccgattacagttatcaggcgactggcgaaaattatttcggaaattccgattatctcttctttgaagacaatgcgggcaagatcgataaatacgattcttactacgcttacaacggaaaagttaccaaaaacgacgacgatacctacacgctcgaacccaaccccattaccatcgacggtttcatcactgaaatgcagggttatttggattttgtgctcggaaaaaccggcagcgtgacgggtagcaagactgccgatttctacaaagaacagaattattataagacggaaaacggcaatcaggtcatcgactattcaaaactcgtctactataagggcaaggtgaacggcgtatcggaggtttccaaagacaattattttgtgaaggacaccgtcgcctataaagcgctctccgcaatgaatgctttgcagttcgcttacacgaccgataccgcgatcctcaataaatatctcggctattccgtagcgggcaagggcaattccaccagttacgtgaaagagttcgaatacgcggcgcagactgctttgcaggaaggggcgggtgccatcagcatcgtcgcgaccgattacggctggcacgttatttacgtgacgtacgtcttcggcgagggcaacacctatcaggatttcaactttgccgaccgaaacaaagagggcacgttctcgtatcagttctacaatgcttataagaacgtcatcgccgacgattacgcgacgaccaaacagagcgaggtgacgaccattctccaagacagttccgtcaccgtatacaaaaaccgctacaaagatctgagcaatctcgatcagtaacaaaaaaataaaaagcgccgaaatttcggcgcttttttgattgccaaaaataaaaaaatgttatataataattacgctgaatgcgggagtcgcctaatggtatggcgtcagcttcccaagctgattcccgcgggttcgattcccgtctcccgctccaaaaaaaatcggttaaacatttgttttgaccgattttttgttgtttttaaggcgttttaaaaccttgccccaattttattgcttaaacacttgacaggaagcatgacaaagaagtataatagttgtatatcaaacaatttggcgtcgaatggagatgaaatgaaaaaattgatcggggcggaagtcaagtcgctgcaaaatatggtatcgcggcatatcgaaaataaagaaaaggagatggggaaagaccgcgtgtccgcaccgaatttattcatactgaaatttttacaagaaaatgaagggaaagaggtattccagcgcgatctggaagaggttttggaaacgacgaaatcgacttgttcaaaggtcatttcgacgatggaaagcaagggatttctgaaacgcgaatcggtagcggacgcccgtttcaataagatatctctgacgccgctgggcagagaaatcgtaaagaccgcggacgtgcatatggaagaattcgagtcgaaattgaaaagaggattgaccgacgagcaattggaaacctttttttattgtattgaaacgatgaaaagaaatatttcgcaaaaataaattttaccgtcccgaaaggggcggaaaaaaacggccatattgtttgatataaaactatttgacgtaaaactaatttaggaggagaaaatgaatacggtaaaatatttgctgcgttctctgcgggaaaataaaaaagccgcggtactgagcatgagtttcgtaactttggaagtcgtctgtgaatgcatactgcccttcgtcttggcaaaactgatagacagcagcggcgtggagtggaaaagtttattgctgtacggcggcatacttgcggcgcttgccggggtattgctcgcgtcgggaatattatcgggaaagttctgcgcgcgggcggctgcgggattttgcgcgaatctgcgtgaagatatgttcggaaaagtacaaaattattccttttccaacattgacagattttccgcttcgggattggtgacgcgtatgactacggatataacgaatattcagaacgcgttcagcatgatcatccgaattgcggtacgcgttcccctgatgatggtgttttcggtcgtgatggcgtttgcggtaagcccgtcgctggcatggatattcgttgcgtgtatccccgtgctcggcgggatcatagtcctgattttattgaaatctttcccgtatatgacgcgggtatttaagaaatacgacagactgaacgcatcggtgcatgagaacgtaaagggcatccgcgtcgtcaagacctatgtgcgcgaagagtatgaaaatgttaaatttgcgcgcgcggcggacgacgtatgcaacgattttgttcgcggcgaaaaaattatcgcatggaacacgcccgccgtaaacctatttatgtacgcctgttacatcgttatttccgtgctcggcgcttacgtcatcgcggggcggctgccttggggcagtctgactacgggcgaactttcttccctgatatcctacggcatcaatattctgtccgcactcatgatgctgagcatgatcatcgttatcatatccatgtcagcggcgtccgcacaacggatcgcggaagttttgcgggaagagagcgcgatcataacgcccgaaaaaccgatcacggaaatcgaagacggcacgatcgattttgaaaacgtatattttggttattcgggcg

SEQ ID NO: 2541 - DNA, 7502 bp, Unknown
  16S sequences of unknown bacteria
cttatatattaaggcacaaggaacaaggctgataaatttaggattggtaagctatatccgcgagtcgttagaggaaaaatgaaaacgaaattatgcgcgctcttttttatgtttcttttacccttactttccgcttgcagcggaggggaaaatttgcctgaacggaaaccgtattctttaaaattggggacctatgaatttgaaacggctactttgacaaacatattcaccgaagaggtggaagaaaaaacgtccgatgaacttattagcgcttcctccgaagaatgtgtgaaatggaagtttttgggcaacttttccgtcacgatcaaggaagacactgaatttatttacacgaaggacaatcgctgcgtggtgctgaaaggaggtctggcgtttgaacttatcgcagaggacacgctgcaagtccatctttccgcttggcgcacctatgacctcgaattatatgatatcgttatcgttttagcttggggaccgcgatattgctgacggggaacttttctatgaaaacgtgttgttttataggtcatcgaacaatagagcataccgacgaattaaacgggaaaatcgaaaaagcggtagagcgtttaatcgcaagcggcgcggcaatattccttttcggcagcaaaagtcaatttaatgatttggtcttgaaaatcgtaacgtctttgaaagaaaaatacccgtttataaaacgggtatatgttcgcgcggagtacgagtttataagcagggagtatgaaaagtatctcttagaaacgtatgaagaaacgtacttttccccgaatgcccgccatgcgggaaaactcgtttatataaaaagaaatcgggaaatgattgataaaagcgatatttgcgtcttttattacgataaggaaaacaggaaagcgggcggaacaaaaatcgctttcgaatacgccgtcaaaagacaaaaaacaatcgttaacattttagagtaacgcagggaagccgacggccttttcgtcggcataggaaaaaaggggagggagaacaaaaaggcagatgcagagagaggaaacggggaaaacggacagacaggcgcgcgggagtgcaagtggcgaacggaaaagcaagaaaaaaagggggcacgtaaagcctctctttttgcgataaacttgcaggacaaaatttccctccgacgcgctgcggacaaatttcataattatagccgccgtttggagcgtcgattggcgccgtcaagcttatacgttgaatttgataacttattcgtcccactcttttctatttccgtcaatctaaggcaagctcccgacttatccgtggcgtggggatttgttgaaaaattaaaaaaggagagcaaaattatttcgctctcctttttctttgccttgtaaagttagatcttcacgtgtgaagcgtatatattttactgtccttaatggttaaataaatctttaaattcttttacttttcgctgatcattgattgagttggatattaccctaaaatcttcctttttaatttctgcttgaacgcaaatatcctctcctgtgaaaggatgaaagaagtccgctaaaacaaagcctcgggttttaataaaattatctacaaccacgccaataaatccgctttttaagttatagtgaatatagttatcgtttaataaaataatcgcatccattggctcgaccaatccattattttgatatttattcatgccattttctcatgaaaattaaatttttaatctacatccttatagagaggatttgcaaaaaacggctactttttcagggaggcaagatagaccatgagcacggaaacgtcggcgggattgacgcccgagatgcgccccgcctgtccgagattcaaagggcggacgcggtttaatttttcctgcgcttcgaggcgcagacccttgatttgcgaatagtctatatcatcgggcaggagcttgtcttcgagccgtttcgcgcgctctatctgttcgaggccctgtttgagatatccctcgtagcgcacggagatttccgccgtttcgcgaatgtccttgggatattcgaaaaacgctccgaaatagtcgcaaacgtcttttaacgggatatttctctttaacatatcggcatacgaaacgctgcccgcgggcgcgtcgtagccgtagcggacgatgaattccgccgcgtctttgggggacacgcgggcgcggagcgcctctgtcaactgctcgtaaatttcttttcgccgcaaaaacgcgcggtagcgttcctccgtcgccaatccgcaggcatatcccttttccgtgagcctgaaatcggcgttgtcctgtctaagacaaatacggtgttcggcgcgggaagtcatcatgcgatagggctcgtcggtgcctttcgtcacgaggtcgtcgatgagcacgccgatatacgcctcgtcccgccgcaaaataaagggggggagtccgcgaagcttcaaggaggcgttcaggcccgccatcagtccttgcgcggcggcttcctcgtagcccgacgttccgttgatctgccccgccgtgtaaatcccttctatctttttaaattcgagcgtgggcaggacgtccagcgtatcgatgcagtcatattcgatggcgtagccgtagcgcacgatgtccgcgcgttctaaccccgccacggacgcgtacatggcgcgctgaacgtcgtgcggcatggaggtggataagccctgcgcgtacacttccagcgtatcctcgccctccggctccaaaaagatctgatgccgctgtttgtcctgaaaacgcaccactttggtttctatggacggacaataacggggacccgtcgagcgaatggtgccgttgtagaggggagaacgttcgagattttgcaaaatgatttcgtgcgtctttaaattggtgtaagtgagatagcagggcaccttatttttcgggggcgcgggggagaggaaggaaaaaggataaatgtcctcgtccccctcctgaatctcgcatttttcgtaatcgacggtgcggccgtctaacctcgcgggcgtgcccgtcttaaacctgcgtatcttgaagcccagctttcttaaattttcggtaagaaacgtggcgttcgaaaaaccgttcggacccgattttttcaccaccgcccccgtgatcgtttcggaattgagatatacgcccgtgcagatcacgacggcgcggcagaggacgacgccgccgtgcgtggtcctgacgcccgcgcatttgccgttttcgacgagtatttccgaagcttccgcctgtaaaatgcgcagattcggcgcgtgttccagcgtctttttcatttcgcggtgataggcgtttttgtccgactgcgcgcgcaggctttggacggcggcgcccttgccgacgttcagcatccgaagttgcagggcggtcttgtcggcatttaagcccatttccccgcccagcgcgtctatttccctgacgaggtgccccttggcggtgccgccgatggagggattgcagggcatgaaaccgatgctgtcgagattgagcgtcagcatcaccgttttcagtcccgtgcgcgctaacgccagcgcggcttcgcagcccgcgtgtcccgcgccgatcacggcggcgtccgccgtatattcgataaattctttgatgttttccataacgaccgtaaagagtgtttctgcgcggcgcggcggaacgttttttatcccgttccgccgccgcaagtataaaagagtgtaaacttccgaaaaatagcggaagggggcgaatttttcctgtcctttcgtcccgcgccgcccctgcgcggggagctttttccgcggtgcgcgccccggcttcacgctcggcggaaaagcgagggcgcaaagatcattgttttaagatgatgtttttaatatcgtccacttctttcgccatcttttcgttgagcttgatcagttcgtccactttatcgcgcgaatacatgatggtggtgtgatctctcccgcccatgatattgccgatggaaatgaggggcaatgtgagcatttcgcacatgaggtaagcggcgatctgcctcgctttgacgaggtcggctttcttgcccttgccgagcaggtcttcccgcttatatttatagtagccgcagacggcggagaggatagaatcgggcgtgatctcgcccgtgctctggctctcgttcaccgattcggaaagcgctagtttcgcaaggctcaaagagatcggctcctcgtgcagcttgcttgcaaacagcaccttggtcagcctcccttccagcgttctcacgtcgtgccccgaatcgttggccaaaaattccagcacgtcgtcgggcatggggcatttgcgctccaaagccttgcgctttaaaatggctatcttcgtttcgaggtcgggcggctggatgtccgcgatcagcccgccctcaaagcgggtgcgaagcctctcttccaaagtggcgatttccttgggcggtcggtcggaggtgagcacgatctgtttgttctgcgaggacagttcgttgaaggtatggaaaaattcctcctgaacgcccggtttcttcgccagaaactgaatgtcgtctatcatcagaatatcgacgttgcgatagtgcagacggaatctcgctcccttgtcccgcgaggagatctttcccgagatcattgaatcgataaactcgttgaggaagttttcgcaggtggtgtagagcacgcgcttttccggcgacgccttggcgatatgattggcgatcgcctgcacgaggtgggtcttccccaggcccgattcgccgtagataaagaggggattgaagctttcgcccgggtgttccgccaccgatttcgccgcggcgtatacgaatttgttggaagagcctacgacaaaggaatcgaacgtgaaatttttgttgacgggcacgggcttgaaatcgtccgcgacgtcctcttcctcttcgagcgtgtaggtttcgctcccttcgacgaccagcctgaaatcggtgatgccgctgtcgcttttggaaatggcgtcccgaagggaaacggcgtgctttttcatgatggtgttggcggcgagttcggtgggggctttgaggtagatgcgccgattgatgatatccacgggttcgaggtcttttataaacgcgttgaaagaaacagggggaatgattccctccgctttgtcccgaatttgtttccataaaaaggtgatctgcgatttttctgccattttccactccgctccaaaattattttccctgaatcgggcgcgaatgttttgtctttttagaaattatttgatataattataatacaaaatcgaaggaaaagaaagtattttcggcgggtttttcgaggattatgcaaataaaaaatttgtcccttcaaaatttcagaaattacgaaaacgaaaaattcaccttctcggaaggtctgaacgtccttttcggaaaaaacgcccagggcaaaacaaactgcgccgaggcggtcttttacctctgcacaggcacttcccttcgcattcgccacgacaaacaactcatccgcatcggagagccgtgcgcgaaaatctccgccgaggcggaaaacagatacggctcggtcaccatcgaggcggatattttcgaggacaaacgcgaactgcgcgtcaacggcggcaaaatcacgaagaacgccgatctcatgggacatatcaacagcgtattcttttcccccggcgagctgcgtctgattcaggacggacccgacgagaggcggcgattcatgaatatgtccatttcccagacctctcccgcttactatacggcgctccttcgctataataaaatcctcgatcaacgcaacgtgcttttgaaaaaccgcgacgtcgaactcattttggacacgttgcccgtgtgggacgaacagctttgcaaatacgcggcggtcatcgtccgaaaacgcgcggagtttttggaaaagctggcgccttacgccaaggaactccacgcttttttgacggacggcgcggaagaactcgtcatttctcccgaaaagaaatacgagggcgaggaaggggagattgcggaaaaactaaaaaagcagctcggccgcaactatgaaaaggatttgcgtttgggcttcacgacggtgggaccgcaccgcgacgatatcgactttttcatttcgggcaaagacgccaaggcatacgcctcgcaggggcagacgcggacggcggcgctctccgtcaagcttgcggaagtggagattttccgcgagctttcgggggaataccccgtgctcattctcgacgacgtgatgagcgaactcgacctgccccgccgcaagaagctcttaaagcgcatcacttccgtacagaccattctcacctgtacgcacgcggagcgggtgctgtacggcgcggagtgcagaaagatccgcatcgaggacggcaaaatcaggcgggacaaggaggaacagggcgtatgacggaaaaaaccgcgggggcagggttgagattacggacggatctgcacacgcacagcgtctattcggacgggtattacgcccccgaggagctttgtcgccgcgcgaagaataacggcgtacagcttttgtccgttaccgaccacgacacgatgaacggcgaggaggaaaagcgcgccgccgccgaaaagtacggcatcaggtacgtttcgggctgggaaatttccgcctatgcgggcgagagcaaaatacacgtcacgggctatcgctgccaaaggaacgaagcgtatctgcgctttatgaaagagcggcgggagcttggcatggagcgcgcggcggacagcgtgaagaaactgcggggcgcggggatttatctctctttggaggacgcgaaggcgcggcgcgccgacccttcctcgcccgtgcacaccatgcacatcgcgcaggcggcggcgttcgtttcgggcaaaacgccgggacagatttacgaggaatacctcgcgcccggaaaaatcgcccattcgacgctcggccgccccacgcccgaacaggcgatcgactgcatccacgccgcgggcggcgtcgcgagcatagcccaccccggtcggatcacgctttcgtttgccgagcgggaaaagatgattttatcgctcgcgaagtacggcgtggacggtatagaagcggtgtatacgacgcatactgagaaggaaacggagtacttcaaggcgctcgccgaaaaatacggtctgctcgtcacgggcggttcggatacgcacgtggaaacggacgatcatagaatcggcagtcccgtcttttatccttctgagcggctgttaaaggcgataggcgtcttgtaagccgtgtattttcggtgaacgcttccctgccccgcacggcgggcaaacgggatacatacatagcgaggggcgttcatgaggaaaagaaaatcggatacggcacgttttttcgcaccctttttggcgggtgcgtttttattttttgcggcgccgacagcggcggtaagggcaacgacgcccgcggtctgc

SEQ ID NO: 2542 - DNA, 14699 bp, Unknown
  16S sequences of unknown bacteria
tgccatcttgttgaatgtaatcaatattagcagaaaatgcttgccctttccgcccagttttccgtactctgtagtaactgaatatcacatgaggcattgtaggatatttcttatcctctttgcctctatctttttctaatctttttgattcttctctttgcccgcattttttcctcatcccactgagtttgacgaagagcgaaataaattttagctatagtttattatatctttaatcgtttgggttgcagagtctttagcaaactcgaaatatcgtgtaggcctttaaatgttcatagggaagttccctcttcctagttcaaattttttcaaatactccaatatatagtcctatagactcttgagtaaataaggcttccgacggaatatctgaaatataaattttatgatagatagaattttgtggcggtagtttatcgtcgaagttttttattcggcaatactgctgatgcggcaggaagttttgggcagtgcataatagcttgattacggaaagttttctagcttgagaaatagttgattacattacgccagttctgtactattgaatagtctgccaggacaaatatgtgtctcgaaaagaacaagctcggatttttcggtttcggttataagcaatccgcctttgggaaggaatgcgcagttgcttgggtttttcccttgtaggcttatttctccgataactttcccagccggggaaaggattttgacaactccgcttccgtacactgcaacgtacaagttgccatcgcttccaaaagccattccgtcagggccaacgattcctcctgtttccgcccatattttagggtttgtccattcgagtgtttctggattccaaccgcctttccagagtctttgcttgtaagtttcagccacaacgagagaattcccgtcgggcgttagcgcgagcccgttggggaaatatttcccatcggcaatttttttcgctcttccgcgcgatagaacgcacacgtatccatcaggcgattttcttgaatcaccggggcaggtaaacaataaatttcccttggagtcaaaagccaaatcattggggctcgcaagcggttcccctccgacttcggcgcatgcggtttttacatctccgctttccgggtaaagtattgaaacacaatttttgcctgcgtcgcaaaaccatattctgccttttgagtcaatagctatgccgttgggggagccgccgttgatgtggtatctgcggacaacgccttggggtgtgtaccggcacacatttccgccgtgcagctcaacgaaccaaatatcgccgttgggggcaattgctggcccttcgggaaaggagagatttgaaagtatggccttattcattttccaactactgaagggggatttttagggtgtcgcaacagccttttatatacccgtaagagaaaacgtggcccgtgggttggtatccggcggacactccgcttgcgaagtatggctgcctttctgagcccatagccggagcatggtcggagcgcacatatccgtcaaatccgcaagctgcatagtgagcgagcatttcagatataaagcccctattttcgtctataaaaacttcagtgaaattttcagctgtccctattgtgtctcttatatgtatgaagaaaatttttttgcgtttgatccagtttgcggataaattttttaagttctctccggccaatttgaaagtcgcctggcaaaaggccactcccagattttcagaattgtggcgcgcgaatacattttcatagtcggcggaggattttaatatgcgcccaactccgcaaaacggcgagattggtgggtcgtccggatggagcgccattttcacgccttcactttccgctactgggaggactgcatccagaaaatagtcgaggtttttgcgcaaatcggattcggaaatttcaatccgagcattttttttcttttgtgtgagtttgtccaagctgaaagaagttgtggttgcgccaccccttgcaggcgtgtcggaattagtgcggaaccagcctacacatgccatccaattaaggcagagcaagtccattccaagccttcccatattgcgcagcatttgcgcgtacaattcaatatgttcgtctctggcgggaaggccgagttttatagcattcatgccaaattggtctccctcaagtccgcataggcttaatccgaaccgtccaaatttatcttttaaggcctttagagattcgtaattgtggggcggttttagccctgagagctcttgagctgcttttgttataaccagcttcactcccatttgagccgccaactgcgggagttcttcggcatttggggggattagtattgcaagtttcatattctatttgcgctgctaaaacagtggcttatttgaaatctattctaacggcgcaagaccgtttaaacggaggcagctttatttttgccgagttttccgccggaattattttttcgttccataagttatacacgcgcactttcgatatctcccggcctcttgcagcttcagaaaagtcgatgctctcaccagagatttcggcaggcttaattcctttttcaaattcgcttttccaatcgttcttggagtcgcgcacaaaggcaagaatcgttttttcaccattgagcgcatatacgcgggtaatggtagtatctgctctgaatggcttaaatccttcgccggctggatctatgttttctaggagagctcgaaatggtttcaaatgcctccaaagtttatgcttgtacacgtagacatcccaatgccaaggctgtcctccgcctgccgcgcccctaaaaaatggagtgtaaagagcgtcgtggaaaattatcccatcggagtcggaattgtaaaagcgccacggccctgagtgcttgggttggacagctccagtttcggcgagaatcgcggggcggtttggaaatatgcgttttatttcgtccacggcgtctgcggctgcaatgtccataggaccgtggcatattttataggacgcgccttcgtccaaatacctgtgcaccgacgccatagaatttgcgctgccgtcgtaaaagaattcataggactttttagcgtagttgccgtcaaaactgccataactgtttacaatcatgtgttttttgcacaatttcgccattctttcgaacatatattcctgccattgtttaactatcttagggtcggcgtttacggtgttttgttcattccataattcccatgcgaatattgcagggttgtcggcatatctttgccagagtgctttaaagcggttgaaaaacaagtcgcgcccttttgtggatgagaaatattcgttcatgtcggcgaattcaccgtcgtatgacggccgttggaaaaccgaggtctgaagcccggattcgttttcggcgggcttatactttttaatatttctaaaatgttctaggcaaattttaaggcgaactccgtatttctgggctagatttattaaacggtcgattctcgcaatcttttttgggttataaattcccggccgggaatcctcaatttcgtagaatggatgcgatacccaaacgcgcgcgtagtttcctccatttgcggcaatattcttcaaatgcgtttctatcatatcaaaagcttcgtcttctgataatttgtcccagaatcttggaaacgccatattatatccaagcggaatgtaggatgagttgtcagagagctcaaagtaatttgggtctctttcagatatccttacaaattcgcagccggaaatagcggtgttggcgatggcaaaaaacgacgttataattgcagctaaaaatatatgcttcataggctctttttctattctgcggcgcaggctcaaaaaggcaataattttttggaatttgctatattctgtttaacttaagaaattaattttcagataaaataccgctttattgaaagtgcgtttttctcaatcggaagtccaccgcaagacgtaggctaaagcgggtattgcgatgcatattgcgcgggttctagtacgcgggcaaggctatggtaatggattcggtgggttctattgcttttattcggcgcgcaatgcaatcttatttacttattgctttaaattatagtctgttaacaaaatcgtcataagatatttagaaagacattttcgggaattttataaacagattcaatgctggaattatgccttagagagcataagtattaaataattcatattctgccaaaagagtctattcatatctataaaaaagtcttaggcaattttcgttaggagaattttctaaaatttttcatatagtgtgtttttatattcttggcatgtctattacctaaaatataaaaacatccgaggaaacccggatcactaaatcttggtggatgggaaattttttaaatttaagatggtgcatgggtattctttggaaaagataattgcctgcttggagcagcagttcctcttatgtccggcacataagttggttgcaagtcgacgcatgcataatagatggattttttgatagaacattaatggcacgttaatgtatgccagcgttggaaactgcgtttttttttgtaatatttgtttccaaatttctataaagccattagtataggctctcaaataaattattgatatgctaaaaagtgtagatttttattttttcagccctacgggcggaactaaaaaggttggagaatgccttgcaaactcagttgccgaatcagccgtattgcacgacttgtccgacaaaaaatctcccctttcaaccccggaaggagggctttcaataatagctcttccagtttttggaggaagaataccggcatttgtcgcggaaaaactaaaacatataagagccgaaaaaaagaaagccgcaacaatcgtagtatatggaaatagagcttatgaagacgctttgctggaactaaacaacatcgccgaagaatcggggtttgagattgtagcttcgggagcgtttgtagcgcagcattccatgtgccctgaagttggtgagggcaggccggatgaaaaggattttgaagatataaaaaactttggggaaaaaatattggataagctatcaggagctttgggaaacaaaatatcggtgccaggaaactatccttataaagctgatttcattgtgcctgcaactcccatatccacagatttttgctctatgtgtggcaagtgcattacagcgtgccctacggatgcgatttcaattttatccggcaagattgcaacggattttacaaaatgcgccctttgcatggcgtgcgttaagacatgcccgagcggcgctagaatattgcctccgcccatgtcggaaaaaatacgccagatgctttccaagtttaagggacttcgtcgcgaaaacgaaacctatatttagtgaagcaaaatcttcggcgctctaattcgaaaatgtgattttggggacgcaattaaaagatatgctttgtggatgtgttatgctttcatgctaatcctgaaaaaatatgcggatgcatcagagaaaaagttaaggagaattgctgcgagctttcttttttagctcttatgaggtcgcactgcttccaataaatgcaattgggcgctatattccatgcagacaaactcaatgctgcgtacataaaaataagtccgacaaagagaaagcaattttttttcggtcatgctgcaatagtttttagatattatctatgtattgcttatgtagataaatttcaactaaggggaccaagaatccaagaaggaaaactttgcaggcaaggatatggtgcaaggcgcaaaggagcgtcagtagaatattgatttgttagaatttacaaactctacaaatttttcgaaactgggatattttgttttgcttattttgccggattttatgcacaagtcgtaaatttccttcgccctttcgatgtctttgaagccgtattccccgcggatatatttgtatgcggaggtttggggccattttgcgcggcttgcgtatttatttaaatattcctcagatttgccttggtctttcccgaccgagattccttgtttgtacatataggaaatccattccagcgcggtgcagtcgctttgggctaatttttccaagtctgaacgcaggtttggattctcgccgaaaaccttgccgaggctttgaaatataagttttggcaaattgccgaatttcgtttttgtcggctgcttttctttctcggataagtactttttataatattctatgaatttttcaaagtctgccttgcgccttgcgttcatatacgcgtaattgtacgcaaaaaattgcgggttggtttccagaaagaagtcgagccagtattccgcagcgggaatgctgaacttaatgtaggagttttttgttatcccgaaataatggtttaaaattacgcgtattgcgcaataacctttgtctttgtttttagagtattctttaatttttgttcttattgattctgcgcgttttttgtctggctcgcatccgtagccgttgtcaaaacagaacgccaaagcttcggcaaatacagggtctttttccacgtcggattcaaaatcaacgtctttcttgtgttccgacaatatttcaaaatacttttttccgtcgcttttagccttgcgcaatttagcgcagcaaattttcctttgcattccatcgattcgctcatcttttccgattctttcaatagcgcctttggcgctgtccagcattgcctgcaaaattttaaagtcattgaatcctccgctggcgaaggagtccagagcgaagtctattaaagcgagcctgtctttgtcggacagcggttctttctcgaaaatatccaggacaagttgttcgcttatgcgcttttctttcaccatctgatccgccaaatggatgtggtcgggcaacaggaaaagaattttttcatagggaatgtccaatgtaaagggataccaaatgttgctttcgccgccaaaaatttccatggcgcaaattttggctgaataatccgcttttatcctattcatatattcgccggcttttactgcgtctttttcacagccagcgccgtatttgcagcagtagtacagcagcggttcagcggaatcttcctccgggttttcttttataatttcaatcgcaagcttagggtttggcggtgttccgattccctttatcagcataacgcagtaagcccttattatccctggggagcgctttccggctttgtaagatttttcgcacaaatcaaacgcgtctttgtaatattttttgcccttcttgcaaaaatagcttatggcaaattctgcgcttccgttatgagtgccgatgcaattattctcttttagaaagaggaaaatcaaatcatcaagtccggttgatttgcattgtgaatcaagagaataaaaaatatcgtttccatatgatttgtttaaaattgcttcgagaaggctttctatggtttccttgttcaacagcgcgccgtagtcaatggagcgatagctggtttcttttatttgtttaagaacttcggcggcctccggggcgttgcgcgtttttaagcaatggtagtagaaaactccgcaggtgaaattttttgcgtaatattttttatagagattttcagattccttggaaaaatccaaattttgcatggctctgcaaattttggcgaaatccgaatttgagtccgggggaattttcagttcttccacattggagaacaaatcagaatacctcccatgtttaaaatagaagtccaaaatttcaatatcattggaattggggagattggctaatattttttccttgccgctgcagtttatcaattcttccgccctctttaaatcaaagcccttgccgccggcataattccagcccaatatcatatccgccagcaatactgtgcgcgcggcggcgtttagtttttttgaattgcttatggctttgacgcaggcgcttctcagcttccagtcgtgcgtattaaaaatataaaatatgatgttcgccggaacatagtcgtcgtttaatatttttaggacggcttgcgaatttaaatacggcgagtcgttcctaaagtagagttcggcaatttcttcgctgggagagtattcgtattcggactctaaaaactttgcggcggctttataaaactgaaaatcataatacaaggtttggcatactttttctgcgtaatttatattatgcttccgcatgtagtccagaatcttttcagcctccttctccgcgccgacagtcgtaaacagagtcgcgtatcgaatgggcaagcctttttctaaattagaatctttattactgtcgtagcccttgattatttccacaagctcagatgcaggctggtcttgccctgcagacgcggcggataaaatagcgaaataagaaagcatcaatacgataatacatttcatagtattgtaaaatatgtctttgcggcggaaattcaacataatttttgcatttcattttctagtgtcagcaaactaatttttaatataaaaaagctgccatgctttgaatttatagtttgtagttttgagggttgcgatgcaatatgcggtttttgatggtaaatttgcagatgagtggattgtaatttgataaaaaggttttatcattattttaatttccaattttaaaaagggaattatgtatgtgtttatattatccattgtagcccttattagcgtgtcggttttgtcaaacgcgatgtttgtaagacgcggcattgctacgccttttacggtggcactgaagtttgtgcctatattgtttcttgctgcggggggtatttttatttttgcaacggcttgtttgctggccgttttacccgaatttatttcattcttggcgtttgctatgccatttttagtgggagttattgcggtggcctacattaaatttgcggaagagaagtttggttttaagtggatagtttcggctatgtatttttttttgggtgttagcggcttcggcttttattgtgcttggcgttccagccatcggctgtttgtatgcatgtagcacatggaaacccgccgagcttcccttcgagccgaaatgttttttggagcttaaaagactgcctacattgtgtccggagtttgaaaggcgaatatcgtttaaaagcggcaaaaaagtgaaaatttcaaccgacacttgcggattgggcgaattcgaattgttcaatttatgcggaggatgcctttatatgaaaaatactgcatcagctttttcctatgttatagattcagaatctgaaagagtttgcgaattttacggggattggcgcgggaatttttcagagatttcttcagcggatggagacggcaaaaaaatgccattcccagagcctgaccttgaaggcaaagaatatttggggaggttaaaatattggaagttatttaaggctggagcgcgggattaaatcataatacggcaattgcgcccgcaaatttgcacggtttgggattgggctttccccgatatttttgtgggagatttagattgacaaaacaaatggctacaataaaaaaataataaattagattctcccacaacgattgattatgaacaattttcgcatcgcaattgttgctttaattttttttgtttccgcatgcgcccaaattgactattcggattacgaaagcgaagttgacatacacaataagccgataaaggaagtcgaatccctggcaaaacagggaaatttagatgcgaaattccgattggcgatagacaagatggcttactcaagggatgaggcaatcgaggaaataaaatcgctttactacgactcaaaacatctaatctccggatactacattgccaaccgcctttccaaccaaaacgagcggcttgaaatactgagggaaatatccgataacggaaattcttatacttcggcttgtgcgaaatgcgatattctcgccgaaaacctgaagttgagcctagactcgctagacaaagagaagttcgacaaatattacagcgagctcttgtcgtatgcgaagtctgattttcagcctgccgccgtgcatttaaagttttttatagaaacaaacctggagaaaatcgaaaagttgaaagatgtttcaaaagatattttgtttctgtacaagactctggctagaatttccaaaaccgacgagaaatactatgcgctcgaatacgccgaagctctggcgaaatctgggaaatgggacgaggctgttgcaatgctaaagccgctcgccgatgatttcacaaaacacggctcttttaggatgggccaatcgctgtctcaaagggtgggcggaaacttttacgccgaggcaaaagccgccgctctcatggcttgcgcgtgcgacaatggactaggaactgccaaagacgaaaatgccgcaaaaaagtaccgcgataaagtaatgcagcttcaaaacgaatggtttctaaaaagttttgcgagaacgttcgacgcatccggcgtagacaaaaattcttttgtgtttgattctcccgaagacgccaaagcataccgcgccgccgcaaaaaaaattaaaaattccagagccgaaagattgcggaattactatagcaggctcgcaaagaaaatttctgacgcgtcaaaaaaatctttggatgatttaaaatcggcttccgacgaaatagagaaagttgaatacgcgaagaaacttttggatttaaaatccataaatgttggaaagtacacaataggcaaatacaataacgacaatgcaaaagaggcaatttcaatcctcgagacactcgccgatgaaggaagccaatacgcgcatttgactcttgccgaactctataaaggaggcaactctagaaacgccacttttaacatactgaatatgccggtagatttcgacgcaggcaaagcccgcatgcacgccgacaaggcaagccatatcgacaatgagtgggcttggatggcgcaggcggacaagctgcttggcgatttggatttgttgaaaacaaacgcgcccgaaagcattgcactagacggatatactgtcaaaacagattctatagattccgccttgcaaaaatatcgcacggctgcgaacttaggttatgctaaggcatttataaggctgtttgaaatctacaacaatggaataccaataggatatgggaaataccttgtcgagcccgacaaatctcttgcgcttgagtacgctaagaagtctgtcgatttgggcgatatgcggcttatgcattatgtggaggattcttccgatagggataaatccatacaaagaaagctttctattataaaagaacatttggattcaaaaggcggagctgttgcggaagcattcgcaattttgcaagaaaacgggcaagcaagcacgcattctttttcggagcctgaaaaaataaaagattccgttgcagagggggctttggattccgcgttcgcaaaatgcaactccgaagaagttgagaacaatgccggcaaaaaatttgcgcaaaatgcggcgcatgaaaaatgcagcattgcattatccagcgaattttcggattatttcaagtctctgcccaagactcaagaaaacaggttcctatattccctggcatgcgtttcggaaaacaaaatcgacgaggccgccaaagaacttaaggcgcttgccgccgagcgctatccggaggctgtaagaattattatagagttggttggcgttatctatggaacggcggaagaaattgatcgctattgcagtttggccgaagaattgaaacttcctatcccaaattggcgctttaattcagccgattacaatatcgcccggtatgaagaaaccaaagatgacgcattcttgcaggatttttactacatatgcactccaaaggttctcgaatttctgtccaagcattctagaaacaataaaggcgccttatattgggcggcttttaggctgttcaatgccgatgctcaaaaatcgctgctggaatttgacgaggtattggattttataaaaaattgcgccaaggacccaaaacttgcaccagatgcaaatgtattgctcgcgtacgcatattcgggcaatccgaagatgaaaaacaatccgcagctgagctcgtcttatattaaggctgccggcgaaagttggagtgggcgcgcgcgctgtcctgcatacaaaatgttctgtttcgattcgatagatgatatgcaaacgcaaagcagatttaatttattttcgcagtctataaatgaaaacgataatggtaattcacataatctgtcttatattgaaaaaaatagcctagaagatttgcgcgccgcaaataaaaaaaatcctaaaagtctgattataaaacgggcgttggccgaaaaagaaaaggcgttgggcaattacgcggaggctctaaaattatacaaagaattaaacgaaaaaaatccttccgacatcaactattccactgttctagctgaaatgtattattatggactgggagtaaaggaagacaaggctttggcgctaaaatattatgacaggctttttgtcgccttaaaggagaaagatgcggatagatataattccaacgctgtatacatattggcaaattccattggtaaatgcaacttcgtggattattgcaaagtcaaaatccctaaagagcttgttattgaaaatatcaaggatattcccgcgtacaggctcaactcgatatcaatttatatccttgattacctctcggaaaacggtgaatccgccttgtacgacaaatttgaaaaggcgttcataaaagaaaaagactcaaatgcaatggcgtatgcggcccgccgctttttcgatcgaaatactcccgagggtgacaagaaagcgtttgaaatatattcccagatgatggaacttggtcacactctgaccttgtctgagttggggagtatgttctttaacggaagaggcgctgcccgcaattataaaaaagccttcgaaatttttaaaaaggctgcggataagaaaggttggattgactctacaagctgcatttggacggcgctgatgtacaaaaacggatggggcgtggagaagtctgatgaaatggctcgcaagtatgtggagctcgcggaaggagcccataactatgaatacgattttacgcaattttcggaacaattgatatgcggagactgctgtatttataacttcaagggcgctccgaaatgccccgacttaggagtggaacttctggagcgggttgtatcgtccaaaaatccaaatgtagattcatttcgcagatatgcaattcttctagaggacggaaaatatataaagcgggatttgaaaaaggcggcttcatattatgaaaagttcgcccgccagcgcaaaaaggagaattacgccggggacgaagattattggggatttggcgatgccattagaattctgaaaaactctccgaaggaaagcgaccgcaagaaggcgtttgaactggcccgcgaatggcttggggcagtgccggattcaatcaacgcaaaagtcgatattgccctgcttaaaatgtatggcttgggaactgaaaaaaatccgaaggaagccgtagcttatctaaacaaggccatagcctcaaaacttaaaaaggaaatgtatctctggagggcgtacggagttttggcgtattgccatatgaatgggatcggcgttgagaaatctccggagaaggttcgggagattgtatcggcggttcgaaaaataaaggtttctagatgcggggtatggcatccgtttttatcgtacgcggaatggtttaatccgaatagggaattttacgacacagatattgtcgacaatccggcttttccgcccgataaggaaatctcgctgttttggctcagagagtttgaaaaagtcgccgataccgcgaaaaatccgaaatttagcgtaaaggcgtatggatttttggttgattatttcacaaaagaaaggggatttgaagatccgcaaaaagcaggaagtctaaaagaaaagctggcaaaagcaaaagagcgcgttgaagccgcaaagaaaaagcctggtgcggagaaaaatacaggcgcaggaggaaatgtcaaagcaagcgcaggtggataagagatcggcttatgccaagaatatttgtgcggtaaaataccccggataatagcagtaaaaataaaaattctcttttaatatagagatatagttaataatgccgttttgcttaaatgagcggttttgcgccaattaatggctatttctttgcggcaattgtgaaacggcaaaatttaaacgccgcgcgggcgaaaaataaaagaaatacatttgcgccaaaagctcttatttttttaaccgtaatatatccttatctctaattgtatattatttgtttgcagaaatttttgataaatcagcttgacattcctcatatcgtttctttaactattgcgcaattgttatgagatgttttttgggggggaaggaatgtctgataaaaggaatttaagcctgattgttttcattcctttgcttgtcgggattactgaataacggtttcactactggcgatacatccgcaattattctcataaaacaaaatacgcaaacgctattcaaaaccaaataaatatgggtcaacaccaaaggttgtggaataggttgattttttagatttgtctttcatag

SEQ ID NO: 2543 - DNA, 3114 bp, Unknown
  16S sequences of unknown bacteria
cagcccaagcggcacaccatggaatacctgcggacgattccccatctgcgcccccggacaaacaccttccaggccgtattccgcgtccgctccttggcagcctacgccattcaccgcttcttccaggagcgtaacttcatctatgtccacacccccatcatcactggctctgactgcgaaggcgccggcgagatgttccaggtcacgacgctggacctcgcaaacccgccccggaccgaggacggcaccgtggactacagcaaggacttcttcagcaagtccacaaacctgaccgtctccggccagctcaacggcgagacctacgccatggccttccgcaacatctacaccttcggcccgacgttccgcgccgaaaactccaatacgacccgtcacgccgccgagttctggatgattgagccggagatcgccttcgccgatctctatgacgacatgcagctggcggaggatatgatcaaatacatcatccgctacgttctggagaacgcgccggaggagatgcagttcttcaactccttcgtcgataaaggcctgcttgcccggctgcagcatgtcatggaatccgactttgggcacatcacctatacagaagccgtcgagattctggagcagcacaacgaccagttctcctaccccgtccactggggcagcgacctgcagaccgagcacgagcgctacctgacagaagtcatcttcaagcgccccgtcttcgtcacggattatccgaaggaaatcaaggccttctatatgaaactcaaccctgacggcaagaccgtcgcggccatggactgcctcgtccccggcatcggcgagatcatcggcggcagccagcgtgaggacgactacgacacgctccttgcccggatgcaggagctgggcctggaccctgcagactacggcttctatctcgacctgcgccgctatggctccgcccgccacgccggcttcggcctgggcttcgagcgctgcgtcatgtacctgaccggcatgggaaacatccgcgatgtcatccccttcccgcggaccgtgggcaactgcgaactttgagtttgtcaaaaaatttttttgacaaactcttcaaacgagacccgctacgctgggctctcgtttgaggggattgcaccctgctgcgcgcataatttccacgccgttggcgcggaaattccacacttgcagggcgtaaagagtttttcccgacgtacacgccgccggaaaaaacagattggactttatttgcgccgtgcgcggcgcaaactctgcgagacttttgggatagaaaatgcccctggcgtaggccaggggcatttcttctatcttttttgttttagtttggcggcgccgatgggtcggcggggagctttttgccttggcgcaggtcttcgatggagatgctgtcgagatagtcgcagatcagccggtccagcttcttccacatgggcagcgtcttgcaggtctcggcccgctcacaggtgttcggggcgcagttcaggcacgccaccggcgccagcgacccttccgtcagccgcaggatctgcccgacagaatattcgccaggcgcacggttaagccgatagccgccgcccttgccccgcagcccgtccacaagcccggccttggacaaaacgacgataatactctccaaatatttaactgaaatatcctgcttcttcgcgatcatgcccaagggaacgaattcctcccggtcatggcccgccagctcgatcatcacgcgcagcgcgtacctgcccttggttgaaactagcatagcacaccctccttttaccccattatactatagtgttaataggattacaagagggaacgtaacaattatttttcacaaaaaatttgcagcgcagccgccacgccccggccaaagagccggaggaagcggcagtgcgctgcaaaaaagcgattacgctaggacgacgcccagcttatccacgatgacgtgcttgggacagaccgtcacgcagcggccgcaggccaggcacttctcctcgtcgatgacggcgtggttgtcgatcacatggatggcgtcagcgggacagttcttctcacacagatggcagccgatgcacgcgccggagcacttcttgctggcatagacacccttttcctcgttggaacagaggggcaccatgctgttggcctgcaggcgggagccgatgatatgccgggggcacttccggacgcacgcgccgcagttgatgcacttgtcctcgtcgacttccgcgacgccatttgcattgatatggatcgcgtcaaacttgcaggcagcgacgcaggtgccgcagcccaggcagccgtatgcgcactccagcgggccgccctcgcacagggccattgcctcttcgcagctggcagcctgatagtccatcttcttctttgcccggcagccgccgttacagtagaccgttgcggtccgatgggggaattttttcttgatagccatgatcgttggtcctttctcttgttgcggttttcgtcgaaaccgtaaatctgtacaaattttatcatctgccctctaccttgtcaaggcagacctaccagagaaaaaagttttgtttttttcgttgaccacggcaaaaaacggtgtataatgattccaatgatattctaggaggcacaagacgtgaaatttccggcaaaagtgatccgcgcccagctggcccggatgcaagaccatctggcccaggagaccattgagcaggagcgcaaggcccaggagcgggtcggcgcgatcctgcagcagcggggcgtgcatttcagtaccatcgccttccctggcttttccgccagcctcgccatgcccgaggagctggaaggtccgggcgcagtcctgtatctccacggcggcggctactgctgcggcggcgcaagctatgcccggggctttggctcccagctggcggcgctgacggacctgcccgtcctctgcccggcctaccggctggcgccggaggcccccttccccgccgccctgcaggacgcgctttgctgctaccagcgcctgctggcccactttgccccggagaagctcgtcctggtgggcgaatccgcggggggcggcctgcttttcagcctgtgcct

SEQ ID NO: 2544 - DNA, 32759 bp, Unknown
  16S sequences of unknown bacteria
cggtgaagcgccccatgggcagcgcggaaacttccaacaagcgcaccatctgccaattcatccatccatccgtgctgaaaacctgccagctctctatgggcatgactatgctggagcccggcagcgtgtggaacactatgccggcgcacacgcacgagcggcgcatggaaatctacacgtattttgacattccagaaggcaacgtcgtgttccactttatgggtgaaagcaaccaaacgcgccatgtggtgatgcacaatgggcaggctgtgatcaacccatcctggagcattcacagcggcgcgggaaccgccaactattcttttatttgggcaatgggtggcgaaaaccaggccttcgacgatatggacaacctatccaccatggagttgcgctagcgcttgttcttcaaaatataaccggagtggctcatgcaagaggaaccgctccggttatatttttgctccgattgttggtggaaatccttttcgctagggcctatttccggcgcgtcttgtgcagcatgcggccataccattgcaaccggcggcgcagcgcgtccagggcgctgtttcccgcgagtttccactcccaattgggcgaccctacggtgccgggtgtgttcaaccgggcggaatcgtcgtattccagcaggtcttgcgcggggatgatggccaaccgcgcgcggtcatccagcgcgtagcgcacaaagcgcgagggaagggagccaaaccagtatccgctgcggcgcagcgcgcgatagagcgcgatgcgctcccgggacgtgcgcgattggcaatagccgcgcatggtctggttgtcgtgcgtgcccgtgtaaatgacggtgttttctttttcatccgccgtgtgcgcgatgggctggccgggctggatgcaaaattgcacgattttcatgcccatcaagccgtaatggtcgcgcagcgcatgcacctctggccgcaaatcgcccaaatcttcggccacaatggttgcgccgggcagcgcttcgcgcacgcggtcgaagaaggcatagccgggcgcttccacccattcgccaatttctgccgtggggcaactggcggggattttccaataggtatcgaatgcgcggaaatggtcgatgcggatgatgtcgaacagcacgctgctgtagcgcagccgctccagccagaaggcgaagcccgtcttttccatgtgcgcccagttgtaaatcggattgccccagcgctggcccgtcttgctgaaataatccggcggcacgcccgcgatatatgtgggttgccccgcttcatcgagcaagaaattggccttgcccgcccacacatcctgcgaatcgatgcccacataaaagggaatatcgcccatcacgtggataccggccaggttggcggcttcttttagcgccgaccattgctggaaaaacgcgtattgcaaaaacatttcgtagcgaatgtcttcttcatagtcgtccagcagcaaggcgggatcttcgggatagtgtttcatggcgtcgggccactcattccagcagcgcatgccattgtgctttttgaaggtggcaaaaatggcgtattcgcgcacccacgcttgccccacgaacacggcgtaggcttcgtcgggctggaagcgggcaaaggcctcgcgcaaatagggttctttgaatgcgcgcacggcttcataatccacgcgcggttcgttttcgcggaatgcaggcgctgcaacgcccaaatcgtccaggctgagataaatgggatcgcccgcaaaagaagaatagggctgatagggcgaattgccaaagcccaggggattgagcggcagaatttgccatacgcgcacgccggcatgggccagcatggcaaccaacgcgcgcgcggtttcgcccatgtcgccaatgccgtgcctggatggcaaggcggacaggggcagcagcaggcctgcctgccgtgcggagaggatatccgccatggtgcgcctcccttcttacaggtgccagatatcggcgttgtactgtgcgatggtgcggtcggaggagaagaaaccggcgttcgcggtgttcaccagcatctttcccgcccaagcggagcggtcttcataatcgcaaagcacgcgctcctttttttcgatataggcgcgcagatcgagaagcgccatgaaccagtccttgccgacaatatccttgtacagccgcgcgaggcaaatgggatcgccaatgcgcaggagcggcttggagaggatgaagtccaccagcgtttccaccagcggatcgctctcgtagatctcccgggaacaataggaatgttccgcatagcggcggatgacctcgtcgctggatttgccaaagatatagatgttttccgggcctaccagttggctgatttccacgttcgcgccgtccatggtgcccagcgttaccgcgccattgagcatgaatttcatgttgcccgtaccgctggcctctttggaagccagggaaatctgctcggagatgtcgcacgcggggattagacgctcggcccaggtgacattgtaattttccaccatggtgatgtttagccaggggctcacctgcttgtcctcgcggatcaacttggcaaggcacaggatgagatggatgatgtccttggccaggatataggcgggcgcggctttggcgccaaacaagagcgtgatgggtcgcgcaggccgctttccggccttgatttccaggtatttgtaaatggcgtacagcgcgttcatctgctggcgcttgtattcgtgcaggcgcttgatctggatatcgaaaaccgcctccgcgtccagggatagcgcggcggccagcgcgcgcttgttcgccgccttgatggatagcatggcctcgcgcgccgccgcgtcgtctttataggcgagcaacttttccagatcgttcgcgtcgcgcttccaaccctcgccgatgagcgaggtgatccattcgctcagggcgggattgcaggccatcagccagcgccggaaggtgatgccgttggtcttgttgttgaatttgccggggtagatcgcgtaaaaaggcgcgagttccgatttttccaaaatttgcgtgtgcagcgccgctacgccgttcacgctgaagccatagtggatatccatgtgcgccatatgcacgcgattttccgcatcgatgattgccacgcgcggatcgggatgcgccgccttcgcgcgcgcatccagcagttcgaggatgggcaccaggtgcggcaccacttcttgcagatagtccatgggccaggtttccagggcttcggccaggatggtgtggttcgtgtaagcgcaggtttgcgagacgatgccgatggcttcatccacggaaatcccttcggcggtgagcaggcggatcagttccggaatcaccagggaaggatgcgtgtcgttgatctggatggctacatgcttgtgcagatccttgagcgcaaagccgcgttcgcgggtttccttcaagatgagctgggcggcgttgctcaccataaaatactgctggtaaatgcgcaaaagctggcccgcgcggtcgctatcgtcgggatagaggaagagcgtgaggttgtgcgcgatatcgcgcttatcgaaatcgatgccattttgcacgatcgattcgtccacggtggtcaaatcgaacaggtgcagccggttcgcgcccgcgccataccccacgatcgcaatatcgtacatcctagaagtgagggtgaaaccgtcgaaaggcacggcgaaggaaacgccggtatcctccagccaactcgcgccgtccatccacgggttggggtattcgcattgcttttcttcttcaaagcgctggcgaaacaggccaaaatggtaattcaagcccacgccgtcgcccggcaggcccagcgtggcgatggaatccagaaagcacgcggccaagcggcccaggccgccattgcccagcgacggctcgcattcgcactcttccacctccgcaagtgattttccagcggaagcgagcgcggcggccacttcctcgcgcaggccgaggttgattaggttgttgctcatcaacttgcccagcagaaattccgcggaaatataatagagccggcggtcgccttggcaaaccgggcggtcttgcgccttttttttcaccagggcttggagcgcggcatagatttccgcgttggtacattcggcgatgggctttccggcgaggcggtttagaagttcgagcatgggcgaataccatcctttccaaaaacggtgtggcgcattgggcgaaaatgggcggcgcgagccagaggcagggcgcacctatttcgcgaaaagcattctcgcaccgctctctcagaaaggcccggaaggcagacagcgggttgagctatcaaagaagatacgtttattataccacagttttacagggaatcaagggtaaagaaagaaaatggccggacaatttccaaaatgccgccaaaggatgccgcggcatggataagtgggaaaaagcaaattggctcccgccgcataggtttgcgcggcgggagcggtttggggttatgatggttggatgctgatatcccataccaaggcgtcgcagggctgtagggaaagggaaaattggtttcccgcaaaggaaatgctggaacgtccgcacagccgctctgtggcgcgataatggccttcggccacgggcaggcgcagagttatggtcttggcgcggttttccaaatttcccacgtaaacgcgcagcgcggaaccatgccgccatgccacgacggcgcttttgggatcgttcgccgtagcgcccgtatagtcgcattcgccttgcgccatgatcggctcccggcaaagcgcggcaagctgggaatagaaggcttcgttccctttttgcgcgccgtaaaggctcatcaaggcgccgtccataaagttcatcaaggcaaagagcacgcggtgcatctgcgggccgtaagcttcgtaattgtattgtccgcccataaagccacaccattccgcggaatcgtgagaatccgtttggaacacgatggtcattcccttgggggaagtggcgcgcagttcttccagccagcgggcggcgtctggccaagagagcgttccctgcgagagcaggttttgcgttgccgcggggccgcctcggggatcgacgatgggcgtaagcgcggggaagagccaatgggtatcgtaattgtagcggtactcgtggcccttggcggcataagggccgttggcttcggtatagaaaaacgcgtggggatattttgcgcgcacgcgtggggcgatttcgtccatcatgcgcatgccggccagcacggatgcatagggctggcgcgggcagcgatcgtcccagttgggcgtttcgctccacatttgcgcgtccagtcggaacccatccacgtgcatggtttcgatatagcttagcatgcaatcgccgatgtgccgctggtattccggatttcccagatcaaaagagcgcgtgtaggttcgggcgtatgctccgctttcgtggcgcatgaaccaacccgggcacgcgtccagatagggggagcgcggcaggcccagcgctggatcgtattccagagggccgtggaacaccatgtccgcaatcaccttcatgcccagcgcatgcgcggcgtccgcgacgcgacgcacgccatcctggctgccataggtggcgttggcgtccgccagatgaaagacggaatagctgggaaaaggcattttgggcatgatttcaatggcgttgaagccgagatcgtggatttcctgcaagcgcgcgagcacttggtcgtaatcctcaaaaagcgtgcggccagatttggaacctacatacagctcacaaatgcgcaatgcacgccgggcgggcacatcttccctgcgctcccatccataggactggaaagcgcgcgcgaagcgcttcacgcaggccagccgcgttccttttgccgcgccaaaatagaagtcccccagcgactgccggtcgcccgcacgcatccaccgcgcgcagtgtacgcggccctcgcggcgcaacgtggcggcgtgtgaccagctttcggtatagaaggggaacatttcgctggtgtgccatgtacacacggcatacgcttcttcggggtcgtataatcccaggaaaccgggacggtatgccggggcgtggtcgccgaaaaggccgcgcgcgagcaattctctatggcggtaagcgccgatggggcggttgagatccagtggttcggcaaggttcatggtatatcccgggcaaaagggttgggcgcgcgagagaagcgcctcgcagcccgtttccgtgcgccagttcagccaacgcaggcggcgcggttcttggcccgtatagccaatttccatgcgcatgcgcagccaatccgcctgcggcgtccagtgggacgtgagcgaaaacccttctccgagatcaatggcgagggaaagcgtttcaccctctaggcgggcttccaacatggatgcgctctttgcgccaatttcgtcgtacaattcgatgttgtgcatttgccgctggtcgtttcgcgcgctgtggccgtccacggccaaggtaaacatgggcgcgctctgctcaacgacgcacatcccatttttttccatgcggcatacgttgccgcgcaagggatcgatggcgatgagccattctcccaactgatattgttgcataggcgcctcctagccttttactgcgccaatcatcacgccgttcacaaaatatttctgcaaaaaggggtataccagcagaatgggaacggtagagatgagaatgacggcatatttgatggtttccgcgtaagaattttccagcgttgcgccggcaacttccatgcccgtatccaaaatggactcattggcgattaaaatcgcgcgcaacacggcctggatgggcaatttggaattgtcgctgaggtagatggtggcagcaaaccagctattccattgcccaacgccatagtacagcgccatcaccgccagggtaggcccgatcagcggcagcagaatccgcaccaggatcacggggtcgtttgcgccgtcgatatacgcggattccgtgagcgattcggggatgttctgcatggccgtttttgtgatgatggcattgtatagcgacagggcgctgggcaatatcagcgcccacaaggtgttgtagaggccgagctccttgatattcagataagaaggaatcaggccgccgccaaagaacatggtgaacagcatcaggtacatgagcggctttttgaatagcatgcccttggaaaccatgaaatacgcgcataggatggtcataaccaggctaagcggcacgctgacgaccatgataatcagaatgtttttgaagccgctgagcagcagcggatgcgaaaacgccacttcaaaggccttgcaggtgaaattcaccggccaccatagcatgccggtgtgcacttccagcacggcggaactggtgaacgaggcgacgatgacatagtaaaacggatatagggttacgatcatcagaagcaccatgattgcgatgttgcacacgttgaacacgttttgtggcgctgtccttttttgcatggttgccgcctcctttctagaataggccaattcccgtggcgcggttgctgatccagttcgtggcggaaaggaagagcaagttcacaacggaattgaacagccctacagcggtggaatagctgaagttggcgtcgatcaagcccttgcggtatacgtatgtggagataatgtccgccgtcgcaaaggtggattcgttgtaaagcagcaggcatttttcgtagccgacgttcagaatgctgcccatttgcaggatgagcaacatgatgattaccggcaaaatgcctggaagggtgatgtgccaggtttggcgtaagcgccccgcgccatcgatttccgccgcttcgtacaattgcggatccacgccggtcagcgcggcgagatagatgatggaactccaacccacttcctgccatatgccggaagcgacgtaaatcgtgcggaaatattccggatgctgcaaaagcggcgttcgtgtgccgccaaaaaacgcaatgatgtcgttgaatacgccgccactgagcgaaaattgccggatgaggccgcaaattaccaccagggagataaagtgcgggatgtaggtcacggtctgcaccgtgcgcttaaaccattgcgagcgcagctcgttgagcatgagcgccaggaggatgggcatgggaaagccccacaataaggaatataggctgatcaaaaaggtgttggtgaccacgcgatagaagtaatagtccgtgaaaaaatcataaaaatattgcaggcccacccaatcgctgccccagatgccacggttgggcttgtattttttgaaggcgatcaagatgccgtacatgggtttataatgaaaaagaaggaaaaagaggattaccgggatcactaggatatacttccatttgtggcgtttccagtcgttgtataacagcttgcggagacttctgcgcgggcggtaagcacggatgtcttgcatggattcccctcccttataagaaaatgccattcttgtcccgattgctggccgtcgaagctcacgaagcggcgcgtagacaagccatcgggaaattttcgctgacaaacctttggtttgtcaacgattacattcctggcggggataaccgccaggaatgtaagaacatcttgagaatgccgagtgaacttaacgggcgagaacgcgatccaactgatcctggcggatggttttcaccgtttcgaggccgatgttatagagttcgtccacatagctgtcccactcttccaggctgcgcgcacccgtgataaaggaataggtggattccttcacataggtattgagggcggagaggatgtcggtggtttcgtcgttttcctcttcggtgggcgaaaggagcgggagcaggatttccgcccattcggcgctggtccaatcgccctgccaggtgatgatggcttcgttggaagaagcgtcattgcgcgcgatggcggattcgagcgtctttacgttgggaacgttgcctacgacgcccgtgtaccgcgaggcgttttccaccatgccgtccgggccatagaggaaatcgtcggtatactgcggttcgccattctcgtcgtattcaaaactgatgccttcaatgccaaagttgaaaagcgtgatggcctcttcggaatacagccaatccaggaagcggacggcggtatctatgtcttcgcaattcgtggtgatggccgtagcgacgctgagcgtatccagccccatctgcaccagcgagcgctcgccgccttcttccagcgtgggatagggaatgggggcccaggtaccgtccgttccgtaagtttcttgggcggtggcaatgtgcgcaccggaaacctggaaggcgtggatggcgcccgtttctccattggcggccttgttcacaaccgttccttcatcggcggaaatatagtctggatcgatcaggccggcggtataccagctattgagcaaagcgaggtattcgcgatacccttcctgttcggccacatagcggatttcgccattttcttgatagaagccgttgttcaccgcaaaattgggcacgccataagcgccggtgaagagatagccaaagccgtcgcccgaaccataggtggtaaaagtggcgccgtaattctccttgaacgcggtcagcatttccgtccagtcatcgatggtggcgggaatttccaggccgcaggcttccagccagtccgtgcgtacccacggaccttgccaggtctcctgctcaacgatggtgggaacgccaaacatgcgaccgtcgtctattttcaccgcgttcaaatacgagggattcgcttcgcacagtgcgtaaagattgggcatggtctccgcagtgaaatagggcgtgagatcaatgatggtttcatcgtcgagataggtgagcgcgttggcagcgatttgcgatgcccatacgacatcgggcagctcgccgctggctaccataagattgtaagctgtggcgctgtcagaaccggcggcgggctccatccaggtgatgtcgatgccggtgagttcttcaatcttttggaacaggggcgattcttcctgtgaagtgtaggtgctggaatagaccatatccgcaaaccatacggatagggtgggcgtttcttccgccaaagcgccggttgaggccaagccgaggacgagcattgcggcgagtgcgagggttagcagctttttcattgtttagatacctcctaatttttcttattttttcgccactaagagcgaaaaggatttgccatgcctgcacgaaaagcaggatacgcaagcggtttatgcgaatataatactatctctggtcgctgtgtcaattgacaattctcgggatgcattgatgaaattccgaaatttggggccaatcgggaaattgtgtgctattataggattggcacatggggagaaaggacagtggatatgcacaagaagcgcaattggattcgggcgctacggcgcagcaagagctttcgatattttgtcatctcatatgtcgcgctgctttgcgccataatggcgctgaatatggtgtattaccgcaaatcgtcttccatgctgttcgaacagagcgtggcgatgaacaacacccaggcggagcggttcgcctccacgctggagaccgaaatttccaattgcatggatagcttgttgaagatagaaaaaacctatgcatttagccaattgctcaatgacgacagcgcggggaacgcgctcgaccggtgggatatatacgaattgcgcgcgcagatgaaaatggcgctgcgcggcagcatgaaggacatgtttttgtatttttgcagccaggatatcgtggtttctgccccagacaactccacttgctccagcaaaatttattatcgcacgtattataatgatgcccggcaaagctatgaagcgtgggcggcgctgctccagccgtcggtgtcggtgcggtgcgcggcgatttacgcggatggacttccctgcctggccatcagccgtgcgttgccgacggcggatcggaaaaatttgcacgcgaccgtagtctgcgtttttgaacccaccctgctttccgattttatggatggcgcgcaaggggaaagcgctgtggccgtttatggcagcgacggcgcgctgttgcttgcctctgattatgcgatggcgcccgcacggttgccggaaattgcctccagcgggcggtatgccaggatagaattggccggacaggcgctatacatagcggtggaggatagcaggattgcgggatgccggtatgtatcgctgctttcggaagaagcgtttttgcggcaaatgcgcagcatccgcgtgtttcaggtgtggtttacggtgggcacgttcgcatttggcgcggcaattgcctttttaatggccatgcgcgcgattcggccgctgcgggaaacggttcgcgcagtggctgaaagcacggatttggagtggaacgcgttggcggaagacgagtttgactatttgaaaaacaccgtggccgatatggccagcgagcgccggcaattgcagcgcgcgttcgaccggcgcgccaatgccgcccagcaaaatttcctatttgaagctctgcatggaaggacgccaaaaggcgcgaatttggcggaagaattgggaaaatatcacattccttgcctgtcggattgctttgctgtggcactgatccgcaccggtgaggaagaggatccgcaggcgcttgcggcgcgctgccgggcaagcgcgcttaaacaagggtgcattgccaatgtattgttaatgactttgccggaattgacgtgtgttttcaacgtgcccacgcaggcggacgcggcgattgcgagccggatttgtgaaaattttgcccgcgcggaccgggtgatcgcggtgagcggcgtgttttctggcggttcggcccttgcgcgcgcatacaggcaggcggtggaagtgcgggaataccggtttgtgtatggcgcaggcggcgtgcttacgccggagatttgcgcgacgggagaaagctttcatttcaatcccacattttatgctttagcggaggcggctttggcggaggatatccgtgccggagaatatgcgcgtgaagatgcgctcaagcggtttgacgcgctgcgccgcgcgtattccgacgatggggttacgacgccgcattccgctcgttgctttgcgtatgatttgcacgcggtcttggtcaatgtaatcttggaggaaaacgcacaggatttcgctgctctgcggcaggatggaaacggccttttccgccgctttaccgatttggtgcaactgcggcaggaattcgccgattgccttatggcggtcaatgcgttttgccatcggaatgctccggcggatgaactatgcgcccgtgtacaagcgtatttggaggaaaattatgccgacccgaatcttggcgtcgccacgttggatcatgtgtttggcttgtccagcgattatctttccgcgcaattcaagcgccgcacgggatattccatcggggatgcgctcgcgcggattcgcgtggcgcacatttgcgacaggcttgtgaacacagaagacactttggaggagattgcggccagcgtggggctgctcaatagctccacgctgatccggattttcaaaaagtatcgaggcataacgccaggcgcctatcgcaagcgcaatcaacgctaagggccgggcgcaatggtgtggagaaagcaaatttcgcttcattcctgcgtcatcagccggtattgccgcagggaaaccgccagcgtaagcggttcgccgcgcaggaagcggccgatatcgtccaccacggcctgcgtgagttgccaggtcgcgggggctgccgcgatgtgcggcaaaagcaacgtattttcccggcactgcagcagcgcttccggctggttgcccgcgccttcttcctcgtacacatcgagcacggcatagatgcgccgcgtttgtagggcggcgatcagcgcctgcgtatccaccagcgagccgcgcgcggtgttgaggagaatgccgccctccggcaacaactctagcgcattggcgtcgatcatgtggtatgtttcgggcgtttgcgaagcgtggacgctcacaatgggctgacgcatcgcctcttcaaagccgcattgcgccgcgaaaggccagcgctccagcgcgcccgtgggcagatagggatcgtaaacgcgcacggtgcagccgaagggcgcgagcagcgaaagcaactcccgacccacggtgcccaggccgatgaggccgatggaattgccaaagagcgaagtttgctcgcccaggcgcttgtcccaactgccagcgcggatggaagcgttgagttgcgccacgcggtgcgtggccgcgatcatatagcccagtacgctttccgccacaaagcgcgccatcacgctgttggcgctgagcacggggatgttccgctcgtaaaaggcttcgctggcgatgtgcgccaccgtgcccgcggcgtgggccagcagacgcaggcgcggcgcgccgtcgagcatgcatgcgtcgatttgcggcgtgccccagtgggtaaccacaatgtccgtatccttgagcgcttcggctagctcttgcgcagtgaagggccgggggaaggggttgcaaacgactgtacccaaggcgcggagctgttcaaggataggcgcgggaaagtgccggtcaaaggtatcaccctgcgccgccgtgatcaagatgttcatggatgaatgttcgcctcgcattccgggagcggccaagcggccgctggagttttaccctttcattatagcgaaaatcgcgggaatgcgcaatcgtttttccctgtttgggcgcttaagcgtgcaaatgggccggcgctatgcgtcgtttttcgcaatgaattccaccgcttgcgccatggcttgcggcgtgtccggcccatgcggatggtgcccgcggtttggcataaacaattccataaagggcacagtggattgcgcgtaagcatcgcggaggtattgcccattttcctcaaaaggcacggaagtatcctttccaccgcacatgagcagcaggggaatgcgatgggcgacaatttcgccgatgtggtccagaggatggtcgcggtaggccaacatttgcgatcgggataggaccagggctgccatgagctcttgctgagcggaaggcttcacactcgtgcctatgcccatgccgaagggacaactgagcagattcaccacgggtgcgtccaggcaaagcacgctgaccatttgcgggtatcgagaggcctgtttcaatgcgtggaggcccccgcagctcatccccacgggcacgcatttttcctttaggccaaattcgcgcaccaggaaatcgcgcaggcgcaatttggcttctaggtcgccaggccgcacccagcggctgccgttttccagataggccagatgatagcccttgcaaaccagagcatattccaaatcttgaaatgcttcaaagtattcggttttgagcagccagcgcttggtttcattggccttgtggggaaggacgaggatggctttccggccctctagggagaaagtcaactgtgagaattcccctcgccatatgcttttttcataggtcatgtgctatgcgcccctttctcttgatttcaatcgagcgatggccggtaacgcacggccagctcgattttttctagctcggccacggccagattgggatagcgcgccccgcgccgcagggcgatgcggacgatgttgcggccgcgcacgacttggcccggctcgatttggcatacgacgcgtgcaaggagcgccgtattgtctatcgctccatccgctggggagagggcttccggagatggcaaatgctctgtgtgatagccggacaccagctccttttccaggggacgcaactgcggatctttccagcggcggtccattgcaccctgtatggggacgccatttagggcgatatccacgccatcatcgggcaacagcccatagaggacgagagaaagttccagcgtttctatgcgacctgccctgtgcgctacgggatcccaaacagtgagggaaatatccacggcggcatggttgttgggcaaaacgcggggcaattgccgatccccattggtgttggcatagccgttttgccagggatagcctccacggcgttccacgacataggttttatccaaaaaggcaagcaaggcttcatccccggcgacgggcaaaatttgttccagcgcgtgtgcatgttcgcgaaaggattgggccgccgttttccgataggtttcccagctgcaagcgtataggttgaacattacaatgccatccgcgccctgtgcccaccaattggcgaacaccgcacgcagcacttcggcaggcggatcggcataggcgtcggtttggtggtgcgcgtcgaagcagggaaatagcttgatggcgctcttggtggctttgcgaatgctttcgatatccacttcaaaaccgcgcgaaccgatggtcagcgtgtccaccaattgttcctccgcccagatagccagatccaggccatctttgcggcacccctcggcgcactcgggcacccgagcgcttagcaagatgggatgcccccagtttgcctcggcctccagggtgatttttcgcaattctcgcagaaacgcggttacatgttcgcgcaattcccattggcgctccggctccaggaagggggtatgccggcaaaaatcgatttcgtagccgtcgaagtcgtagcgctgcatgatatcgcgcaacatgtccagcttgtgttgccgcatggcaggcacggcaaaattgcttagcagggtccagtccttcagatagtattccggatgcgtgagcttcagcgtatccacatttcccacgtctggcccgctgatccggtgcgacaatacgcattccaacccgcgcttccgacacccggcaatgtattcttggtagaggtccaccccctcttcccacaattgctggaatacgggggcgttgtctttgggaagggagctgctgtggcaaaaagccacttgatcggaaaagcaggcgtcccagtggatggaatccaattggccgataacccgatcaacgtattcccatagccgctgagaataggcttctagcaggctcatgccctcaggcgctttgagaccaccgcattctgtggcgacggttctggcatcgtagtgcaggatggtgcggcggattcgattggcggcgcgataatgctcttctgtgagtggaaacggcatagcgctttcctccttagccataagttttcttgcgtccggagccattgggctctgcaggacgctggagcgtcattcccagtatagcacaaacgcggcacgacgtatataatggaaacttgcctcaatagcgtgtttctttcctacgcgcgcccgtgaagcgcaattgccacgaatgcgctattgctgcacgaaaatggcatttacattctcgcgcgcctatgttatattttatgccataagagaggcgagctgcataggaggtgcgcggattgctatccacgatttcaagcaattcccggcgtgggatatcccgttttgcgagggccgttcgggaaaactggcaattgttcgtgttgctggctccgggatttatttatgttcttatatttcattatatccccatgtacggcgtgcagatcgcgtttaaaaattatagcacgcgcttgggcatttgggggagcaattgggtaggcctaaagcactttatgcgtttcttggaatacccggcgtttgcgcaaatcgtttccaatacattgacgctcagtttatattccatcgctacgtttccctgcgcggtgattgctgcgatgttgctcaacgaattgaacaacatgaaatttaagcgggtggtgcaaatggtttcctatgcgccgcatttcatctccacggtggtgctagtgggcatgatcgatattttcttttcacgcagcaatggcctgatcaacaacttagtggaagcgctgggcggcacgaggtttgactacatcaccagctcggcttgctttccgcacctgtacgtgtggtcaggcgtgtggcaaaacttgggctggaacaccatcatttatctcgcggcgctggcgggcgtttcgccggaaatgcaggaagcggcacgcatcgatggggccagccggttgcaaattgtgtaccacatcaatttgcccacgattttgcccacggtgatgaccatgctgattttaagctgtggcaacgtgctttccgtggggtttgaaaaggtgtttttgatgcagaacagcttgaacctagacgcttcacaggtgatttccacatatgtctacgaggtgggcatcaacggtgcacagttcagctattccacggccatcggcctgttcaacacggtggtaaacgtgctggttttgattttggtcaacaacatatcccgcaggctgtctgcggtgagcatttggtgatgagggaacaatgatgaaaagaagcaaatcagacgcagtttttgatgggatgaacgtcgcggtgatggcggttttgctcgtgctgatgctctatccgctgtattacatcgtcatcgcgtcggtatcagagccctatgccgtggctacggggaagatttttttgcggccggtgggattcaccatggaagcctaccagaacgtgtttgaaaaccagcgcatctggacgggataccgcaacaccgtattttacacgatctttggcacggtgctcaatttggccttgaccatacccaccgcctatgttctcagcaaaaagcaactgccggcgcgcaacctctttgcgtggtactttttgatccccatgtatttcagcggcggcttgattcccacgtatttgctcgtgtgcgatttgcatttgctgaacaccgcctataccattgtggtgctgggagggttgagtatatacaatatggtggtcacgcgcacgtactttagcaattccatcccgggcgagctgtatgagagcgccaagatcgatggggcgacggaattcaccaatttctttcaaattgcccttcccctggcggcgccgatccttgcagtgatggcgctgtattacggggttgcgcgctggaacgattattatacagcgatgatttatctcagctcttccgatcgtcagcccttgcaaatggtactgcgcgatatcctgttgcaaaaccagaacgcattggtcgccgcagagaatctcagcgacgaagaaatggaactcatggccaggcgcgcttacatggcggaagccatgaaatacgccgtgattttcatcgcctcggctccgctgctgtgcgcatatccctttgtgcaaaaatattttgtgaagggcatgatgatcggctcgctgaagggataagcggacctgccaagcgctgcgggaaaatctggtaagaatggaacgccttcgccgcttttggcggcgcgtgcgtccaaatagagagggaggattttttcatgaaacggactttatcgctcatcttgttcctggcgctgctatgctgcgcgcccgctttggcggaagaggccgccggggtggactacgcagcctggggcgcagatttgccctttgttcccgaaggggaaacggtcacgctgaaaatcgccgttccacaaagcgcagacaattacgattgggaccaggtctggttctggaaatgggccagcgaagccatgaacatccactttgaagtggagcagattccggacgcctctgtggaacagcgcatcaatctcatgtttgcttccggcgatgtgccggatatcctctttggcatgggcttgtccacggcgaatctggtgaagtacgggcaatatgagcagcagcttttgcccttgaacgagtatctcaccgaggaaattgcccccaatctgtacgcctggtcgcaggaggaatcctttgagacttgtatttgcccggatggcaaccagtatgtatttccctatatcgaccggcttgtgttcaattcgggcaacggccatccaatctatgtgaacaaggaatggatggatgaactaggctatgaaatgcccaccactgtggaggagctcaccgagttgctgcgcgcctttaaggcggacgatcccgattgcatccccatgggcggctccgcgatgggaatcagctatgtgatgacgcacctgcaaaatgcctatggtttgcagacgatttccggggacaactatgggattcagccttccctgcgccgctcgcaggatctggtggtgccctgcgccacgccggaatacaaggaatacctcacgaccatgcacacctggtatgaagaagggctgatctccccggactttttcaccatggaccgcgtgacggatatggcgcaggcggccgaaggcaagtatggcgcctgggcatgtccctatgatcaggtgaatcccgatctggaagccgtacagaagtggtacgcagtaccgtccctgctttcggccaccaatgacgtttactctgtgcccatgtcagcggcgaaagtccgtccgggcaacgcagtgatttccgccagcacggaatacccggagctgtgcgtgaagtttatggatttcttctattctcccctgggcacgatctatggctggtatggccccatggccggcaccgccgacacgctggatatggtgggcggctggtatgccgatgaaaacggcgatatccaatatgtggatgtgaacaatgggaaattcagctcctcgtatcagtatttcattggctgcatcgcacccaattccggggcacgcatgaacaatcgctgtgagctgggctgggacagcagcaagtacagcaccacagcgcttttgcagcactttgccggcatagaaccgcaaccggaaaagcgcgatcccaacatcgcctcacagttcccgcattacactgtgtatacgtacgatacgttgcaccttgcggaggatcaatttaatacacggtatgtctactttgatgaggagaccgccatccaggtgcaggatttgcagacggtgattcgcaactatgtcaccacggaaaccgccaaatttatcactggcgcgcgttccctggatgagttcgacgcctatttggaagaattggaggccattggcgtggacgaatatctgcaatattataaggatgtgacaggacgctaagcgaatagcggggattctattgtgcgcctggcaatttctcacagccgcggcaaaagaggaattgccaggcgcggcgtagaaaaaattttgtggcggcaggtacagcatggcaaaggagatcgcgcggaattctaaggaaaagagttgtttgcatgggacgattcagatactttgcgcagagagaaagcattatgaagcgataccttctttcttatttaagcatcgcgatttttgcctgcacggccataagcttggtggtgttttttgtttctgtgaatgaaatgcatcaattgacgctgcaagaaagcgcaagacgggcgcaaagcattgtggatgatttggacgagcagatggacattatgcaaaacattgcttatacaatttccactatgccagaatacaagctatccaatctacaaaaaagcaaatacagggaaattgaaatgctggaggatttgagcaagtatcagggctacacgcctctggctggccaattctttttgtactatatgggcaaagaaaacatatttgtgctccccgagaaaacaagttgccgcttttctctatatgcacaaacgcgacttgcatatgcttccgccgcagaatctgcgcagttccatcaagaattgatagggcttgctgaggcagatattctgaaaatgcccaatggaaacctactattttgctatccattatggttcactagcgcgtccaatgcggatggatacctatgttttgtggttacgcaggacagcgttgcccaacgcgtacggctcattggcggcaattttgtgcatcctatttctttgtaccattatgaaacctgcatttatggagaagcacagggaactgccgcgctggaactttgcggggaaaacggcgtttgcattcaactgagccaacaggacatttttccgtatcgcgggataacggcttatgcaaacgcctattgggcgattatcgccggcacatttatcgttacctgcgcgatggcgctgatcgccgccaagcggcactataagcccatttacgaattggttcacgaaattggcggcgcgccgctcctgggaaaggatgagctggaaagcctgcgcgtatttctgcgcagggcagtcgataccaacaaaatcacgcaaaagcaattgcaggaaaacgccgcatggctcaaccagcagcggcagaagaaccaggaacaaatgatgcttttggctttgacgggtttgtatcatgcgccgttgcaacaaaccgctcagcgggacgatccgctggaagaaggcaggcattttgcggtgatttgcgtatcttgccgtgggaagtaccttgtggaggaattgctcgcgcagatttgcgaactgggcagcgcggatttggaactcgtggcggtgcgcttgccctatgaatccttgattgccgttgtcgcctcttcctggaatgggatagactcgttcgatgttgtccgcttgctcagggaactgatggaagcggaccatttggcagcggattttggcgttggcctggaggtggatagcgcaaggcgcattccggattctttcgccgcggctttggtggatatcaacaaccaaatgcatgctgctgcgccgaatgcgcgggaatggtatagcgaagataagatggaaaaattgctggcgtatatcaaggcggggcaagtggaagaggcgcgcctcgctctggacgccattcttacgcagattgaagcgctgaacccttccatattgttgcgaagctatgcctacagcagtgtgatcaatgccgtcatccggatggcgcggcaaaatgacgtggagatatcctccgataaaatgagcgtggtgctcttgtataaccagccggagcaggcgcgccagcgcatttttgctttgctggatgaattgtgcatgcagtttgttgcccgcaaggatcacaaatgggaggagaagaaggcgtttttgctcgcttacatccgcgaacattatttggagtattctttctgcctgacagagcttgagaacgttgcggggctatccatccggcagattgagcagatcctccgcggagaagtgcacatgacctttaaggaatacctaacaagcctgcgtatggaggaagcaaagcgtttgctggcaaccggaatgagcgtgacggaagccagcaacgcggtgtgctacatgagcgtatccttttttatcaaggtgtttaagcgccaaacgggcatgacgccggcggaatacaaaaaatccctggaattgtaggaggataaagcgaattagcacccgaggagatcgcggatcaccgcgcccgccagcgtcaggcccgccgcgcccggcacataggagatggaggcgggggcgcgttcgccgtcctgcgggcggaggggcggttctttggaatacacggccaacacgccctggatgccgcgctttttcaactctgtacgcatgcgccgcgcgagcgggcacacgctggttttttcgatatcggcgatttcaaattccgtgtacagcttgtttcccgcgcccatgcaggaaatcactttcgcacccgccgcgcgcgcttgttcgattaagagcagtttggaggacaccgtgtcgatggcgtcgatgacccaatcgtagcgggataggtcgaactgcccggcggtttgcgcatcgtaaaacgcgtggcgcgcgtcgatggccatgtctgtccggatggacagcgcccgcgcgcgcgccacttcgctcttgggctggccaagggtcgcacgggtggcgatgagctggcggttcaggttggtttcctccaccacgtcgccatccaccagcagcatttcgccgatgccggcgcgcaccagcgcttccagggcataggaacccacgccgcccaagccgaacagcgccacttttgcgcgcaatagccgcgcttgcccttcttcgcccaccaggcggatcgtgcggtcgaattcgtgcatagtgctcctccgttcccattttcttctatggtttatcatagcgcgcggaaggcgggttgtaaagcaaaattttgcgcatcgtttcagcgttccttaatccacaattcgcttgcaaacgcggcgcataaggcgtaaaataagaaaagcaatttgattacggtgaggaatgcgtatgtatatccaggataagcctctgatttgtctatccaacgattccaatttttttcaaacccatggggaagcgccccggcaaatccacagccccaaagcctacggcgccgccattgccgcggcgggcgggattcccatgctcacctgcgaacagtgcgcggaagaaatggcggaattgtgcgaaggcctgctgctttctggtggggatgatgtagacccggaattgtacggcgaaaccatcctcaacgatactgtgggccccgatcccgagcgcacccaattcgaagtgccgctcgctcgcgcgtttttggaacgcggcaagcccattctcaccatttgccgggggttccagttgctcaatgtgctgttgggcggtacgctctatcaggatcttttggaacaaaaaggctggatccattccaatggcaagatccgccacgatttgtacgccgaggaaggttccatcctgcatgcgctgtttggtcctgtgttcaaagtgaacagcacgcaccaccaggccattaaggcgctcgcgcccggtttgcgcgttacggcgcgctcggtggagggcattatcgaagggtatgagcatgaaagtctgcccattttcggcgtgcagttccatccggagcggctcactggcgtgcaatgggacagccgcacgcccgattttaagcccttctttgagcgtttcatcgcgctggtgcgggcagaaagcgcccgtcgggagggaaaagcatgaaatggatgatcgcttctgacattcacggcagcgccaagtactgccgcgccatgctcgcccgcttcgacgcggaaggcgcgcagcgccttttgctgctgggggatttgctctatcatggcccgcgcaacgatctgcccgaggaatatcagcccaaagaagtgatcgcgcttttgaacgcgcgccgggagcggctgctgtgcgtgcgcggcaactgcgaggcggaagtcgaccagatggtgctttccttccccgtgatggccgattatgcggtgattcccatggaaggccgcgtcctctatgccacgcacgggcaccatgcctgtgaagacgcgccgccgcccctctgcccgggcgatattttgctgtgcggacacacgcacattccccgctgcgcagagcacgaggggtttgtgtacatgaaccccggctccatctccctgcccaaggcgggcagcgagcggagttatatggtatacgaaaacgggcgcttcgcttggaagcgcctggaagatggcacggtgtatcaggaatattcgatatagcctcaatcttcttttttggccggctccgtttcgctggggccgcctttttttgcgccgcgcttgcgcgcaggcagggaaatccgcctgccataatggcgcaacaacgccttccactgctcgggatagcgggggaaggtgaggtgtgggaaggcgttcatcaggcgtttgagctggaagccgtccggccagtggatatccggcaggcgcgcgtcgagcgcgagtttcagctgccgcagccgctcgggcaggttcaaaaccgttttgagcgtgacgaaaatatcggccagcaaaatgatgagcagcgtcaagcagatggggtgcaaggctggcgcaggcaaatgcgacaccagtccttccaccagcggatgcacaaagcgcagcatcagcacggacagcgcgccaaaaaccacaaatcccttcaggcatacccggccatgaaggttcaaaaagcggttgctgtaatcccaccagcgcgcgtgcaaaagcgtttccatcagccaggaggttacgtattccagcgttgtcgtgagcgtggcgctggaaaaaaacagcgcgaggatattgtccttgagggggtttaggagcgcgatgaccgccaccgcgcccaccccataaatggggcacaccggcccgttcaggaaaccgcggttcactagctttcgctcagccacggaacacaccgtggattcataggcccagccgataaagctgtaaatcaccaggtacaaaaaccatgtttcccaaacgttcagcatgcctgatctccttctaacgtttcatattgcttgtgtcgtgcccggccgcccagagcgcgtccgccacgggcgcccagttctgcgccgcgagccggcatttttcgcacagatcgtccacgtcctcgggattttgcaggtcggtcgaatgcgcgccggattgctccaccagccctttgagcctgtccggattgtccagcagcgggcaggggcgcagatggttctcattgaacggctgcccctggcggtaggccatgaacagcggcgattggaaggcctccacgagcgttttctcgtggatgttggaatccgaatagtggatgaacgcgcacggctcgatgtcgccaccggcgttgatgtgcagatagcagcggcccccggcgatgcagccgttgacgtactcgccatcgttccagaaatcgagcgtgaacagcggcttggtcttgcggaacgcgcgcacctgctgatacataaaggcgcgttgctgggcggtggccatcagagcgggcacagcgtccacgcccacgggcatataggtgaagaaccagcagaatttcgcgccccaatcgaccatctggtcgaaatacctttcgctaccgatcacatcgacattcttcgaagtgtagcagcaggaaaggccaaagggcagcttgcgctccttcaggatgcgcatggcgcgctccaccgcgcgataggtgcccgcgccacgccggaaatccgtgtccgcctcaaagccttccaccgatatggcgggaatgaaattcttcacgcgcagcatatcttcggcaaattcctcgtcgatcagggtgccattggtgaaggccaggaactcgcaatcgctgtgcttgttgcacagggcgatcaaatcgcgcttgcgcaccagcggttcgccgccggaatagatgtatacgtacacgcccagcgccttgccctgctcgatgatgctatccagcgtggcaaagtccatgttcaatttgttgccatattccgcggcccagcagcccgtgcagtgcaaattgcaagcggaagtgggatccatcagaatggcccagggaatgttgcagccgtatttttcccgcgcgcgggcctgctccgcaccgcccagcagcgtggcgttcaaaatcaggttttcaaacagcgccttgcgcacgcccgcatcgatatccgtccagaagctgcgaatcagccggtaccagttgttgtccggattgtccaccacttcgtggaataccttgcgctggctggcgagggaatcgttccggtcgagcttatccacccagtccagcagcttgggaatgttcgcgtccggatctttgtccagatagtcgtatgccttgctcaggcccatgcgcttgattttttcagagatacccatttgtatcgctcctttcctgcgaatggcgccattataaaacaagaaccattcttgcgccatatacagatgtcccggagcgtacaaaaactatacagcctggcggatttggtgaaaaagcttacaaatcctcctcgatgtccaaattcagggcctgcaagccgcgcacggtatccagcgcgtattccagcgcgccaatgtacacggccttcatcgtgcggactttgttcacgcggtcttccggaatccccgcgcgcatccagtcgatcaacagcccggccagcgcgtacttaaagccttccgccacgagctcgcggtattccgttgacaactcctgcacgcccggatggttttcgagagcggatagcacgatggactgcgccgaacgatagaggttatcgagcagcttttcgccgttcacagaacgcaaaatattgagaatcaggcggcggttttcccgcatataggcgatcacggcctccacgcccacgtccagcgaaccgcacgcgcggcatttttcgatcagttcctgcgtttgcgcggcaaagatccaatcgatcaaatcgtagatatcgtgaaaatggtagtaaaacgtctgccggttatagccgcaatcgtccacaatatcctggatggtgatcttatccagcgtgcgccgggcgagcagcttcatgagcgattccgccagcatctctttggtgcggtttggcattgcgggcctccttttcatcgcagtcccgtctattataccgcaaaaggctgaatgttgcaagaaattcataattaagtcacgaaaaatctttgtcttgagagtataataatgtatacatagagaatgaaaggagcgatgctgccaatgccagtgaaggataacaattcatcaccgcgcaaatcgttgatttactactatattatcgcactcgttgtattgatgctgctcaacaccttcctgttcccctccctgctgtcccgccctgtggtggaagttacgtatgacgcgtttctcaaaatgctcgatgcgggcgaggtcaagcaggtggctttggaagataccatgctcgtgtttgccgcggaagacgcggagggcaacgccgccattttcaaaaccggcatatggccggacgataaccttaccgagcggctggtaaacgccgagggcgtgcaatttgcggcggaaatccccacgcaggcttcgccgctgctcagctttttgctttcctggctgatgccgatcctcgtgtttgtcatcatcggtcagattttcagccgcatgctcaaaaagagcggcgcgatgaacaccatgagctttggcaaatccaacgccaaaatctatgccgaggcgcaaaccggcgtgacgttcgcggacgtggccggcgaggaagaggccaaggaagcgctgcaggagatcgtggactttttgcacaacccgggcaaatacgcggcgatcggcgcaaaattgcccaagggcgcgctgctggtcggcccgccaggcacgggcaaaacgctgctggccaaggccgtggctggcgaggcgaaagtgcccttcttctccatttccggctcggaattcgtggaaatgttcgtgggcatgggcgcggccaaggtgcgcgatctgttcaagcaggccacggaaaaggcgccctgcattgtgttcatcgatgagatcgataccatcggcaaaaagcgcgacaacggcatgcctggcggcaatgacgaacgcgagcagacgctcaaccagctgctcaccgagatggacggcttcgattccaacaagggtgtcgtgattctggccgccaccaaccgtcccgattcgctggataaggcgctgttgcgccctggccgcttcgaccggcgcatccccgtggagctgccggacgtggtgggccgcgaggccatcctgcgcgtgcacgccaagcgcgtgaagctgtccggttccatcgattttgccgccgtagcgcgcgctacctccggcgcatccggcgcggaactggccaatatcgtcaacgaggccgccctgcgcgctgtgcgcatggggcgctcggaggtgacacaggccgacctggaggaaagcgtggaagttgtgatcgcaggctatcagaagaaaacccaaattctttcggaagatgagaagaaggtcgtcgcctaccacgaggtggggcacgcgctggtcgccgccttgcagacgcattccgcgcccgtgcacaaaatcaccatcgtgccgcgcacgtctggcgcgctgggttacaccatgcaggtggacgacaacgagcattacctgatgagccgcgaagaattgcaaaataagattgccaccctcaccggcggccgcgcggcggaagaagaagtgttcggcatggtgaccaccggcgcttcgaacgatatcgagcaggccacaaagatcgcccgcgccatgctgacgcaatacggcatgagcgaagaattcgatatggtggcgctggaaaccgtcgataaccgctatttgggcggcgacgcttctctcgcatgctccgcggaaaccgccgccaagatcgacgataaggtcgtgtctctggtgcgcacgcagcacgaaaaggcccgcgccatcctgcgcgagaaccgccagaagctcgatgaaatcgcccagttcctgtataaaaaggagaccatcaccggcgaagaattcatggagattctgaatcgcaattgagcatttttttctggaggcgttgaaaaccaccttgttttcaacgcctctcacttcacaaaggcaaaaggagagagccatgcgcaaaatccgcatattgctggcagaccgcaactatgctatgctcgattatctggcgctttatctgtcgcagcagttgaagcaggcctgcgtttcgctggaaagcagcgggcaattgatgcgcgccattggcgcaaccgtaccggatgtcgccgtggtgggaacgggcatggaagccgctctacgcttatggaaccgcttccgggaaatctctccgggaacttgtcccaaactgatcctgctcgcgtcagaagggtgcgttgacgaagaaacgcttggaaaacaatatggcgcgcagagttgcctaaaaaagcccattgcaccttcgaatttgctcgaagcaatccttgccgcggtgcgcgcagacgttccgccccgcctgtttgcgtcaaggccgctcgcggagtacgcgcaaggcgattgcgtgctgcgcatttgccttttcttgggcatgagcgtgcgtctggcaggatacgattatgtgcgcgaatgcgtatacacgctcacgcgagaatctatgccccgctgggttcgggctacggatctgtttcatctggtggcagagcgccgcggtaccacgcccgccgccgtggaaaggctgattcgctacgcgcttgcggccacttggaaacgcggctgcgtggagcgcgccaacctgctgctgggcgattccatttttccgcttagcgctccgccgtcttgcgcggaattcatcgccacgctttcgcactttgcccgggaattgcaagcgatggaaaaagagttgcgcatggatcattgaaaacgcgccgccattttgttggcggcgcgcaaagtgtttttggcggtttgcggctattccagatggaacgcctcttcgatatccttcacttcttccggcgagatggaaacgatggggccaatgctgcgtgcggcgatcacggcagcggcgctgtattccagcacttccaggcgatcgaaggcgttgagcagcgattcgcccaccacgatcacacattggttgtccaccatcagcaccggagtgctgctggagaagctggccgccgtgccctccacatccagttgactcgcagcaaagggcaggcgcttcacattgcgcagcatgatataactttccggaatggtgcgcgaatcgaattcttcgtccgtcaccgcgaaggccatgatggccggcggatgcgcgatgatcacggcgtttacatccttgtgctgctcatagaccgcctggtgcaaaagcgccgagcggctgggaattttccccgtttcgctcatgccgtttttgatgcgcacgatgtcttccggctccaggtatttgcgatccttcataaagggcgtgatgaggaaggagccgtcggccaggcgcatggagaacgtgccctgcgtgctggtgaacaggcgctgatcatacgcgcggtggattagcgtgcacatatcgcgccggcccgcgcgctcttcgctggaaatcctgtgttccacaaaggaatccagcggcggatgggccttggagctatccagattgatctgcgcatcggtgagcgagcgcgtcttgccgattttggccgcgtcggtttccagcctgccgcagaaatccagcgtttcaaacgccatgaaagcgcggtagaggttcgggccgccacaaaccacgccgtggttttccagcaaaaccgtgttgtgccccttggagaattcggccgcgatgtttttgcccagttcttcgctgccgggcacggcgtatttggccagggcaacctcgccgcacacgagcgaagcattggataccagatgcgtattgggaattttgcgcgccaggctgaaggccaccagcgtgggcggatgcgcgtgcacgatcgcccgcaaatcggggcgggcgcggtaaatgtccctatggaaaggaagctccgacgaaggcttatgcgggccgatgaccgtgccatcgggcttcacctgcatgatatcgttgcgcgtgagagagcctttgtcgatgccggcgggcgtaatccagatatcgccgttgtcgtcgcgcacggaaagattcccgcccgaagtcgtcgtcatcccatatttgtaaatgcggtccatgatcattacaagctgatcggccggatgctgcagttcaaaatgcatattgcttttccctctttcccgtccttcagatggtttcattatagcacaatccgcgcgggatttccatcgttttgccagtgccgcacaaaatttccgaaaacttttcctcgcgcattttgcgtaaaatacggattccgcactataaactttactaaggcgtgatataatcaaatttatactacagaggaggatgtggttaatcgcatgagtgtgagcctgaccgaatttgcttctatgcttggctccaatcctatgctcgccattacggcgctgttgacgatcggcgtaatcctcgtcaatggctggacggacgcgcccaacgccatcgccacttgcgtatccacgcgcgcgatgaaagcgggggccgccattgccatggcggcggtattcaatttcctcggcgtgctggttatgacaatgatcaattcccgcgtagcaatgacgatttataatatggtggacttcggcggcaacgagcaggacgcaaccattgccctgtgcgcagccctttttgcgattgtcgcgtgggccacggcggcgtggaaatttggcattcccaccagcgaaagccatgcgctcatcgccggtctttccggcgcggccattgcgctgcacggcagttttgcgggcatcaatccccaggaatgggtgaaggtgatctatggcctggtgctctccaccgtgctgggctttgtcgcaggctttggcgccgcgcggctcatcgagtggatttgccggcgcatggatcggcgaaagaccaccgtgtttttccgcggcggccagatcgcgggcgcggcttccatggcgttcatgcacggcgcgcaagatgggcaaaaatttatgagtgtatttttgttgggaatctttctttccagcgggcagggcgaagtcagcaattttgcaattcccatgtggttgatgattctttgctccctggtgatgtcgctgggcacttccatcggcggataccgcatcatcaaatccgtgggcatggacatggtgcgcctggagacctatcaggggtttgcggcggatatcggcgcggcggcctgccttttgctctcgtcggtcacgggcgtgcccgtgagcaccacgcacaccaaaaccacggccatcatgggcgtgggcgcgtccaagcggctttcggccgttaactggcgcatcgtgaa

SEQ ID NO: 2545 - DNA, 32759 bp, Unknown
  16S sequences of unknown bacteria
gacatttgccggaattggcgtttcttatattagggacttattttacagcccctttttattatcttttatgtagtacttatgcagttgcttttttcgggttcttcaaagtctgaacaccttcaataacaagcacgatagcaagaacgatcagcagaactccaaggatcgtctgtgcccacggaccccagtctgcaccgccagccatgatcataccaacctgattcttaacggtcagtgccaaagagcagatagttacaacgatcatgaatcccatagggagcaggaacatcttattgttctttccgaggttaccaagccaggtagctacagccagaagaccgatacctgccagcagctggtttgctgctccgaacagaccccagatcttgccgtatccgttcataccaaggagaataccaagtacaactgtcaggatggttgcaaagtacggattaaccataactttcttccagccctcttttacatctgctgcagtttcaccaggctccagccagaactcctggaacatgaaacgtgcaagacgagttgcagtgtccagtgatgtcagacagaatgcagagtaggtcagtaccagcagagagttcaggatggtgtagcttcccggaatgatatcgtcgatcatatgagcgataccaccaccgaagatagcggttgctccaaccagagcgctgtccgggttagctgcgttccatttgtaagcatatccaattgcacacagagtcagcactgcaagtacacactccagaagcattccgccgtaagcgatcggttttgcatccttttctttgtcaagctgtttggacgtggtaccagaggaaaccagtgaatggaatccggagatcgcaccacaggcaactgttgtaaacagtaccgggaacagatactgcattccgtttccgttgtcaaccgcaaatccggcgaatgccgggaagctgctgtcaaaggtcggatgagctacgataacaccaaaagctgctactgccagcattgcgtacagcaggaaggagcttaaatagtcacgcggctgaagaaggatccataccggtgtcacagatgcaactgcaatatagatacctacgatccacatccaggtcttggtggacagatagatcggatggaaattcataccaactgccataataagaatgatggcaagtactccaacaacagaagcaatgcccattggcatattacgacgatatacgcagaaaccaaatacgatagcgatcagaataaacagcaaggaaatcattgccaccgtagctggagttgcggatttagccatatcaagtgcgccgctttcatcatatactgctccaaatgtagaagctacgatagaagcaaatgctgctactaccaggatcagagtcagataagagaagatgataaacagctgttttgcacgtttgctcatgttagcggagatgatctctccgatagactgtcctttgttacgaacagaagcgaacagtgcaccaaaatcgtgaacgccgccgaagaagattcctccgaccaggatccacagagttacaggcagccagccgaacatagctgcgccgatcggtccggtaatcgggcctgcgcctgcgatagatgagaaatgatgtcccatcagaaccggtgcttttgccggtacatagtccacgccatcttccatggtgtgagccggtgtctcagttttgctttcacctacgccccactgcttgcagagccatccgccgtagcagatatatccagctgcaagaatagcaacacagatgatgagaagtactaatgaattcatgttaactttctcccttcaatgtttgcgaatatagtacctttttcaaaattttcgcggtatggcgtcccccaaggtttccgtcgatctgtcctgtcgacagttccaccagtgcggtatggtgatccatccagccatgcagtgaaaaatgaaaacttttgtaaatgcggcatttttttaatgcctttcttgccgcttcatcacaggtatcgcagatgaagatcggtgtaatataagaagccatatgtcctggtcccacatggatgcgctccatggcctccgcctgcacataatctctccactgctcgtaaagctccagtgtcagatgcggaatacttaaaacatatagaaattcttcattgtctgccgaccacagttctgcttttttcgatatgacatactgccccgaatgttcaaaaaaatcacagcgggctgtgattggggtctggtcatcctcgaccaattgaatattatagcaggaactgaagcttcgcagcagccgctcgatagctgcttctcttgtataatgcatttccagtatccattccaaaaattaaatttttataaagtttctaaaaacttttttcattataatactcaattagtattttcgcaatactttttaggttgtttacaatacttttttgatattaattttcatctttgcatattcatacagtattctcaatgattctgcctgcgctcccgcttctgtcaaatctaccgtacacagcacctcttcacactgatcgaccagtgcttttgcccggtttagggatgcttcatccatctcgcagaacgctttcacactgactacttcggatgccaatgctttcgctgccggataatccaagtcattttcccatagaatacctgcagcaaagggaattccatctctctgaagcttccgaaatacggctgtgccggttccgtttccagccagcacaaatactttcggatcaccttctaccttcggcaactccagatcacccgtacgctcttcataagacccaactgtcataccatagagcttcggtatgtagccgtctgtaaaaatctcctccggtgtgccaaaacgatccacccggtctccatgaacacatgcgatcttgtcagaaatccttcctgccagatccagctcatgcagagacatgatgacagacagatgtctggtacgggacatgttctggatgatcgataaaaattccagcttatagcgaatatccagaaaagacgtaggctcatccagcacaatgatatccggctgctgacatagagctctcgccagcatgacccgctgcttctgtccgtcactggtcttggagaaatcccgctccgccagttcttcgatatgcaccagttccatggattcctgtacgatagcccagtctttctcagacaggatgccaaattttcccgtataaggataacgtcctgttgccactacatccttgcaggtcatcatctccgggcgcacccgctccgtcagcaccaccgacagcttctgtgacagttctttgccggtcagcttttccatggaggatccatccagacaggccacaccgcccagcggttttaactggcggataatgctttttaaaatcgtcgtctttcctgccccattaggtccgatcaaggtcataatctcaccttttttcagacagagctcaatatctttgatcagcggaacgccatggtatccaactgtcagtcccttggtataaaaataaaactcttccatgatttattccgccttttctttcttccgatggatcataatatagataacaaccggagcgccaaatactgcagttacagtactgatagataattccgtcggtgcaaacaaggttcttgccaacaggtcgcagaacagacagaaggatgctcctcccagaaaacaggctggaatcatgaggatcggctttgctgtctgaaacaggctctttaccagatgcggcactgcaattcccacgaaggaaaccggtcctgcaaatgcggtaacacatgcggacagcacactggaaagcataacaagaactacacggaacatctgcacattaagtcccatatttttcgcataagattctcccatctgataagcactgatgggcttggacagaagaaagatccctacggtggtgatgccagttacaatggtcatcaacaccacattttcccatgtgataccggaaaagcttccctttgaccagttatgtaaattcacgatattggcatcatctgcaaaagtcactacaaaatcagtaattgctgaacagatatatccgatcataacaccactgacgatcagcatggacatattatccataactctggacataagaatcacgaatcccatacagatcatagctcccacaaatgccgccagaatcataacccaggagcttacactccaggtgtaacctaaggatgctaccataatcagcgctaccaccagcttggctccggaagaaattccaagagtaaatggactggcaatcgggttgtggaaaaaggtctgaagcagatagccagacagagccagtgctcctcccaggattgctgctgccagcgcacgtggaaaacggattcccataacaatgtctgaaaatgtctcatctgctccatggccgcttaagatcttcggaatctctgccaccggaatattcaccgttccgatacatacattcatggccagaaagatcaccagcaggatcagcaggatcaaaaatgccactccatatctgatattttctcttccagcatgtgctgttttcttttgcccgtttggcatctttatctcctgcctttcctgttttatgctctaagatgatccaaaaatattcgcatgttactgaatcagttcaacttgtataaataagtcagtccgctctcatcaccggtcagcataccatgaatatctgatgtgatcgttcccagttccatggtagactgatagaggtttttcgtggtgcaatacacatttccatcctgtacagccttgaattttgccaacagcggactcttggcgatcaggtcatccacagatgccagttcaccatcaatggtgctgttgtagatgatgtaatccgcatctttggctcctgcatagaactcttccatctgcatactcagagtggaagccgcatcatcctcgtcgcccagatccttgaaaatgtaagtacctcccgccagttcgatcatcttaggcagataatcggcactcttacgaacattggcttccccggtactggtaatatagaaaaatgccactgtctttcccgtcggttcttcctggctcaccgcctcgaaggcacctgcctccgcttcaaatgcctgctctgcctcttcttcatgaccggtcagcagtccatacagcttgacccactcggttcttcccagcggattcttctcatagctggaataatccaccatcaccggaatgttgaatttctccaattgctccttgacttccggtgtgtgatagatcatggtattttcaatagcaagtccacaaccttctgacaggatctgctcatagtccggtgcagaatatttaccagcatagatgatatttcctgcttccatctcctgttttgctgcttctatataccatccgtcttccttctgagagctgaaacgaatggagtccaatgcatcaatagatacaaacatatccatcactgccgatgccaccagataaatgttggtcagcggctgcttgagcactataatatcctttgcaagatcatccggtgcttcttttccttccggaacgatcaggtaacgaccatcatctgcgacggtggccaatgcatatccatcattataatagtccacagaaaactcttctgcatatgttaattccatactgtgatcgtaggtcagctccgaactgatattggtatctttctcttttcctgcacctgatccgcttccgcaggctgtcagggaaactgccattacgacactcagcagcatagctgttattttcttcttcatacttctttactctttttcttctttgtaaggatcacgactaccacacctgctgcaactaccactgcaagatatatgatctgctgtcctggtgctgcctgtttgccgctggcaatggagtcggatgcaaatgtcagggtatattcaatctcatgaggaacactcatggcggtagtgtctgcgatcacatccatcggcttatccataacagtgaccggaagttcaaatacagaatttccatctgtattaatggggtcataagtagtctctcccactttcatatagtcataatgagaactactccattcgatctgtgcatatgcacatccctcttttacgaccagagttgccggagatgtgatggttgcacgaccacttcctcctccaagaactacatcgatcttgtaagttccatcgctcatgtccactttcatgggctgagcttctgcagctcctgccagatccacgctggccaggtcagtctgttcttctgtactctctgccgcatagcttgtcatggaaatacctgtcactcctgttacaagcagtgctgctgtcagaattcctgtcaatttcatccagatttttcttttcatctttgtcctctctttccatagcacaacgacccgggcaaattgcccgggccgtccatgcgacagatctttcatcactggcttattctgccttcaccggattggtcacgctgactttgtgatcataccaggttcctttttcaccgatcagtgccacatcaaactctttgtccagagccggtaccggaatatcaaatccgtatacttcctcagattctccgtcactataggtaacggtatctgtagtcggctccagaagttctgctccatccttctgtgcatcttctgcaagacccggatagaggttcacgatcttcttggaggcaagtgacacatgaatggtcatcttgccgttctctactgtcaggacaccttttccatcgtttgcttcatttacatgaaacattccgctgtcagtgtcaaactctgcagtgtagacaccatcttccagcggtgctgcagtctcttctgcttcctcagttgtcgcttctgcttcttctgtgtcagcttcctttgaatcctctgcagcatcagccttcgtagtatctgcttcagcagtctcttctgtctcctgtgcaggcgcctcggtctgtgcgtctttgcttccacatcctgtcatgatggcacagctcaatgctgccacccccagcaatgtaacgatctttcttttcatgttctgtctcttcctttactttccgatgacagctgcggtgtgtgctacatagagatcctgaatagccgggatctcaccaagaccagcgatctgagtatctacgctgtcaaagcttccagaagccttgaactggcttaaccaggaatcagcatcctcacctgccatgtcgttatttgcatgatctccagccactaccatcagcggacgaagaacaactttcttgtaacctgcatcagcaactgctttgatcacattctcgcatgcggtctcttccggctcaccctctacggttccgatgaatacgttcttgtatcccagctcgtccatctgtgcctgcatctggctgtaggaaacttttgcagtatgggaagtaccatgtcccatgaatacaaatgcggttccgtcctctgctgcagcatctgtactgtcatatccagcagtcttaactgcctcagcggtgattgcttctgcaactgccttcttatcctcatttacagcagaagcgtctgctccaacctcaccaagcagcggctcagcgatcttaacagactcaaatttatcctcgtagtttgcaactgcctcacaaagctcatcgtactcagcaccatgcatcagatgggtcggctgtacaaccaggttcttaacaccattatctacagctctctcaagtgcctgatccatgttgtcaatgtgctcatcatcacgagcctggatatggttgataatgatctgtgcggtaaatgcacgtcttacagaccagtccggattagcctctgcaagagcatcctcgatgcctttgatatcagctacacggctgtcgttgaaagaagtaccaaagcttactaccagaagctcgttctctccgatctcatcctggttacgcggatcatccttggaagcatctccggtgtcgcgtccgaagtaatccggatcagcttcttcaccttcaaccagctctttctgagcatcagtcagagcatcccatgcctcttttgctgctttacaatcctcatcggtagtctcagttctttcctgaacgtagatcttatcgatcagagctgcaacctcgtctgctgctgcctggtcagcatctgcatcttctgctacatcctcagccggagcttctgttgtctcctcagtggtctcttcggtagtctctgccggagcttctgttgttgtcttacttccgcagcctgcaactaatgttgcggtcatagctgctgcacaaagaactgctacaactttcttcttcatgttttttctctcccttaaagaaatattttgcaatgatactgaagccgctaaataaaagggatgcgaaaaagacaaaaaccaacatgcgtgcgcagtcggtttatcgaaatctatctttcggtacaaccaaacctcgtgatctggaatatgtatttcccgtaccacagctggcaggtctcctgactcgcagttccacatagtctgtccgccttcccaagtctcctcagtggcatcatcgacaactactcgctgcatacagtgacgagatcgcacaggcctctcacctgtttccctattctccgcaaaatgcggcaccaactgtttcttatttagttttcagaactcattacgggtgtaagtataacactgtcttctccatagggcaagtgttaaaagaaatattatgaaactttccagagagcatttacccttttctgctgccttgcaatgtgctttgatctttgatatagttaggaatcatattttaccgtgaggagcacccatgttattacagattcaggacggcacgctcagcattggagcacagactgtccttgcacattttgattttgagatccgtggaaatgagaagattgccattgtgggcagaaatggctgtggaaagacaacactccttcgacttctggcgggagaactttcccttgaccgtgatgatcattccaaagcacagggaatccttacttctcgatccctgaccaccggcctgctctgtcagcaggctttttctgacaccaccattaccgtggaggaagaacttctcaaatcctgtccatgtcctgacaagtgggacagggagcgtttcacctgggaacaggaatatgaccggctcttcactggtttcggattttccaaggaagataagaagaaaaagctgtcacagttctctggaggcgagcagacgaagatcgctctgatccgccttcttcttgcccatcctgatattctgctgctggatgagcctaccaaccatctggatgtggagacaaccgaatggttagaagagtatctgcgccaatatgccggtgctgtggtcatggtctctcatgaccggttctttctggaccggacggctgatacggtctgtgaattccgacagcagaagctgatccgctatgccggcaactatacttcttataaagaacaaaaatccagagacctggcaattcaggaacggtcttaccgtcaccagcaggaagagatcgaacggctggaggaactgatcgaacgattcaagaacaagcctaaaaaagcggcatttgccagatccagaaaaaagatcctggagcgaatgccaaagatagaaaaacctccagtggaagattatcacatgttcaccggtgcattggaaccatccgtgcgcagtgccaagtgggtattggaggcagaacatttacagattggttatgacaagacactgctggaactgtctcttcggatccgccgaggtcagaagatcggtatcatcggtcccaacggagccggaaaatccacatttctgaagaccgtagcaggactgatcccacctgtcaagggaactctgacccttggtcaacaggtgctgatgggctattttgaccagcagaccgcagctctgcagtcagatctgaccgtggtggaacattttcatgaacagttcccgtccctgacagacaaggaagtacgccagactcttggtgccttcttattcacagggaaggatacagcgaagaaagtctcttccttgtccggcggtgaaaaatcccgtctggtcctggcagagctcttcaaaagctgtcccaacttctttgtgctggatgagcccaccaaccacatggacattcctgctaaagagacgctggagtctgcatttcgcgcttacacaggcaccttattgttcgtctcccatgaccggtattttatccgtcaggtggcagaatccctgctgatctttgatgaccagtccgtattctattatccgtttggatatgaacattatctggctcatcgaaaccagggttcaggcgaagagctggcagccagtctccgggcagaagaacaggcattgttaagcggacttcaaagtgtccccatgccggagcgccatcgcctcagagagtacagtactgagcagtcatacgaagactggcagctcagacttctggcagaacccatggagcagacccgtatggaactggaacagttctggaatgccagagatgagatccaagaatggacagatcccgcttatgctgaagattgcctcctcaaagagacagcccttaccgatgcttatacaaagtgctgtcttgcctggtacgacaagtgggcagaatttcatcccgagccggacaaagagaccgggctgctcccatcttaactaccatccataaccgaaatacgcatgcatccatgccccggctgctcttccaagcgccatgctcaagatcagccagggcatacctgtcttcaggcggatccttctgctgaacaccggcactgcatccacgatctccgtcagtgccatggcccaggttcctgtaaacacacccgaaaacagaccaaacgcgatcactcccggaagtccgatgggtaaccgaaactgatagacactgaacagatttccgaggataccgcctaaagccgccgcattttcataatggatcacataggcggctgtgtgggtcttgcctgcaaatctggagatcactcccagagcgatcagcagggcaaacattcctcctgccaccgccagtccgctggcaaaacccagaatacctgcaaataattctctaatccacatcaatactcgtctccttccggttgcagccctccaccagcgtggtgttgacgtcatcctcgtagagacgcatctgtacttcgatgggtgtcggatcttttgtgattcgttttccaccaaaatgattataaaagacgataatacccacagcgatccccacagaatacatgatctccatcaccgtaaatccattgctttcttgccctgtgaccagttcataggttcgggcaaatacctcatgcacccccacatcattattaaataccattatcgaaaatgcggaaccaaagaagatcagcacacagagaatactgacctttagccatgccagccggtcatgcgaatactccggcgattcatattcaataataaaatcggtctctcccaggttctggatttcaagatccggatagatctgatggatcagctccaccactttcatgatagaaaaaatataccggtcacttttctctgcctgtattttcaacagcttcagggttttcagccggtttttcttgttaagatccgtgcattccagttttgcaacatctcccagtctcacatccacatgatctacctgatgattccggtcaatcttcaaatacaggatctcactcatggttttcacacctccactttccgactttctgtgtcatctccatgtatctccttctctgtgatctatgtttcccacagtatgcccggaattatacgtgattatccacagaagccagctggattacccaccttccagccgctccctcattgttttcagaatccgtttctccatgcggctcacctgtacctgagagattcccatacgttcagccactttcgtctgtgtctgttcctgcagatacctccagatgatcagctttcgttctgactccggcaattcctccaacagctgttccaatactaccctgttaagaagcgcctctttttcccgatctccggcagatacacgctccccggcatttcgactgtcgatccgatccagcaatgagatctcgcttccgtcttcctgactgtaagtccggtcaatagactccacctccagccctgcatccagcgattccacgatctcttctctggacagtgcagtagcttctgccagttcctccaaggtaggctccctcccccaccgattccgatagttctcggtctcccgccggatcttccatccattttcctttaatgtacgactcaccttcaccagaccatcgtccctcaggaaacgcttgatctcccccatgatcataggcacggcataggtggagaatcgcacctcaaaggaacagtcaaatttatcgattgctttcataagcccgatggctccgatctggaacagatcctcgttctctgtacctctgccggagaagcggcggacaatgctccacaccagtcccatattctgctcaacaagctgtgctctcgctctctcatccccatggtgtgctctgtcgatcagacccatcacatcatccatagagactacctactcttctgcatttccaagagttttccgcatggtcactgtagttcccagccccggctctgactccacctgtacttcatccatgaaggcttccataaacataaatcccataccagaacgttcctgcttgggacggctggtatagagaggttccatagcctgatgaatatcggcgatccccacgccttcatcaataacctgtacctgtacggtctgatcttctgtcctgcagcgaacgatcacggtatgtaccccatcaggataaccatggataatggcattggtcaccgcctctgatacagcagtcttaatatccgccacctcttccagtgtaggatttaactgcgtcacaaaggccgccaccgccacccttgcaaatgcttcgttctctgaaatactgtcaaatgccagcgtcatttcatttttcatctgtcttcctccttgtccagcgaaatatactgttcaatgccggacagttccagcaccctctggatccggcggctcatatgacttatgatcacttttccgcccagtgcctccatcatctgacttctgccgatcagaagcccgatccctgcactgtccataaacatcgttcttgaaaaatcaaactccacttccgtgactggttctttccggatcatctggtccacctggatccgtatcgactctgtcttatggtgatccacctcctggggaagccgcaccaccagacgcgcaccctctcttattaaaaatcccataactgttctcctttcttgcccaccagcatcccatgcaaatattccccggcttttttcacataaaaagggacgttgtatttctacaacgtccctcacttcagggttcttcttttgtatattacagattgtccaagagaccttgagcatctgttgcttttctcgtattcgggaattcatccactactttctgatagtaaatctttgcattctctgtatcgccggatttctgataagatctggcaaggaaatacagagcatctccctggctgttatccagttcatagcatttcttcagatccgtgatcgctgtggcatagtcaccactctcataagctgcatatccggttctgtaaagagactgtaccgcactggttcccacctctttgaatacagcatcatagagaactcttgcatcagcggacaggctttcctgatctactgactggagctgctccagcgctccggctgcatctccatctgcatgggctttatatgctgccagcagtgcttcctgactcttcagcttattttctgcatcttttgcagtctcctcagccgcctgcgtcttctcctggagcgttgtcatctctgcctggagactttccagcgctgcagtcttggactctacctgatcgctgtactcagccactgccttgttgagcccgtcattatttaaccggtgctgtgcaggcaggatcagaaaccacataaccgcaacaccgatcaccagtccgatcaccatattgagcactgcatgaaaattactgttgtccttcacgcctaccggctgaatgatggtctcgttcccgctggtgtacgcgatggaatcctttttatgggcaatgaccgcttccttttctgcctgttttccaccagccgcatccacttccttcatataccggagggcacgggtattggtccggtcgatggccagcactctgcgcagctcatttctggcacgtccataattatccgcacgcatatagagcaatgccagaagcagatggcctttcagaagattcatattcgttgaaaggatcttcttcagctgaatgatcgccagatcatagctctgctgttcacagtataccagtgactggttgtatttccggatcgtcgtattgatcatctccagcttggccgggttgctctgaatggactcaatgtattcgtccgccaggttcttctccggctggaagctgcggctgatgatccactgtgacagggcatccaccacttctcccatctcaaaatataccagtcccagaaggtttctcgcatccgtgttcttcttgttgaacttcaggctctgacgcagagacatgaccgcaccggtcaggtcgcgcaccttcgcctttgcaagaccttcattgtaataagcattggacaactggagcattcttctgtaaagcttcacatctgccccacagtggctgcagtaatctgttgttttcagaactgctccgcagttaaaacacttcatatatccaccttttctactgacggttcttaatctctttgagcatctcgtccagcagatccgtcacatctgccagattatttttgtacacgttatcctccacctgatcgatctcagggcttggacggaattttttcagttcctcttcaaaatcaagcattctttctgctccttatcagacttttcaggcttcctaccagatacagggatcccacgcaaaagagcacaccgtctccctttctcttcatcgcctcatcaaatgcatcatcaatgaaagatatctcttccaccggacgagtcgtatatttgcggaagatctgagccagctcctctgacggaacctgccggtaagaatcaatctgtgtcaccacgacactttcaaaatccagactctcacagatggttcggatcatcccatcataatccttttcctttacgcaggaaaataacagcgtcagcttcgtgtccttctggaatttgcgggcagtctttacaaactcttccacaccggagtcattgtgggctccatccaggatcacaccgggaaggaccgtttccattcttccctgccagtgcatgcgctccatgccccgatgaatgtcttcctcggtcagcccgatatccatcacctctgcagcagtcacagcttccatagcattcatgatctgatattctgccacgctgtcgattgacacgtccataggttcataatacccagtatccatggaaaaatcaatcgttttatgggtgttcatcaaaattttatacatctccgggcgtatcgcataagccctggaatgcatctgggcggcataggcctcgatcacctcagagacatcctctctggtgccatcatagaccaccggacagccctctttgatgatacctgctttttctcctgcaatcttggcacaggtgtcacccagatactcggtgtgctccagactgatggaagtgatcaccgagatcaacggatgctcgattacattggtggcatcaaaccgtccgccaagcccggtctccagtaccacatattccatattcgctttgtcgaaaatgtagatacccataaggaacaaaagttcaaaaaaggtcgggtgtgcaaaggtatccggccgttccttcagaagagtatggaccatatccatcactgcctcaaaggcttccaggaacagttcattggatacattttcctgattaatctggaaccgctcattgatatccaccagatgcggggatgtaaacagccccgtctgctttcctgccgttgtcagaatggatgacagataggcgcagacagagcctttgccgttggagccggccacatggatcagcttcatgcggcgctccgggtgtcccattttctccagtacggcttttgtattttctaatgtattttttgttgtgaatctgggcgtatcattgatatacgcctctgcttcttggtaagtcatcttacgctccacttattctcccagctgtgccagacgctcttttacctggttcatcatctgggtgtatttttccttcttgtcacgttcttcctgaatctttgcttccggtgcacggctgacaaatttctcattattcagcataccatttacacgggcaagctcgccttccagacgtttaacctctttctgaagacgctctctctccttctcgatatctaccagttctgccagcggcatgtagatggctgcttctggaagaagggcagatacagcatcctctgcaataccggtcttgtctgcctgcacgagcacttcacttgcaaatccaagggctgcaaagaatacctttccatgctcaaagatatcgcggatctctgcattatcagataccacataaaccgttgctttcttactgttcggtacgttcatgctggtacgaacagtacggataccacggacagcctctttaatagtttcgatggccttctcctctgctgcgaagttccactcttctttatactctggccaggaggagatcatgatagattcctcatcagacaggttacagaagatctcctctgtgataaatggcatatacggatgcagcatcttcagtgcattgatcagtacatgcttcagagtccacagagcagctcccttggttgcatcgtcatcattccacagacgtggttttaccatctcaatataccagtcacagaattcttcccagataaagtcatagatcttctgaactgcaataccaagatcgaagttatccatgttggcagttacttcttttgcaaggctgttaaccttggacagaatccagcggtcagcatccgtcagagtattcagatcgatctgctccggaatctcagctttctccatattcatcataatgaaacgggaagcgttccatactttatttgcaaagtttctgctggcttctacacgctccatatagaaacgcatatcatttcccggtgcattgcccgttaccagagtcagacgcagagcgtcagcaccatatttatcaatgatctccagcggatcaataccatttccaagagatttactcatcttacgtcccagagagtcacgtaccagaccgtggatcagtacatgatggaacgggcattttccagtctgctcatagccggagaataccatacggattacccagaagaagataatatcatatccggttaccagtacatcagtcgggtagaaatactccagatcctctgtgttcttcggccagcccagggtcgagaacggccacagtgcagaggagaaccaggtgtccagcgtatccggatcctgcgtcagatgcttgcatccgcatttcgggcaaacctccggtgctgtcttggatacaacgatctcaccgcagtcatcacagtagtaagccggtatccgatgtccccaccagagctgtctggaaatacaccagtcacggatattctccagccagtgcagataaatcttgtcaaaacgctccggaacaaaggtcagatcaccatttttgatcgcttcgatcgccggctttgccatctcttccatcttcacgaaccactgctgtttgatcatcggctctacggtagtgccgcagcggtcatgggttcctacattatgaacatggtctaccacttttaccagcagtccctgtgcatcaagatcagctaccatagcttttcttgcctcataacgatccatgccgtcatatttgctgcccgggcagttgatggtggcatcatcatgcatgatattgatctcagccaggttatgacgtcttcctacctcgaaatcgttcgggtcatgagccggcgtgatctttacgcagccggttccgaactctttgtctacatacgggtcagcgatcaccgggatttctctgtctgtcaatggaagcttcagagtctttccgatgaggtgtttgtatctgtcatcatccggattgactgccactgccgtatcaccaagcagagtctccggacgggtggttgcgatctccacataaccacttccgtcagcgatcggataattgatgtgccagaaatgtccagcctgctcctcatgctctacctctgcatcagagatggacgtatgacataccggacaccagttaatgattctggaacctttgtagatgtatcctttctcatagagacgggtaaatacttccagaactgcctcagagcatccttcatccatggtaaaacgctctctgtcccagtcacaggaggaaccaatcttctttaactgctctacgatggtgcggccatactcttcacgccactcccaggttctcttcaggaacccttcacggcccagttcattcttgtcgataccttcttctttcagcttgttgatcacctttacctcagtggaaatgctggcatggtcagttcccggaacccacagtgctgcataaccctgcattctcttgtaacggatcagaatatcctgaagagtattgtccagtgcatgtcccatgtgcagcttaccggtaatatttggcggcggcatcacgatagtaaacggttttttgcttctgtctacttctgtgtgaaaatattttcttcccatccatttggcataggtccgatcctcaatgctggacggatcataagtctttgcaagttctttcataatctttctccttgtttcctttctattctataaccagctgtatatccagcgtatcctctgtatagctgtcattcagcaaaagttcttctgtgtctacccgggtgccattcaccaaccagtagtactgttccggcacttttccatcgtcccccggctgtaccgtaagagtcagcggataattgtgatagtacatgccgctgtagctctcaccaacatccagtcggatccggctgaatgcgatctgcccctgttccggtgcttccaccgtcagctcgtaaggatcggctgcccccagatgctgctgcagacctgcatggacttccacacagctctccgctgcggcttccttcatctcttccacagctgcctgttgtctggtacgatccgcatcactgtaatagatctccatggaatgagcaatcttcgcattttcctcatcgatcacttccagtacattgtcagctgcaaaaaccgtaccggtcagatcgcagaccatgttgacaaattctgtccgatatttatctgactgcatcaagagcgtcagtgtatccgtcatatcttcaataggctcatccatgaggtaatcaaatatgttctttgtctccagatctgttgtgtcctgatagactgcatccagatcatagaggaaaaaccgcactcttccatccccataagcactgctgctggtctctgcacatttccatgacagaaaattatggaatggccagtctacattattcataatgatattaactgcataatgccgcagcatatccggcatatccaccgattcttccagcttcgcctgccgcttgggatcattgaggtccgcatgcagtcgattgtaatattctccaaaccgggaactattcacttcgttgggctcatatttttcaatatcactcttctgcgctccaatggcagatgccacattgtaccgggtgtatttttcctgaagctgaatgattccgtaatactctccgttcaggaacagaatacccggtcttgctcctgcacagatgatgcctgcttccttcgccagtcggctgaccacattccatttgatcattgtcccttcatgatcggagccaccatttctgagaaccagacgattgtaggtctgccctgtggcatttcccgccatatcagtttcaaagaaatcatactcaaacgtcggatgctcactgtcatactgtgaggaagaggtcagtttaatactcttctggtcataaattctggaaccatgcccggatactgtgatcccggttccctgtttcagcatcagtgccccgtctgaatcataaaattcaatataggccggtctggtccactctccgttctctccaacctcttcataattacaaagaattccagtctccggatcgtaaagcgctgactgatccgcacttaaggataccagcatcacatcaaacagattttccacatcagcacctacaaaataggtctgtgtgtaggtcttcccaagaccgccgccttccagcacggccgccctcacaaccgtcaccttctccggcagtccctcttccacatggatcggttcggtatagacatccgaatccagcgtgggctcatcgccattcaatgtgtaatagatcttcgtccccggaattctggtggacagcttcagatcaaaggcttctgtctgaaatgcgtccttttctgaaaaccgcacttccggctgctctacccacaatcgaaggacacctattgacaccgtgatcagcaacaacaaaatcaggatcgcgcctgcatatttttttttcatattttgttccttttcctgtggtaagaataaaaaagccctctgcacagatctgtgcaaagggcgaatcatcgcggtaccacctttgttcgtatgtgttcacatacctcatttcccataacgcagggccaggcggaaatgactacattctggaatctcttccggctttctcatcatctcagctccgaagctaccttctgcctgtccgttaccaagccatcttccagcccgtggatgactctctctgaggtcggtgcctgcatactcctcttcttcctcacttttcccatatacggtactaagtttagatggaaacaaaggctttgtcaaggggtaggcgacttaacttttcttaaattatacagtgctcataccataaacaacgattacagcataaagaattactgtcactaatgtatgtgcagaaagactggtggacacatactctccgtcttttcccacatcagaaaaaatcggaataatgaacggtgccggaagtgcatagagaaccatcaatgcgatttccagttctctgtcgaacgggaacaggtggaaaatgatcatatttgccagaaccaacagtcctgccataatgatcagtcgcagaacaatcgtcttaagcaccggtcccagcagttcttttttcaagttcagctcgtagcctaccatcagaagaacaacagcgctgatcggtgctgtaatggtgctgatcagctggctgacgatacctcctgctgcagaattcatcaccagacttcctataccggtggcaccgagcacaataccaagtgccataccaaggaagcatttattggaaaacatatttttcaacaatgcttttgcatctactttttctccatctacagaagtcaggcatccaagccagaccgtgtaagcgaatacggtctgtcccagatccaccgctgcaaatccggactggctgcctacgatcagaccatacagtgcataccctaacattccgccttccgcgctggcaagcaggaatggaaggtattttccataaggtttcactgcaggtctcaaaacataaccaagggcaatcgcaatgccatatcctataaatacgaccaggaatacgacaaccacccgaacagaataagcggccgtgaaaaaagcgttgaaaagcattacagggagcataatatctcccagtaatgctttcaaacctttcaggccgttcatatcaaagatctgcttccggttacagaaataaccaattccgatcatcaccagtaccggaagcaccatacggatcacatcaagttccatttagtttattcctttatgagaattagtggatcatatcctgatagaattcgtaagcctctttatcagtaaatccttcatgtacaactttggcaactgcctgtgccatctctaccggatgctggctctggaagatatttctacccatatcaactccacgagcacctttggagattacttcataagcaagcgtcagagcttcatcttccggaagtttcttaccaccagctacaacgatcggtaccgggcaagctgcaacgatctcttcgaagttctcgcagttgtaagttttaacaagctgtacacccatctcagcaacaatacgggtagccagtttgaagaaacgatctgttctttccatttgtttaccaacagcaacaacacccatggtcgggatgctgtaacgcatacctgcattaatggtcttggaaaggttatcgatactgctcagctgtccatcagctccgataaatgtctgaactgccatacagtctgcattcatacggattgcatcttcgatatcaactgcaacaacctcatgagaaaggtcatcgttcagcatagaagaaccggaacttacacgaagtgcgattccttttgtaatttcaggcggtacacaggttctgattgctcctctggttcccataaatacgtctacgtacggtgccagtttcggaagcagcagatccagtctctccagtcctgcagtagatcccatgaaatatccatggtcaaaagcgaacattacagaatttccgctcttggtattgaaaatattggaaaggtgttttttcataccccaatccaggctgttagcaccttttacataaaatccttcctgatttgcaaaaggaactcctacatggtagtcttttgctactttgaatccgtctttatctgccatttttgttgtcctctcttcctgttaatcatccggcatttgccggccggcggtaggcccgcctctcaccaacgcaaggcggagtagatcaccccgccctgcgtcattgcagtgtcggtatgcggttaaccgcaggccggacatttttcattacttaaatttgatacaacttagaagttgtagttgtccatgttgctctcgtcgaatactgctctctccggaagaagtacaacaccgttgttgatatcgccagtggttgcaccttcagcgatgctgtcgttcggctcaacagttacatcaccgatgcccgggatggagatagtatcaccaactttaacatcgtttccagcagccaggtatgcagctacatagcagcccatagcaccctgaatctggcaatcccacagaccccactcatacagaacgcctgctttgcagtactctttgatggagttcggggaagcgaaaccagtgatggtgatatcgtctttggtcaggccagcgttctgagctgctttcaactgtcccggaagtgcggtagagtcgttgcagatgatcagatcgatgtcgctgtggtttgcaagtacggaagcacctacggtaacagctttctcagcatcctgctcgctgtagtagttgtctgtagctacgttaacccagttcggatagttctctttgatgtaagcttcaccagctacctgccaggagttctggtcagttacagttgcctgtgaatagtgccagcagtatttgatctcgtcagttgccgggtctttgcctctcttctcgagtccgtctacacccatgtcaaccagcattttaccaagagtctccggagttccctgagataccatcagcgcacggtcttcaacgtttgcgtcagagtcccaagtacaaacagtgataccagcatcctgtgcgctcttcagtgcatcagatacaccagcagcatctacagtagagatacagattgcatctacaccagagttaacagcctggttgataacctcaacctgctcagctgcacctgcagtagcatttcccatgtactcaacgttgattccccactgttttgcatattcctgagcaccgtcattagcggactcgaagaatgcattaccggtaaccttcgggatgaatgctacggtcattccttcgatggaatttcctgctgcatctgtagttgctgcatcatcagctgcatctgcagtatcctcagttgctgcatcctcagttgctgcagtatctgtggtagctgctgcatccttgctggatccacaacctgccagtcccattaccatggtagctgctaataaaacagccaaagcctttcttttcataaatctttcctcctttttttgatcagctttgatttatattcagggcggatcccttccgccctaaacatcacatatgaaataataaatattttatgcttcttttttcttcagttttgcgaagaaaccagccattgccggatttgctgccattgctcttcctacgactactgccagaagcaggatacctaccggaatatccaggtactgggttccgatcttgaagcagagcggaaggccaaaacgaagaagtccgattaccaaagaagcaagtgcggttccgatcacatttcctttaccaccggtacttaatgtaccaccaagtacaactgcggtgatgatattcaatgtaaagttagaaccaaggtcgcattttgcacttccaagataagcagtcaggacgatacctgcgattgctgcacttgctgcggaaagcatatatgtactcatgatgaccagtctgctgttgattcctgaatactcagctgcctgctgattgacaccaaccaggaagattcttcttccgtattttgatctgtgaagcaacagatacgcaataatgaccagtgcaatgaagatcagcaactgactggggatcagtccaaacagtttgtatttggacaggatcttgaagttatccgggaaaccgctgataccctgatagctttctgtagaagccatattggatacaagaagtgcgattcctgaataaaggaagctgccgcccaacgtaacgaccatggcctgcacgccacaatatgctacgaagaatccggacaatgcaccacagatcactgcgatcagaagtgcaaatcctgctgcagcccagatattgaatccgaaatcctgccaggtaacaccaataataatagaagtaagtcctacaatggagcccgcctgaatatcaattccgcctgtgatcataacaaatgttacaaacagagagataatacagatggacataaagtcgttcatactgttgaagagcattgccggacgaaggaatttatcattcgccgctccgaagattacaaactctgcaaccaaaatgcagatcagtaccatttcccagctcttcaggaagccttttaatttctgagagaaggattgattcatgattcagctcctcctttctcatttgcagttcctgctgttcttgctgcaagtctctgacgacggttcatttcagctgatctgcgctgcatcagtgcatcagcaactacgatcacgatcagcatgatacctgtgatcgcattatcataagtagaaccaaatcccatgaatacaagcagacgactgatacttgccatgataattgcaccgacggaagatccgatcacacttcccacaccaccagaaaggctgataccaccaagtacacaggctgctactgctttcatctcatatccgttaccggaagtggctgttacgaatccgatacgggatgagaatacgattcctgcgatagctgcgcagataccacagatcacgtatgcagcgatcttggtctgcagtgccggaatacctaccagagttgctccggatgggttatcaccgactgcgataaaatatttaccatgtttcgtatgtttcaggatcagatgaatgatgatgatacatacggctgttactgcaaagcagatacttaaagatccaaccagtgttgcagtatacatatggctgaatgcaggtggcaggttctctacccaggcaccgcctgtataaacatacatcatacctctcataacaccgttggtaccgagtgtaaagatcagggacggaacgcccatcaccgcaacaccccagccattaaacagaccaatcagagcaccgatcacaataccagtgataaatgctaccgcccagttctgtccatcacggagcatactggacactactgttgcaacaaatccaaggttcgcacctacggatacatcgatctcaccaataaatatcgcgaatgccattcctgcggatatgataatataaacaacactttcattaaagcaggcgatgatattatctgcagacaggaatgccggattgataattcctacgattgcaaacagagcaatcaggaaaatgaaactgctgaattctctggctttaactatctttttcatgcttccacctccgtattttttgtgataccgaaggaagctgccatcaggttatcctgattgatgtcctcacctgtgaattctccgttgatacgtccctgacatactgtcatgacacggtcggaaagctctacgatttcctccatatcggatgaaataagcagtaccgatacaccctgattacgaagctggtggataatggaatatacatctccacgggcacctgcatcgattccacgggtcggctcatccaggatcaccagtttcggtgaagtggaaaggcttcgtccgataacaactttctgttgatttcctccggatagacttcctgtgagctgagtctgtccagttaccttggtacggaaatcatctacatatttctgagtcatgcgatattcttcttttttattaaggaagaaagaacccatagacttgtctcccagcattgcactagtggtatttgctgccacatcactgatcttaaacagaccatgcagatgtctgtcctccggtacatagttgatacctgcttccagaactttctttgttgacagtccagttacatctttaccatccagaattgctttaccgccgagcactttatctcttccgaatacagtcgttgcgatctcggttcttcctgctccgatcacgcccgccagtcccaggatctctcccggatatactttcagggaaatgttgctaaatccataaccgctgtagttctgaagttcaaataccggtttggccttctcataatcgattgctttctgtgtggtttctgcagatgcctgctgattctggcttcccggcgggagcagaccttttacgagcatctctctggtaaactctgttaccttacctataataggaacgataccatctctcatgattgctacatctgttgcgatctggaatacctctgccatacggtgggtaatgtaaataataccgattcctttagctttcagatcttctacacatttgaagaggctctctgtctcatcaaatgcaagtgcactggtcggttcatccagaatcaggatgctggcacggcggagcagtcctcttaagatctctaccatctgctgttctgcaatagaaaggctgtttgcctttctggtcagatccagattccaaccaacttctttcattacttcaagaagctctttgtgaagttctgatgcttttttgtcaaatccaataacgatattctcttctaccgtcatatttgggaaaagcaatggctcctgcggtaccatgtaaataccatttgcaagagctgcactcgttttattagaagtaaccttctcccctctgacataaatctctccactgtcctgatggtaaattcccatgataatcttcatcagggtactctttccggctccgtttccaccgataagagctaatacctctccttcaccaagctttaagctgatgcctttcaggaccgcgttcatgccgaatgatttgtgaatatttctaatgtccagtaacaacttttccggcaagtaacttcctcccttcaaaaccattcaacaaataacaaatgttcaacagtcaaaattatgtttgactataatatacgctcctttggtatgtttgtcaacacctaatgctgtttatttggtacattccgattatttttttattttcatttttgtatattttgatttatctaaataattaaactgtaaacaacaataaagaatttgtcagtttccggaatgttattgacaccgttctttattcgtgatacactttcactgtgttaagaacttttgatttattttttaacatttgtttatttgaagggagggaattgctctggataatgaattttcatatgaagacaaacttctgaccaaggtcgcctggtactattatatagaaggatatacacagcaggagatcggtgaatacctgagcattcccagattgcgtgtaaaccggctactcgacaaggcccgcaaggctggtattattcagttttccgtaagagaaggggattccaagcggatgatcgtagagcgggagctgatcacacagtttggtctgaaggatgcatttgttgttccttctcctattaatgagcaggatattaatgaaagtgttgcacaggctgctgccatgtacattcatgagcgtctggacaaatccggttacattaacatgggatatggagatacttccagccggattctgaaccacctggcaaatatctgtgaatttccggtcaatgtcgtatctttgactggcggcgttaattattacctgccaaataccagatccagtattttcaatgcaaaactgtatctgacaccggcaccactgctcatggcatctgaggatattgtaaaagccatggaacaggaacccagcgtcagacagattcgtcatatggcaacactggctcagatgtctattgttggcatcggaggcgtagactccaatgcaacacttcttaccaatggaaccttgaatcacagcgacgtgctgctgctctccatgcagggagctgtgggcgatatgctgtgtcactttatagataaagatggaaatgtgattcagtcttcgctagaacgtcgtcttatgagtacatctctggaacagttaaaagagatgaacaattccatcggagttgcaggcggcaacaccaaagccgaagcaattctcgctgcattaaaaggaaaatatctggatgtcctgatcactgatgaaaccactgcatcaaacgtgctgcgactgaaaaatcaagagtaaaagtttcatatatattaaggagggttattatgtcacaacagtatttaatggctatcgatgccggaaccggcagtgtccgcgccgtaatcttctctctggacggcgagcagaccggttgtgtacagcgagaatgggaacacaaagaagatccacgttatcctggaagtatggattttgactggacgcacaactgggatcttgcaagagaatgtgtacagggtgttttaaaagagaccagtattgctccagaacagatcgctgccgtatccaccacctgcatgcgagagggtatcgtcctttatgacaaagacggcaatgagatctgggcctgtgccaatgtagatgcacgaagcgatgatgaagtaggtcgtctgattcatatgtatccaggtctggaggaagagatttatcagaaaagtgggcagacttatgcacttggtgcacttccccgtcttctctgggtaaaagacaagatgcctgaagtatatgagaaaactgcagaaatcggcatgtttaatgattggctaatccgcaaactgactggtgttgaagcaattgaaccaagtaatggatctaccactggtatctttgatcttcagagccgcaagtgggatccgagtatcgctgaaaaatgcggtcttcgcggagatatttttccaccggtagctgagccaggaaccatcattgcaaaagtcagcgcaaaaggtgctgccgataccggactgaaggaaggcactcctgttgttgttggcggcggtgactgccagcttggcaccatcggtgtcggtgctaccgagccaaatcaggctgctgtatttggtggaagtttctggcagtatgaattcaataccgccagtggagcaacagatccgcagtgtcgtgtccgtgtaaactgtcacgcagtacctggtgtatggcagtatgaagcacttgcattcaaacctggtcttgttatgagatggtttcgcgatggtttctgtcagtacgaaaaagaaaaagccgccgcagaaggaacagatccttacaacctgatgaacaaagaagctgaaaagattccggctggaagctacggtatggtatgtgcattcagcgatatcatgaacttcattaactggaaacatgcagctccaacctttaccaattttgaactggatccgaccaagttcaaccgttacaccttctaccgtgcaatccttgagaatactgcacttctggtaaaaggacatatggaactggtaaaagaagcaaccggaaatatgccatccgagatcatcttcgcaggaggtgcttccaagagtcctttgtggtctcagatcctcgccgatgtcttaggtatgccggttcgggttccggtagtcaaagaagcaaccgctcttggcgctgccatcattgccggatacggtgttggtctctacaacagcattgaagagggtgcaaagcgaaccgtaaaatgggataaagtattcactccgaatactgacaaccgtaaagtatatgatgacctgtatgagacctggaaaaaggtttacgcagctcagctcaaacttgttaacgaaggtgttaccaaaccaatgtgggttgcacctggattataaaccaaagacttaaagtgtaagaatgaaaggagtataacaacatgtatattgttgatgaaaaagataaggaatacagatttggtgacagcggccccaaatatctcatgaagggacctcgtatgaactttgcacttgttcagtttatgccgggacaggatttcaaagctcattatcataacgtgatggaggaaaacttctacattctggaaggcgagattgatatcgtggttgatggtgttgttaatcatatgtatccgggtcagatgatccacatcgagccaggcgaagtacactactgcaagaacagctatgacaagccgatcaagatggtttccactctggcaccattccaggaagttgataaagtcgaagttgaaaattatacatattaattctgccatttttaatttttcccaaataagagccaggtcttcgcagatctggctcttattttatgatttgatcaaaaaagctgtcacacgaatctcgcatgacagcctttcttatgctctttatcagatgtcttctacttagcaaactccctgagcaagcatcgcatttgcaactttctcaaatcctgcaatattcgctccggcaacatagtttccttccatgccataacgttttgcagcatcatcgatgttgtggtaaatgttgatcatgatctgctcaagtttctcatttacctcatcgaaggtccagctcagacgctcgctgttctgggtcatctccagtgcggatgtagctacaccacctgcattggatgctttaccgcatacgaacagtacgccgttatcctgcagatatttggtagcttccagggtagtaggcatattagcaccctcacaaacagcggtaacgccgttagcaaccagtgcttttgcatcatcgatcagcagctcgttctgtgttgcacacggaagagcgatatcacatttgatctgccatactccacgaccctcatgatactgagcactcggtcttgcagctgcatactcggtcagacgagcacgttttacttcttttacttctttcagaagtgccacatcgattccttccggatcatagatccagccagtggaatcagatacggtaacaacttttgcacccatctgctgtgctttctctactgcataaattgctacgttaccagatccggatacgcagcagaccttatctttcatatccatgccatggcatttcatcagctcacgggtcaggtacagaagtccgtaaccagttgcctcagttcttgcaagagatccgccgtaggtcaggccctttccagtcagaacaccttcatacagtccggtgattctcttgtactgtccgtacatataaccgatctcacgtgcgccggttccgatatctccagccggaacatcaacgtctgctccaatatatttgtaaagctctgtaataaagctctggcagaatgccatgatctctctgtcagatttgcccttcggatcaaagtcagaaccgcctttaccaccaccgatcggaagtccggtcagagagtttttgaatacctgctcaaatccaaggaatttaataattccgatatttactgacggatgaagtctcagtcctcccttgtacggtccaatcgcattgttgaactgtacacggtaaccggtattcacctgtacctgtcccttatcgtctacccacggtacacggaatttgatctgacgatccggctcagtcaatctctcaagcagagcttcttttttatactgctcctcatgtgcctcgatcactggtcttaaagactccagtacctcttcaacagcctgcagaaattccggttcagatgcattcttagcttttactcttgcgagcacttcatcaacataactcattttcttcgatctcctctgtcgtattttgtgtttgcatttcaacgttaataattttattacgatttttctggttttgcaatattttttagacggataacgaaaaaaatgaaaaatttttagtctgaattattctgtgagttgcaaataactgctgacgcaat

SEQ ID NO: 2546 - DNA, 2134 bp, Unknown
  16S sequences of unknown bacteria
tccctgaacagctacgctagttcggaaaagggcgccccacgcggagtggaataattaaatcgaaagagcgcagctctttcttctattccctcacttagaatttaagtgaaacttacatcagggaagtctcttagaaggctatagtcgtctgaggtagaaaggactacatcctttcaatcagctcattcacagcttcgcgcagctcatccacatagtcctcgtcgtgggggtagtccgagaacgtcacttcgcctctcgattccacaagcgcaagcaccgcttctcttccggcaagctcttccgcaagatccattgcgcgtctgtcgcagagagccattgtgaacgccttcatgtgcagggtctccatcggcacgccgttttctcccggatacaccgcgaagcagtctcccgcaggcacgaagtagtctccgtcggtcactgcaaacggatttatcgaacgcgtggagccctggtcgttgtagaagttatagccccactgtaaaaatcccgcaatgttgtacttccagaactgcgcgcctattactctcgttctctgtgacggcattgccaccatgcggttcgataccttgtacgtctgtccgcagcagtagtatgtccagaggttcttcacgccggcttcgatgaacggctcgatgtggttgttcgcgggaatgggattctcgagcgcgcccgtcttatagaactcgaagtcggagagcgcgtccatgattacgtagtccgagatgatgtcgtttatctgcgccttggcacgcttatagttttcgaggtgtacgaggctgggttcgtccgagatatggtacaggcactgcttatccacgcccagacgcttcatttcagccacaaacgcggtgaggaaggttctgaggaaggttttatactcctcggagaatgcgtcggtttcccatccgaaaatacggcggtactctccgttatcgtatgccataatcttcggagcatgagctgcgccccactgtgtatagaggtgggagacttcaaaatactccactccggcgcgctgtgcagtctctacccatctctcgagcttatcaaatccgaaagcgtactctccgttctcgcggtacacgtcgacgagctgcactgtgcgtctttctcctccgacggcagtatcgagcgggggagtgaatacgggggtaaggacggtattgattccgttttcggcagcggtgcgcatgaatttttcgatatgatcccaatgctgctcgctgaaggtttcgaggttatagtagttagcgatgcagtcggtatggaaccactcggtaacaatcattttctgcttcgggaggactttttcgataacgtggacggtatatatagcttccgccgccgtttcctctccgcgtttcagagtgagggtgacggggtagtctccgccggggagattttcgggaatttttacggtgacgaagagggatttcagctcgccgtatgtagcgaagacggtattacccggtgcgaggtcgcggagaaggtcggggtaaagaccgggagttttgcggaggaagtagtcgtcggacgagggataagcggggtatctgacaggaatctgttcaacctgacggacgcggacgaactctgcgaggggggaagatacggagagggtgagccaagccttcggggattctgcggggtcgtcggaggtataggcggcttcaaagcacacctcttcgccgagcagtgcggacgagcgggttttctctttttttgatgaaaacggctcatccatgaagcatttctccattgcggaaacgagtttgagcaaaatggacatgtttgtgggatctcctttattttaatttatttttctttttttatctatcaaatttagtttggcttaatcttttcggaaagattgaaaggaagaaagactccgtctttcgatttttattatatcgactgcggtcgaaggctgccactacgcggaggtgcgcaccgcacttacatagtaagtgccagagacatcagacgccgactccttgtgaatctacgctcgcggtggagtatggcgaatatgattagcttcatcatcgcccacttcaacagaacagtcgcgcggctacgcataagccttagtagtggcattagaatgttcgcg

SEQ ID NO: 2547 - DNA, 24832 bp, Unknown
  16S sequences of unknown bacteria
gtattttgatttttagggccattgtgggacaccacaatggccggtgaccggccccagtgcccgtccgtatagagggcccttcaggggtcggtccggagttctttttaggaaagccggcgggtacggaatcttttgaaccaacgcccatacataaaacggctacggccccgagggcttggctggctataaaatcaatgggcttgtgaccaacccattccccggggttttggggtcctctccctgtatacccattggcttgcgtattggcgaagcgcgtgtccagcgatataagccttcagcgtatgagggtatagggacatatttcccatgcggagtattttttgatttttttcgtcccttcccttgacatttgggggcggagtgtctataatttagacgttgtccccaaatgcgctcgtagctcagctggatagagtgtctgactacgaatcagaaggtcaggggttcgaatcccttcgggcgcgccaagtaggagcaagcgatgtgtcgcttgctcctactttttatgcaaataaataaaacaacggccgtgggggatggataccatattgtagcacttgatcgtttatggtacaatttaagtaatatatcaagaggtgtttttatgaagggattaaagacattaacagcagttcttttgagtgccgttctgttcctttctggattcccgatctatgctatgggaagcggactggaccttccgattatagaagacggcggcacaacatattataacgtcacttccaaggcggatttgaaaacggctgttttatattgccgtgacaatttcatggatcaacttcccatctgttttgatgaagataaacgggattgggatgatgcttacggcagcaatgtggtaaattttctagactattacaccaagggctttttcacctatcggcaatacagtgtcaacaccgtgattgcatatggaaacagcgcgaatcaggaacaggttttgggggcactggagctgtcttatatcgacacgccagatgaactgaaaaaagcggatgacaaaatcgagtcgatagtgtccggtatctcgtccaaatccacctatgataaactgctgtatattgctgagtatgtttgccagcaaacggagtatggttttaagcagctgccggacggcgggtacgatgcgatcaacggtgtttatgacgtgctcagcggtatccgcaccaatacggtatgcacatcctatgcgctgacgttccagcgatttatggaaaaggctggaattaacagctatattcttgcaaacggcggcgttcatgcttggaatatcatagaacttgacggcaaatggtatggggtcgactgtacgtttggtgatttgggcaactcatttgaccggaagtatttcctaatgggaaaaaatgagatgcagatgtataatacaccgggcgccaacattgatccggtcgctgtctttgcaaaaaatcataaggtttctgaccagaattacagcgcttcttcgaatcccccaaagcccacagaaagtcgtgtaacgtccaagccatccgaaactttgcccacagaaagcaacgtgacttccaacccgtctgatactcccagtgaaagtgagataaacagcagtgccgggagcagttatacggaaaaaatgccgacagacattgttatggttgatattgttcaggagccgataattagccgcactgtatttgaacaggctaagcaggcggggctggatctaaaactaaacggagatacatacagctggaccttttcgaaggaaacattggcggaaattacagattttccggagtcttttgatgcgggaattttgctaaacaatgcgctggccggagaagatcagcaaaagctgaagagcatggcaggagagctgccctatttcggtttccagttcgtctatcacggtgcattgccgggaaaggcaaaaatcacattgtcacttggaaaagagtttgcaggcaagacggttactgtttattcggtatctgacagtggaaaacctacagcagaagcaaacacgactgtcggcatggatggaacgctgaattttgacacggatcactgttcgctttggtttgtctccgacaaggatatgtcagccgaaacggaatcaggcggtatgagcgtctgggtatggttcatagtcatatcggcggttgtcatggttgtcgctataggcggattttgttggtggtattttatttgccggaaacagagggggcagaagccgacgcagataccataacctgaacacaccgttgagattccccctatcaagatataatggacgataatagccccgatatgccagcagcgtccggcaggagctgctaaaaaggcggtgatgatttgaaggatacggcttcaaaagaagcagcggcggtctataaggagtttgatagaaagcgccaacgaacgatccggcgcgtatccatttcatttctgattatactcacatgtgttttgattagcttgacattcgtgacgtcatcgtatattccgctggttatttcagccgtatcccttttcgcatatggggtagccgcgaggatacgatgcagaaaactcgattccacacacaagtctctatacgcagcggcttatggggaacagacagagtctgttcgtacgggaattttcaaagatatttgggaggaatatcaggacaatcgatttgagagattactggagatagagagtctcgaaattgaatttgaagtggcatacgacaataccatagaagttgaggcaaaacggcatcatcataaatggtttgttttagtcgatgaacagaacttgcattgttcagtagatagagagacagaagaagcgatggaacaaacaacaccactccaaaacctgggcggtatcgatggcttttatgaagccgttgccgggttcatttcgacatattcatgaacatggaatgagaggccgtgctcctgatgagcattcggaagggatccttcgcgtatcgggccgccacggatggaagaagccggctattcaacggatagccggcttcttttccttgctgtgatacgataacacggccatccatataccggttcgggttttccgtttttccgccgcctcctgactggcgttgccaagcgttccggacttcagccgggggcaaggagaggctctggatcagccgtggcagatagctggggatgatgtccagtatctccgcggccgcggcagaggggaatacgggcctggtgtccgatgtatgaccttcgcctgcttccttttccgtatatcccgtcgtacgtcaacaccgaaaaccccgttcccttctccggggccatcgacgggacggcggaattgtggtaggattatgcctgatggaaaaatgtatacacggctgcaataaaaccggctgttccggtattatctatatgaaaaggggtgaatccatgcagaaaaacgcgccatcgggaaagctgaccacagcggagagggacgcctctctggaccggtgcctttcggggatcgcggacgaggatcccgccgccctcgaagagctttaccgcttaaccagtgcgccggtgtatggatacgcgctttcctttttgaaaaacgcccaggacgcggaggatgtgctgcacgattgctttgtcaacgtgtatgtctcggcaaagggatacgattcctgcggcaagccgatggcctggctgttcacgatcgcccggaacctctgcctgttgcggctgcgggaacgcggacggacggcggatatccccccggaggactgggaggacggctatggtcacgccgcggatgtcggcccggacgaccggttgctgctcgagcactgcatgacgcggctttcggacgaggaacggcagatcgtggtcctccacgcggtggcggggttcaagcaccgcgagatcgcggatatcatggacatcccgctgccgacggtgctctccaaataccaccgggcgctcaggaaactcagaacctttttggagaagggagacggacaatcatgaccaatcatgagatagaggcgaatctccggcgtacgttcggccgtgaggctccggacgcgctgccgggcatcctctcggattgtgagaaacagaaaggaaccgtgatggtgatggaaaagaaaaaacggaacccatgggtcatgcggacggtgggcatcgccgccgccgttgccgtttgtgtgatgggggggctcggcatccatttgtacggctcccgctttgccgtggaatcgactgtgtctctcgacgtcaacccgagcatcgagattcaggtcaacgcgaaggaacatgtactgaaggtggaacccaaaaacgaggacggccggaaggtcgtgggagagatggacttttccggcagttccctggacgtgaccgtcaacgccctgatcggctccatgctgcgaaacggctatctcaatgaaaacgccaactccatcctcgtcagcgtggatacccgggacgccgcgaaaggctccgccctacgggaaaagctggctggtgaaatcgacagcctgctccgtaccgacaccttcagcggagccgtcctgagccagacggtggcggccgacgccgccctgcagcagctcgcgcaggagtacgggatttctttgggcaaggcgcagctggtccaggagattgccgcgaaaaatcccgcctacacctttgatgcgctggcgcggctttcgatcaacgagctcaatctcctgatggcgcagaatgcccaggtggagacggtggcttcttcgggcaaggccagtgacaaagcgtatatcaccgcggaaaaggcgaccgcgctcgccttggagcacgccaacgtgtcggctgacctcgctgtcgtcagagaagccaagctcgataccgaggacggcgtcctggtatatgaaatcgagtttgaagccggcggatatgaatacgaatacgatatcgacgccgccagcggcgcggtggtcaagtttgaaaaagaacgcgacgacgatgacgccccctcccagggcggcaatccggggagtgcgccggcgggcgatatcggcgaggccagggccaaagaggccgcgatgtcccatgccggtgtggccgaggccgacatccgggattacaaaattgagcgggataccgacgacggtgtcggggtgtatgagatcgagtttaaagccggcgggtacgagtacgattacgagatcgatgctgccagcgggtccatcctcaagttcgacagggaacaggacgacgatgacagacgtccgcaaagcgcgaatccggggagtgtgccggcgggtgatatcggtgaggccagggccaaagaggccgtgttgtcccacgccggtgtggccgaggccgacatccgggattacaaaattgagcgggataccgacgacggtgtcggggtgtatgagatcgagtttaaagccggcgggtacgagtacgattacgagatcgatgctgccagcgggtccatcctcaagttcgacagggaacaggacgacgatgacagacgtccgcaaagcgcgaatccggggagtgtgccggcgggtgatatcggtgaggccagggccaaagaggccgtgttgtcccacgccggtgtggccgaggccgacatccgggattacaaaattgagcgggataccgacgacggtatcggagtgtatgagatcgagtttaaagccggcggatacgagtatgattacgaggtcaaggccgcggacggtgccatcctgaaaaatcaaaaagaaatcgacgactgacgtatcgtccatcgccggccggacatgggatgcatgtccggccggtttctgccgccggggataccatgttatgcccccatccgctatcatgaaccgcccttcggccgcatatgtttgtagggaagaaggagggactgggcggggccgaaaggaaaaacgggcggaaacggccgccccggcccccgtgcggacctcggatactgctgagaaggggttatgacacatgaaacgtggcaaacgtctgctggcggccctgcttggaggactgctcataggcctgcttccgctcggggccctggcggaggaagcaccggccgtgatcgtggatatcgaggggggcgaaacggcggaggcgctgatggcggaggacgcggacgaggtctgggaaccggtcgggaccgtccctgccgacacggcggctttggatgtcgggggcaagtccgctgttctgatggaacagtcgagcggcgatatcctgttcgagaaaaacccgcatgagaaaatgccgatcgcctcggtgaccaaggtgatgacgctgctgctggtgatggaggcgctcgatgagggcctgatcaccctcgatgagccggttacctgctcgcccacggcggcttcgatgggcggatcccagatctggctcgaggtcggtgaggtgatgacggtcgatgagctggtcaaggcggcggccgtggtgtccgcgaacgacgcctgtgcggcgctggccgagcatttgtcgggttccatcgaagaattcgtcgcgcggatgaaccagcgggcggccgagctcgggatgaacgacaccctgttcctcgattgcagcggcctcaacgacgaggcgtattcctgcgcctatgacgtggccgtgatgtcccgggagctgatgaaacatcccaaaatcaccgattataccaccatctggatggacagcctgcggggcgggacatcccagctggtcaataccaacaagctcgtgcggcattacgccggggcgaccgggctgaaaaccgggacgaccagcaaggcgggacacaacctgtcggccacggcggaacggggcgggctcgcgtttgtcgcggtcatcctggggtgcgagacgacggacgaacggtttggcggcgcccggaagatgctcgactacgggtttgccaactacagcgtatacacgcctcaggtggataccgacgcgcttccgtcggtgccggtgctgcacggggtgtccgagagtacgattcccgtcgccgatgagatacgccccatccttctccgcaaagggcaggagaagcaggtgacctgcacgacagagatggcggcggatctggaagcaccggtatatgagggccaggtaatcgggcagatcgtggtgacgctggaggggaagacaatcgccgaatatcccatccgcgcgtcggaggccgtggcccgtctcgggttcggcggcgcgttctggaagcttctgtgcgcgctgctcggctgacagcgagaccgctttcagggaatttaggagatgacacggcccggggcatccgctgtaaacggatgccccgggttcacgttatccgcgggcgcatccgtctcccgatccggccggaccgctgccattccgtcgggttcggcgcgatttggccggagtatatggcgccacgataccggcaaaagaaaacggctttctccgggtgggacggcggggatcaatccgttttcagacattcctattgagaataatacagtatacgatataagcattagacatggaaggtcgggcgcggtatactggctgtggaagcgggaaatggcggaccggccgggaccgatccatcggagccaggccgatgcgggaaagccgccggcatgccgctttgcccctgccgtcggagggggttgcccgcgccgaccggccgtataggcgatccgggcggcatccgacaaaaatatggtttggatcggtttatgaacatgcttttcgatttttacaatcccacccgtatcctgttcggcagcggaaagctctgcgaactgggccgacagcccatgcccggaaaaacgccatggtgctgatttcaaacgggaaatccacaagggccaacgggtatctcgaccgtaccctccggcaactggatgccgccggtgtgggatacgccgtgtttgacgggatcatggaaaacccggtcaaggacgccgtgatgcagggcgccgcgttcgccaggaaaaaccggtgcgatttcatcgtggcgctgggcggcggcgcagtgctggacgcctctaccgcgatttccgcgatggcaaccaatgacggcgacctgtgggattatgtgcagggcggcacgggtaaggggcgtccgctggccaatgcgggcctgccggtcgtgaccatcgccaccacgtcgggtaccggctcggaaatcaactgctggggggtcatctccaatccggaaaccaaggaaaaaatcgggttcggtgatccgcggctcgtccccgtgctggcggtcgtcgatcccgagctgatgagaaccgtgccgccggcctatacggcctatcaggggtttgatgcactgttccacaacacggaggtcatgatgtcgaagggggtaaacatcctcagcgaaaccatcgcgctgtcggccatcggccatattgcccgttacctgccccacgcggtcagggacgggaacgatcttaaggcccgtgagcatgtcgcctacggcagcacgatggcgggcatcaccatgcagctgacctccaccaccgctcagcacagcatggaacacgccatgagcgcctatcatcccaacctgccccacggcgcggggctcatcatgatttccaaggcctttgcggagttcttcatcgagcgccacgcctgcgacgggcagtttgtcaagatggcacgggctatggggatgcccgaagccgacaaggccggggatttcgttacggcgctcgtacggttgcaggagatgtgcggcgtggccggcctgaaaatgagcgattacggctttgccccgggggagtccatgacgttggccaaaggcgcacgcgcgatgcagggcggcctgttctccgccaatccctgtgacatgagcgacgaggactgcgccgcggttttcgacaagtcctaccggtaacaatacggggcgtgccgcgggcccgggacggccctccaaaaagaaaagccgccggcggcggctttttttattatatgtccgaatatcccgcagcggcctgctggtttaccctttggcgtcgtaccaggtttttccgatgccgacatcggccgacagcttgaccgacagcgatgccgcactctccatctcctctttgagcagggccgcggcgcgctctgcttccgcctccggcgcctcgacgatcagctcgtcgtgcacctgcaggatcaatcgggcctgcatcccctcctccgacagccggcggtgcacccgcaccatggcgagtttgatgatatccgcggccgtgccctggatcggcatgttgcgcgccaccctttccccgaaggaacgggtcatcccgttggaggcgcgcagctcgggcaggggccgccgccggccatagagggtcttggcatagccgcaggccttggcctcctcgatcagccggtccataaagccggccaccgccccgtagtggcggagatattcttcaatatacgttttcgcctcggcatagctgacgtggatatcctgggacagggaatgggccccgatgccgtacacgatgccgaaattgaccgccttggcgcgggagcgcatgagcggcgtgaccatctcctcgggcaccccgaatacctgggaggcggtgatgcgatggatgtcggcgccggtgttgaaggcctcggtcatggtcgggtcccccgccatgtgggcgagaacccgcaattcgatttgggaatagtccgcgtcacagagcacccacccctcccgggcccggaaaaagcggcggagttcccggcccagttcctgccggaccgggatgttctgcaaattgggctcagtggaggagattcggccggttcgggtctcggtctggttgaaggaggagtggatccgcccgtccgggccgatgaccttgagcaggccgtcgcagtaggtggacttgagcttggacaaggtgcggtaatcgagcagcatctccaccaccggatgggcgttccgcaggctttcgagcacgtccgcgctggtggaatagccggttttggtttttttcttagccggcaggccgagatcctcgaacagcgccaccgccagctgtttcggggaattgagattgaaggcatagcccaccgcttcggtaatctgctgctgaatcgcggtgatccggtcctccagcaccgcgccgaaatccgcgatgcccgtcccgtccgcctcgaaaccgtcggcctccatatccgcaaggaccccggccaggggaatttccatgtcccggagcaggtctcccatctcccgctctgcaagctcccgctcgaaacggtcggaaaccggggggagcgcggcggcctcggccggcaccccatccgccgcgggcggggccgcttcatattcctgcgcgagccgcgtgagctcgtagcccgaggccaggggattgagcagataccccgccagcatggtgtccatcgtgacccgccgcagcgctggggcgccgccggtcgtctcgtttcgcagcagggcggccagcgtcttgacatcgtgggtgcgtttctccaccgtatcgtcccgcaggagggagagcagccggggaaaggcggggtcctcccgccccatataggccgccgcccggccggagcctgtatcggccatgcaccagcagccggcgagcatcccgtcgccggcggccggcaggatatccaatcggcaggtgctctgcgcggcatccagcagcgcggaggccgggatcaccggaagtgtttcgggttttgccggggcggaacccgcgcccgcatccggagacggcaccggctggggatcatccagccccattttttccatgagcttgaaaaattccaggcgcgccatcaggcgggcgagttcctcccgttttgccgggcgtatcacataggcgtccatgtcggtttccaccggcgcctgacggcagatggtgccgagctcccggctcagataggcgctgtccttcccggcggccagcttgctgcgtaccccgtcccggatctccggcgagtcgatatgcgcgtacagctcgtccagggtatggaacgtgtgcagcagagcgagggcggtcttttcccccacccccggcacccccgggatgttgtcgctcgcgtcccccatcagggccttgagatcgatgagctgggcgggcgacagcccgtatttttcccggatggcggggatatcgtaggcggaggtgtcggggcggcccattttggtcgcggccagcagcaccgtcaccttatcgtccacgagctggagggcgtcccggtccccggtcgcgatgaagcagtccccgccctgctgcacagcggcggcggagagggtgcccaaaatgtcgtcggcctcatagccgtcccgctccacgacggcgcagcccatcaggccgagtagttccttgatgaccgggagctgctcggcgagttcctccggcatccccttccgcccggctttataggcctcgtaccgctgatggcggaaggtcggcgccttgcggtcgaacgcgacggcgatccggtcgggggcggtctggtcccgcagcttttgaaaaatattgaggaaccccaccagggcgttggtgtagtgcccgtccttagtggtgagcagcttgatgccgtaaaaagcccggtttaagatgctgttgccgtcgagaaccagtaaacgcatagtctgtccgccttccgtcgagttgtctttcgcgatcgactatcagtatagcacgaatgggcgtggattgcacggtgtatccgctaatccgcccgatacagggcgaaccgccgcttcccgatcttctgcttctggagccgctgccatccgggaaaggggggaagggcctgtgtggcggacgcgcagagcgccaggaccccttgcggggccatggcggcccggatctgcgccgctaaggcgggcaaagggtcgtccgcctccccctgccagggcgtcagccgaccgtaagggatgtcggtgacgacgatatccgcccgcagctccagggcctgcgggcagggaggcgcgcaggcgtccgcctggaatacccgggtgggcagagggactgccggaaggcgggcggccagccgctccgcgctctcgacggcgtcccggtgggagggtttcccataggcggagaacagcgcttcgagccgctgccgccggcgcaaaagcccctcccgcgacagcagcgcgaggttttgctccgccgtccgaagagcgtcggcgtcgagatccgacccggccaggagggcgaccggagcggaagccagaaacccaattaccgtcaacagggtgcctcccccgcaaaagggatcgtacaccaccagcccctcttttttgggggccagttcccgggcgcgcccgaacagctccagggccagccgggccggaaaaggcggctggccgctccggtgcagcagtacccggccgctggcgacatcctcatatccccctgccggcgcgaatcggtattccatcgccgcacccctctcccgcggcggaggcgtcctccggcgcgctatgctttcagcatagcccaaaaggcggaggaaatcaagacatattcacccgacacccgcctcctcgaagctggcggtcgggctggtcaggtcgaagcgcaggtgcccgtcccggaaaaagcggtaccggacggtgcagcgggcgtgttcatggatggtacgggccatccggccggtatccggggccataaggggatgcgcggacgcctcgagcagcgcggcctccagccgggttcctccccgttccagcaccacccgcccgggctcccacacagggacccgggcccccgtataggtcgccaggcggatttcccggccctggtcccacaccgaggcgaggcagccggtaaaatggagccccagataggggatggtcgccgccgacagcatcacgccggccgtgcgggaggcgaaggtgttgcactgcgtccaggtataccgttcggggaaggaacggccccggtccccttcgatatagccggttcccccgtccaggcggcaggtccgcccgttcaagcggagccggccggaaaggctgtggccgaggctcagcacgcgatggcggcattccatccccggggcaaagcggaacggccccatgatatcgccccggggaggggtgaggaacccgtaccggatggtcccgtgcagggagaggccgggcgcctccacatggaggcgcgccccctccggcgtgaacagcgaatccccgacccggacggccggcggatccgtcctctgtccgaatgcctccatcgggtaggggataaaccaggagccgtcccgcccgatcacctgcagaaacgcgccccgcgcccctgtttttggggcagaaaaaccgggaatcagagccagggtttcctccccccattgatgcttgaaataccatccttcgaaatagggcccgccggattgtcccatacacccgcctcccaactgtattcctgtccagtatgggcattcccggcctgaaatatccggcggcagggcgatctccggacataaaaaaagcggaggctggcctccgctttttttatatgccataccgccttcaccggataaagtccttgagcctcagcaggtcctccgcagtcatctgcataatccgttccatcgcctgccggcgcagccgttccggcccgcccgctggcccctggccggtcatgacccattcggcggaatagccgtacagggcttccaccagcttggcgagggtcggggatacctgcgtttttttgccgcgcgccagcagggaaatatagttggcgctgacccccagggcctccgccagctcggtctgcttgagacgctgttcctccagaatcatccggaagcgggcggccaaagtcgtatccaaaatatcactcctcgtgtatcatgttcagctctttcatcatatcgatgtaaaccagcagctctttgcgcgtcgagacgttcagcttggcgaaaatccggcggttgtgcgtcttgatggtgttgatcgacaaatggagctcatccgcgatctcctgcgccttgtatccgcgtatgtacaagtcaaaaactttccgttccgcctgggacagggttttgacgttttggaggaactgctcgaacatgggcgcggtttcatccgggggcggggcgatggcgaggctgcgttttttcagctcttcgtcctgctgggtgaggaattccatcaggtcgttgatttcgaggtagggagttttccccggccccgcgtaatccctggccttgatgcggtcgagcgcttcagtgaccgggcggagataccggcggctgatgaagatggagagaagcaggctgacggcgagaaggacgagagcgatgagcagcagataccggctgttgccttgaatggcgtcgtccagcgccttctccggcatcaggatcgaaaccgcccacgcctgatcttcgtagaccgaccccgacggatacagcttcagcccggtatggagaccgccgaaggcgccgtcttctcccgaatagaggcagaagccctccttgccgcattggatttgaaacggatgctccatgcgggcgctggtgagatacgaattcccagcaagcatcccccggtcgagatgcagcaccgtttcctccgccggcgtcgccgccgcgaatacgtgaggaaaggcttcattatccgggctgtaggcctgtttgaaaagccggtcgctcaccccgatgccgcaaaccccgaatacggtgccgtccgcgctcctcaagggcaagcagagcaggaacccggtttcgctgttcccctcgagcacgatccggtctgtccagtaatacaggcgggacaaggggaggtcgggatgttcccgcgccgtttccatcaccgaacggaaaaacgcctggttttggatgttgaattccattttccattgtcctaacagttcgatgccgttttctctggcgatgccggccgggccgcgcaggtaatgcagtttggacccgacggaatccacggcgctcggctgcgtttttatcaggtatatgcccgcccgggaatccgccgcatcggggagagccgggttcaccgtcgcgtccagcagcaggaaggccccgctgcaaacgttgcgttccatcacgccctggatctcccgcatctgttctcgaagcagcggctcaatccggtcgggatgcgcctgaagctctgccgctccgatgccttcttccgaaaagaaggcatcgatgctggcggacagggtttccgaaaacgagacgccttggaccgccagccgtccgaaatcggtggaaacggtggaattgaggtgggagagctcacttccgataaaatggcggaccgccggggtcccgctgccgttgatgttgaacagcagaatcagggtgacgaaaaccagaatcaggaacgccgccatgcaggcgaaaaaagcaaacagccggcgctgcaggggcgtccccttatggcgctcctgcttccagagcgccagtgcttgtctgagcatcgccaagccatccgactcctttctcccataaatccgttactttcgtatttcagcaagggcggtttccgtccccgtgtccccgccgtccagataagctccccgccgtgacgccaagagggtcttgaagcgtttttcatactctttgccgatatcgtcgaatgccgcgaaattgggcggggtaaaaaagcggtattcccggtacatcgaagtgacggccacgagcatctttttgatccgggcatcctccaccgacgcaatatgcgcatccatatcggtttcgaacgcctgacgggtcaccggcagatatccggtcgaggatatgaaacgcatattctgttccgacgccgtcagccatttgatgaacacggcggcggcgtactccttcttttcctcattgctggccaccatcaggccgccgccccgctggatcgcggtctttgtcccgccttcgaacaccggataaggcaggatgctgtaggcgacttgttcgacggtgttgtccgggtaggtgatggtatccccatagaacaggatgccggcggaggaaccggtcgagcagaccaggtcgccggttttggagaggtcggaggaatagccgtcgtatatggcgatcccgccctcgacggcggggacataggtggtggcgaagatatgcgcgtaggtttccccggagaggttcagcgtttccccctcgatcaggctgctgccgagctgcttcatccccgcctgcgcaacgttgaaccacgaatccgctgtgaaaaacatcttgccgtcgcctggaatatccggggtctttgcgtccgtccagtcgtaatacatcttcgacagcgccgcaataccctcaaacgtggcgagctgctcctgcttagcgccggtctccgctgcaaagcggtcgaacagcgtctggttcagatacaggatctcggtggatttcgccagcgggaaaacatacagcccgccatccgccagccgcccctcctcgataaaggcagggacatacccggagagctcctcctgagaaaaatagctgtccagattggccagccgaccggtctgctgaaactggatggcgacctttggataggctgtgcagatgtcgggcatcgcgggtgcgcccggatcgccggcggcgatcatgtccaggctttcattgagctccgcgctcgacgagatggccgtaacgttgattacgatcccctgctccctgccgagcgtgctgttgaattcgtcgatcagggcgtccatggtcttttgcatgtcgccgccatagttgtgccacatcgtcagggtgaccggatccttcggggagggacgtcccggatgcccgcatccggcaagcagggcggtgaccatgcagagactcgccgtccatgccaggctctttcgtttcataattcaacctccaaattcaccgaataatataactaagttatataaaaacagagaatcaccccgaaaatcaccccgtgttttcaaaaaaatcacccttaggatgacgacaaaacggtctggattctctagaatagacagcaagaaatggaaaatttttcgatatccgaggcggtatgggtctcccggagtcagtataccatgaacatataacctggtcaatgaatttatacagcgggaaaggaggcggatacgattgaagaaggcggaggaggacgccctgcgggaggagctgcttacggtggtcgcacagatgtccggcgaggagctccgacggttgctggaattcatcacccgcatggaggggaatccggagacggaggaggggacatgacggcagtattcacacggcggtacgagacgcacaaaacgctgcgaggcttctgctttaccttttactgcgatctctgcgacggttccgtcacgacgccggaatatcagaccgatgcgttcgaggaagcgctcagcctggcacagagtgaggcaaggcggcaattcaacatgtgccatcaatgcgggagatggatctgcgacgagcattacaacgaggacgagatgcagtgtattgcctgcgcgccccggcgggaacggcggcccccgctgattcaagtttccaccgagaaaacctgtccgtactgcggcggcggcaacgcaaacggcgactgtttctgtcagcgatgcggaaaaggcatctgaaatcacgtggagaaagggaatctttttatggcaaacgatttatttggagggctcggcggtgcgctgggcggattggtcggcggactggcgaacagcgggctggtgcctaaggatacccccgagggtaagcttttcgcggcccagagcgagctgtccggactgcaaaagcaggaagcggacattctggccgagatcggccggcaggcgtatgggcagaacccggacgcctggccgcaatccgataagctgaagctgatccaaagcaatatcgcttccgtacaggcaaagctaaacgccgccaaagcggagcagcaagcgaaggaacaggccgaaaaagaggaaaaagccgcctgcacctgcccgtcctgcggacatgagaacccggagggtgtgaagttttgccaggagtgcggtacgaagctgggcggctccgcgaaaaagcactgcacctcctgcggggcggagctgacccccggcacccgcttctgcggcgagtgcggcgcacgccagccggaataagaacggaggacaacataatgagaaagatgttagcgccggtatttgcgcttgtgatagcactctccctcgccgcctgcggcgggaacaatgacccggacccgtccggcagtgcccccggaagcagccaggcacaggaggaaccggccagccggcggggcgaagagggaagccggccgagtgccacagagtccccttccgaagggggcggatggaatcaggcggaatacgcggaatacacgaatggtgtgccggagccggccttccgctataccatcaccggagtgatcgggaatatggggctgagcttcaagagcgatgcttccgccggcgaatttgccgcctggcggcaggagctcttgaataccggatttgaagaaaattctgttgccggcgaaacatggacggtattcaatgatacacattccatcgcgcacagcggcggcgggtatttcaatatccaaaccaaataagccgcgatgctcggcaaggaggcgatgggatggcgagctacaaacaaacctgcattcactgcgggatgctggtggaccgggacgtgcgcgtctgttcagcctgcggcagccggagcccgttcggctatctgtgtcccagctgcctgcgccccgtcgaaaaggggcagcccctttgtgcgggctgcgggcgcccgctttatgtcgcctgcccgttctgcggaaaacccaccttcgtgcaggaacgctgtgagcagtgcggacaggggctcctggtccgctgcggcaacaaacgctgcggggcggctcagttttttgaaaatacacgctgcaccgcctgcggcaaaaagatcaaagccaagatcgggaaccggtagcggccagaagccgcataagaccttatacaccggcaaccccgggtcgagaaaggaaccgtgatcgcgccatgctcaaatcctttaccaggaactatgaggacaactccaccgacgccggattccagtttaccttttactgtgatatctgcagcgacgggttcaaaagcagtttcattgaatccaccacctataaaaaacgcaaagggacgaaaatgcttggacagggcgtgagcctggtcggcagcctcatcggcggccgggtgcgcgacatcgcctacagcgccgagaggggcggcaacatcctttccgagcggttcgaaggcaagagcccggaatggcagaaggagcacgaaaacgcctttgagcgggcacagaatgaggcacagcagcatttccaccgctgccacagctgtcaccagtacgtctgtgacgcctgtttcaatgaggacgaagggctctgcaccaactgcgcgccccgccaggaggtctacgtcgccaaggcgcgggcggaggccatgcggcgcaacatcgatgccgccggcgagagcgctacggtctggaaaggggaaatcgagagcaaaaccacggtctgcccgtcctgcgggaaaccggccggcacgggaaaattctgcaacaactgcggcgcatccatggaacggaagctctgcccgcaatgcggggcgaaaaacgccctgaccgtgaaattctgcaacaactgcggaagcaatctggccgctgccgccgcgccgtccggcctctgcccgtcctgtgggacagacaatccgcccggcaccaaattctgcggaaactgcggcaccaagctgtaacaaaaccgatccataccaggggatgatggagtggagatgccgaatattgccggagtcttgaacgaagaagccgccccgccgaagcccgcctatgagggctatgtcgaaaccgtccgctggagcggctgtgcggcgctgattctcgagccggacgggctgcggatcgagacgctgttcgatcaggaagcggtcgcgtttgcggatatcgaagccgttgccggggacaccggctccgtccggctccgcctgaaaagcggggatatcgaaatttcccgcatgggggagagcggcgcgtggttccgccgggagcttctggaggcctttgacaagaaggtgcggcaggtgcttctggtggacggagccccggcctttgagaccactggcggctatcggttcgacgggtgcgaaggcacggcgaagctgcaggttttcgaggattgcctctgcctgctccccccgaaccgggacgcccgccgccttcccttcctgtttgtgagcggcctgaaaaaggaagggttctctttggttttgacgatgagcggcggggaacggtacctcttttcccagctgggatatgacctggatccgctggaaaaccagatcgccgcgcatatccgggcggcacgggaacgagggacggcgtttataaaaaaactggacgattcccttggcttttccgggaatgcccaggccgcccggctgctgccggaaggcgtcgccgtcccgctgaagaccctggccgccgcccatccttccctggcggcggcagtggaacggaaaatccaaaacagcaaaatgggagaaaccgttcccgaactgcggcgcctgtgcgacggaagccgtctcgcggccggcattctgtcccttccggaggaggaaagtgaggcactgagggagacgctctttagctcggccggagcggacggggatgagatggcggagctcacgcccgaacaggaggatgccctgcgctggatcgtcttcgcggcgctcccgtcgaaagacgggcgcttggcggtggtggaattcgccttcccgaacgaggaggccgctacctatctgttccggatggaggaaccatgggaggccttcctgacgcttttgaaccgggcactggaggccaccgggctgcggcgggagatcctgtccctgccggaggaacggctgcacgacgaggcaaacgccgacacccgtatggcggtcatccggacaccggccgttcgctctctgcgtgcgcggtttacgggccgggtgatccatcgcggcctggacgcctggagaagcggccttatcaagcagctggccccgtccgccctccagggggtggaagagtatcgtccgaagttctgcggttcctgcggcgcaccgctcactaccggggcacggttttgcgggatctgcggggccggacaaggttaggaggaaaagaaaatggcattttgcacgtcctgcggcagtgaactgccggcaaacacaaaattctgcaccgcctgtggggcgggtgcaggaggcggggaggaggcagcaccaggcggtgaagcgcggcctgttccggttacggccgccgcacccgcagcgccgttccccgaaccagtgccggtgccggcgcccatgtccgccgctccagcgcccgtccagaccgtgccgagaccccagcccgccccaccgcagccgcccgcatacatacctctcgccgatacggagccgcccaagggcagccggtatgcggtgatcagcacggcgggctatttcggcactatcctgctcttctctctcccgctgattggtttgattttctgcattgtgttcgcctgcggcggtaccaaaaaccggaacaggcggaacctggcaaaggcgtatctgatctttatgatcatcgccctggtgctctccgtgatcctcgtggtgctggcactggtcatggggaactggctgcaggggctgttccaggaggcatggaacgatgccctcggagggggggcgggagacaccggaggctatacaggcaattggatggaccagctgctccaggaggcaggcggcgggatggcccagatccctatgccttgaccgatacaacgtccaacaatatttgaaggaggattttcaacatggctttttgtggcaaatgtggtacccagatcaacgacggtgtgcggttctgtcccggctgcggcgcggctgcagaggtggccgcggccccgcagcctgtggccgcaggcgcggtccagcaaccggcggccccttccgctcagcccgtccagcagccggttcagccgtcctaccagcagccggttcagccgaatgcgtttcagaaactgaacgatacggccgacatcaccggggaatgcgatccccaagacatcgcgaacaacaagataatggcggtcctttcgtatttcggcccgttgttcctgatcccgtggtttgcggccccccaatcgaaattcgcccgttttcacgccaagcaggggatgcttctgtgtattgtggcggtggcctactcgattatcagcgccattctctgcgctgtcatcaaggtggattataagctttggggttacagcacgggggtcaaggtcacacccggatggctgtttacgatcctgtggctgatcagcattccgatttgcatcctcgccatcatcggcattgtcaacgccgtccaggggaaggccaaagagcttcccatcctcggcaaactgaaaatcggcaaataatccaggcgggatccggacaagaacacagccgggcggggagcctgcggacatcatccgttcgcaccgtccccgccttcttttttaggaggaaaacgcgatgaaaaagctgtttgcacttttactggtgcttatcatgccgttggcccttgccgcctgcggcggaaaagagggcacgggctccggcggcgcctccaaatcggggggcaagactccctcccccaaattcagtggcgcctatcagtacaatccgcccaaggatacgtactttatcaagtggcaggactttgacgcggcgggcaaggaggatggcaatgcggatatctatgcccgtatcggcggtgggtgcagctatgccgaagaaggtacaagtgtctaccacgccagcgacgagcagcagaaatattacgaacgcgcatgggaaggtgagtacagcgactggatggtcagtccgggttacagctatggagactggaaatctgaccgcgaggaatccggcgacgatctcggctcctgcgacgcctttgaatattactttatgcggtatttccgggcctatggctttgatgaggatgaaggcaagctggcggaatattacgtaggcactgaaaaggttgcaggcgtaaattgttgggtatttgattccaagggcctcaacgccatctacttaaaattttgggttgacccctccaacggctgctgcctgaagtatatggatacggaaaccgggggttccggtgagtactccatggtgacggaatacaacctgaattacacggcttggacggataatctggccccggccagctatgaggggattgaatgaggagggcacaatgaaaaaagtatggtcgtgtttactggtccttacgatggcctttgcgcttgccgcttgcggcaaggacagtgaaaaaacatccggcggggatgtttccgtaacaaagggcggcaagggtgtcgccattgaagatgttaccgttgacaactggcagcaggtcgtgaaagacaatttcggtcttacgctgacccttcccgaggggtggactgttacgaaaaccgtttcattggtcggtgtgcatgtatattttggctgtaacgccgatgaggccgaggttgtgtctttcctagagggcgttttcagcgagctgaaaagaatcgctaccggcggcattaccggccactacgacgatgccccatacaacagcattgcggaagcccgtgccggaacgtttcctgtggacgccttcaacctgccggtgaacgcagacggctcaaagaagatacatttcagctttggcaaggaaacggcatacgatgccgaaacggggaagtcttatatcgaggccgtgagcatctacttgtctcaaaaaggtgattggggctaagccggccggcttccgcaccggtacccaccgaaaatcccggatggcccccctcgccgtccgggattcggaaggtgatgatgaggacatttctgacggagtgacggtattcacggcaatggaaaattggttcagtaagggaaggagaaagctatgaaaaaaacaaggatactatggctctcgcttttgcttgtgctcgccctttccgcctgcggcaccggaaagcctatcggggatcttctcaaagggaataccggagtgtcagggcagcaggaaacggaaaatcccggcgggaatgccggagagtttgatttcggtgccattctgtccggcaacggcggttcggagctgtacagcggatattcggcggagcaaaaggccgcgctggtcgaggcggccaaggccgatggcatggacgtagagttcggcgcggacggttccacgacctttaaggataaggacggcagtgaagtggtgcaaaaggcggacgggacctggacggtcaaggatccggacggcggcgagggccagctcggcgggagctggccggataacgaattcaccaagctggtccccaaaccggatttcgcgctgggtgccgccgccggcgacagccaggaattttcggtcgtattcatgaacgccaccatcgagcagatgcgagggtatacggataaggtcaaggctgccggcttcactgtgggagccgaggtggaggatcaggagctgatggggatggtcgtctatacctattccgcttccaacgccgccggctatcagatcgagatctattccgcagccggtatcagcggcctgaccatccgcaaacaggagccttgaagcggtatgtgatgccgtagaggccattccggcggactgtatgttttgccggtgcgttgcctcgtcccgaccgctgaccgcgtccctaaacgccgaacccccggccgcaaaagctgtctcttatacacatctgacgc

SEQ ID NO: 2548 - DNA, 9820 bp, Unknown
  16S sequences of unknown bacteria
ggccctttctatatagtcggaaactgcatcgggaaaagacacaaaaacaaatgaaaacacagagaaataatcggcaaaatgcctgaaaatattgcaaagtgcaaaaaagaactacccaaaacgcatgaaaaaagtatataataacttttaatcattctccgatgcaaacgcgcggaaaatggggaacaaagaagccgcggcttctttgcctgtccgtctgtggaagaggggggacaggaaccgattctgaaaaggagacgatgaaaatgaagaagacagtaagcgtgcttctggctggcgctgttctggccggcgcattggctggctgcggcaataacaacggcggcaatgcccagcagccttccggcgaagagggcggcagcacagcctttaagattggcggtaccggccctctgaccggcggcgatgccatttacggcaatgctgtgaagaatgcggcacagattgcagtggatgaaatcaatgctctgggcggcatccagtttgaactgaatatgcaagacgatgagggcgatcctgagaaagcggctaatgcatacaacaaactcaaggactggggtatgcagatctctttggtgtctgttaccaccaagcctgccgaggcgacttccgtgaaccacaatgaggatcacatttttggactgacgccttccgcttcttctatggcggtgaccgagggcaaggataacgtgtatcagatgtgcttcaccgatcctggacagggtaccgcttcggctgactatatcgccgaacaggggctgggcgagaaaatcgcaatcatttataaaaacgacgatacctattccactggtatttatgaaaagtttgttgccgaggcggaagctaagggattgaacattgtttccaccggtacgtttacgacttcctctcagacggattttaacgtgcagctgagcgaggcaaagaacgccggcgcagatctggtgttcctgcccatttattacacgcctgcgtccctgatcctgaaccaggccaataccatgggctatacgcccaagttcttcggcgtggatggcatggacggtatcctgacggtgaagaattttgacacctctctggccgaaggcgtgatgctgctgactccctttaacgccgatgccgaggatgaaaaaacgcagaacttcgtgcagaagtatcaggaactgtacggcgatgtgcccaatcagtttgcggcagatgcctatgactgcgtatatgcatattatcaggcattgaccaatgccggtgcaacgcccgatatgtctgccgaagagttgtgcgacctgatgattgagcagttctccacgatgacgttcgacggcctgaccggcgaaggcatgacctggaccgacggccaggtttccaagagccccaagggcatggtcatccagaacggtgcatatgtcggtatgtgatccgctgcggcgaaattgaagaaacatgcaatgacgcaggggagaggccgctggaaagccagcggtccctccccctgcgtcctttaccgcacagcggcgaaaaagaaaaaagaattgagcaagaaaacagaattaaagcgtcactgagacgatagagaaagtaaaagaaacgggaaagaagatttgaggtgtgctccatgttaaactatttgatcaccggcatcagcctgggcagcatttatgccattattgccttgggttatacgatggtctacggcattgcaaagatgctgaacttcgcccacggcgatgttatcatggtcggcgggtatatgtgcttttgcgccacggcgtatttgggctggaatccgctgatgggggtgttgctggcgatcgttgtgtgcacggtgctgggcgttgtgattgaacgcctggcctataaaccgctgcgcaatgcgccggcgctggctgtgctgattactgccatcggcgtgtcctatttcctgcagaatgccgcgctgctgatctggacgtctacgccggtgagcttcacttctgtggtgggcagcggctcggtcagcctgggcacacttcgcatcacccatgttacgctggttaccattgcagtgtgcattctgattatggtcgtgctgatgctgttcaccagcaaaacaaaaatgggtacggccatgcgcgcagtgtcggaggacaagggagcggcacagctgatggggatcaatgtgaataccactatttctgttacatttgccatcggttcggggctggcagccatcgcgggtgtgctgatgctctcggcctatccgctgctgattcccacaacaggttccatgcctggcatcaaggcatttactgccgcggtattcggcggcatcggctcgatccccggtgcgtttctgggcggtatcctgctgggtgtgattgagattttcagccgtgcgtatatttcccaggaagtggcggacgccattgtgttcgctgtgctgatcgttgtgctcctggtcaagccgaccggattgctcggcaagcagatgagcgagaaagtctgaggtgggcggaatggatcgagtgaaaaccgtgataaaaggacggcgcgattctgtgctggccttcggcattgtgattgtggcatatattgttatgcagcttctggtgatgacggggaatatctccaattccctgggcggcatgctggtgcccatctgcgcgtatattgtcatggcagtttccctgaacctgacggtgggcattctgggcgagctgtccctgggacatgcgggtttcatgtccgtgggagcattcaccggcatcgtggtgaccacggctttggccgacagcgtaccctcgccggcactgcggctgctgattgccatgctctttgccgcactgttcgcgggaattgccggcgtcattgtgggtgtgccggtgctgcgcttgaaaggcgattatctcgccattgtgactttggcgttcggcgaaatcattaaaaatattatcaacgtgctctatgtgggcatggatgggaacggtctgcatttcagcattatcaagcagagttttgtgctggaagaaggcgggaaaatgattatcaacggtcccattggcgtgtcgggcattgataagatatccagctttactgcgggatttgtgctgattttggttacgctgtttgtgattctgaacctgatcaacagccggcagggccgcgccattatggcggtacgggacaaccgtatcgcagccgattccatcggtatttcgacgacgcgttacaagctgatggcttttgtgatttccgcggcctttgccggcatggcgggcacgctgtatgccatgaattattctaccgtcaccgctaccaagtttgattttaacctgtcgattctggtgctggtgttcgtggtgctgggcggtctgggcaatatttggggttccatcattgcagcggcattgctgacgctgctgcctgagttgctgcgtgcgctgaacttcaacgattaccgcatgctggtgtatgccattttgctgatcgccctgatgctgttcaataactccggcatcaaggaaaaactgctggagcgccgtgcactgcgcaaagcggaagcggcggaaaagaaaaaggaggcggtctgagtggctttgctggaagcgacggatctggggatttctttcggcggcctgcgggccgtggacgaattgaatatgcagattgaaaagggagcgctggtgggtctgatcggtcccaacggcgccggaaagaccacggtgttcaatatgctcactggcgtatatcgtcccaccgacggcggaatccgcctggatggggagaatattgtgggccggaagcctcatgaaatctgcaaaatgggcattgcacgcacttttcagaatatccgcctgtttacaaaactctcggttctggacaatgtaaaagcaggatttcataacgagataacctattccctgccggaaagtctgctccatgtgggatcttaccacaggaaagaaaagcagatgaacgaaaaggctatggagatcctgaaggtgtttgatttggatggccaatgggactacaaagcggccaatttgccctatggcaagcagcgcaagctggagatctcccgcgcgctggccacagatcccaagttgctgctgctggatgagccggcagccggcatgaaccccaatgaaacggctgagctgatggagacgattgaactggtgcgcaaacaatttgatgtaacagtgctgctgatcgagcatgacatgaaattggtatcgggtatctgtgaatacctctatgtgctcaattttggtcgcctgctggcggagggcacgcccagcgcagtactgagtaaccctgaggtcatcacggcctatctcggtgattgagggaggaggagaaagtatggcaatgctggaagtcaaagacttgaacgtctattatggcctgatccatgcgctgcacgacgtgtccttctctgtggaggagggcgaagttgttgccctgatcggcgccaacggcgccggaaaaaccacaacactgcacaccattaccggtctgctgcaggcgaaaagcggcagcgtggtgtttgaggggcaggatatcacccgtaagcccggccatgccattgtgcgcctgggcatgagccatgtgcctgagggacggcgcgtgtttgccaacctcacagtggcggaaaatctgcgcatgggcgcatacacccgtcccaagagcgaagtggctgcttcgcttaaggaagtgtacgaatggttcccgcggctggaggaacgcaaaaaccaggcggcaggtacgctgtccggcggcgagcagcaaatgctggcgatggggcgggcgatgatgtccaagcctcgaatcctgttgctggatgaaccgtccatgggcctttcgccgctgtttgtgggcgagatcttcaagattatcgaaaaggtgtcttctgccggcaccacggtgcttctggtggagcagaacgcgaaaaaggccctgtctattgccgaccgtgcctatgtgctggaaacgggccgcatcagcaaatccggtaacgccagggagcttttgaacgacgacgcgatcaaaaaggcttatttgggcgaataagggggatgcgtatgaaaccttttgtcatcacgattgcccggcggtatggcagcggcggaaaaactgtgggtcggatgttggccaaagagctgaacatcccgttttatgaccgggagatcattgccatggcgtcggaagacagcggcgtcaatgaagtgctgttttcagatgagcggctgcggccggacctgcgcagccgtctgcgcggcctttataagggcgagccggtgctgggatacggtacgccggccaagggcgcgccccgggacggggagctgtttgaataccaggccgcagtgatccgccgtttggcggagacaggcccctgtatcatcatgggccgctgcgcggactacgttttggggcagcgcagtgacgtggcgcgggtttttgtccatgcagacgcggacttctgtctgaaacaggccatgctggtcaactctatgagccgtgaggacgtgcgcaaaaaaatcgttcaggtggacgaataccgcgcgaaattctaccagcgccacacgggaaaggactggtatgacgcccgcaattacgacctgacgctcaacagcgctgtgctgggttttgaaggcgtgtgtgacgccattgtgcagtatcttgaggtgcgcagccggtattgattgaaccgtggaaaaaagaacccccacaggatgcaaatgggattgtctgcatcctgtggggattgtttatggggaacagcggcggcgctttcagggcctgctgtaagggaaactgtcgccagagcggtgatccagcgcgggatgaatgtcgaaacgcaccacacccaccggtgtgcgcggcccgacggccttttgaatgcgggcgacgccctcattgccgaagcccgggcacagctcaatgccgacgcagcccaacgcggccagaactttggcgtattgttcgccctgggcgtaactgtttaccgtgaaaaacaacagaacagcgtcctcgttttcaatgcaggcgcagtctctgcgcgggtctgcatgttccgtaaccagcagaaatccgatcagcaattttttcatgacttgccctccgcttcttataatatgttcactatatcacagcaccggtgtgaaaaatggacgatatcggattctttttaccataaagtagaaaagctgcaagatttgatgtgcaccgtgctgcgggagaaacatacgatcagaacagcggcccgaacccggcgttttccacgcattgctgtccggcctcgctcaaaaggaactgtaccattttgcgggcgggggaatccttcggctcgtcggcgcgcactacggcataattatagccggccaaaggatacgtgccatcggcaatggttgcatcggtgggatatacgccgtcgattgccagaagcttcaggccttcttcgctggagagcataatcggggcagcggtctggtagtaataatagatactgtagcccagagcatacgacagaggatcggcgcagtaggcatcttccacgtccgtcagcactgaggccatggaaaccgaggtagtttcccgacgaatggaaggatggatttcgctgccgttcaggaaaaactcttccatctgggcctgactgccgctgtccctgtttcggcaataggggataaagactgcatccggggcgcccagttcagcccagttggcgatggaattgtccacgtagatcgagcggatttgttgcgaggacagtccggcgatgctgttttgaccgttggtgaaaaacaccatggcgtcgtgggcaatgggggtcagttccaaggttacgcctgcggccttagcttttttcagggtgtcctccgtgggcttggtggaaatgattagaaaatcagcttcgccggagatcagccggtcgtaggaataatagcttttcgaatgcgcggcaggcatcgtaggatggccgtcataattcaggaacaaggcgctgtaaagcgctctggtgtagggatatgtggaggtggagccgtcgatcaccggcatagctttgtcaaaaccccattcgatagcggcaggcgtgggatagacgggcaggaaacgcagggcgctgtatagaaattccacggcttcgcctcgggtgacgtaaacggaagggtgagcataaaaagccacagtgggttcgccggaagcgtccagcgtgccctccagcgagacctgtgtggtgagggaaatgccgcgcgcatccaagtcgcagtatgccgaatatgcccaggagggaatggattcggcatcggcaaaggccggtgcggcatcggactgtgctagccagccgaggatgcggaatgcccgagccgtcatcacagtcagctctgcccgggatacgggacggtccggagcaaactgctcgcccggcgcggccagtccggcggttcgggcggcggaagcaatctcatagtaccagtctccgggggccacgtccctatagccgggatcgccttccggctggagcgagagcaggcggcagagcagggcgaatgcctctgctcgggtcagtgtgcggtctttgttcagggtgccgctgctgtcgccctggaggatgccgcgcaggttcagctgatcggctccctgtggggcatcgtaataggtgtggccctgccacacctgcacgcagtcggtaaactgcacaggtgtcccttggagcagttccagtggccgctctgcgtcctcggcgggaatcgtgacgtacagatttccctgatacagcagcgtgctgctcagcggcacaggctcttgcgtgtcggcgtagaggacataaaaatgctgtgcgtcggaccaggagagggattcataatccggccaggtgagacgcatggtgacaaagccgttggcttcggtacggctccagggtttcgatgcctctgccggtgctgccagggcggggcagagcagggagaaggccagcagaagagaactcaaaccgcttgcaatggggcgcatacaatacatctccttttacgaacagggggcacgagattcctggattttgttctgattcttttattttcactatagcacaacagtgcaaaaatggcgataacagagtagtaacaaaagaataacaaagtgcggcgggaaaagatggcagattccctctggaaatcagtgttggaatcggttatactgaaagaaatctttgccccggtgcgggcaagaaggaaaggaagcggtgccttatgcagatcggcatactctacgctatgaaaaaagaggcggaagggctgctgcgcctgcgcggcgcgccggaggcggaatggatggcgggcatgccctgtttccgtctgagccggagcacggtggtgtgcgtcggcggcgtgggcaaggtgaatgcagccatggcggtgcagctgctcatcgaccgctttcgtgtggagcggattgtgaacgccggctgcgccggcgcgctgtgcgacctgccggcgggcgcgctggtgctggggacagagtgtgtacagcatgatgtggacactacgctggccggggatgcaccggggtttgtatccaccgtggagcgggtaagcttcccttgcgtcgaaacgctggagaccatgacgctgctgatgaatatgggcctttcgctgacgccgggaagcgtggctaccggagactggtttggccgggactatgcccgtgctcagtccattcgggaggtctatggtgcgctggtgtgcgatatggaagcctgcgcggcggctcaggtgtgcctgcgcaacggtgtacccttccaaacgcttaaggtagtcaccgaccatcttttcgccccggcgcaggagcaggagtaccaggataatttcctcgctgccatgaagcgtttggatgaagcgatggacgtgtatctcgatttgatggaggaatgagcgatggaacgcattgccagttttacagtagatcataccaaattgcagccgggcatgtatctgtcccggcaggacggcgcggtggtgacttatgacctgcgcttcaagcgcccgaacacaggcgatttgttaagcaacgccgagctgcattcggcagagcatttgtttgcaacgcttctgcgcaactcggcctgcaaagacgcggtgctttatttcggccccatgggctgccagaccgggttttatctgctcgtggacggcagccggctcgaccatgccggagccattgccttgatgcaggaggtatgccgccggggtgcggactacgacggacctatgccgggacggagcgccgcggagtgcggcaactaccgcaatttggatctggcgctggcccgaaagctgtgcaccgagtatggcgccattgtgcaggagtggacggtggacaagctgcgctattaagccgcggcggacaaacgcacgaaaggagtcggtgttatgccttcgacctacgctcatttccgggcgggacagcgcttgcgcgcccggcttaccggtacgccgaaagctgcggtggaagcccatccggagctgtacaacattggactgcacgggccggatattctgttttattatgaaccgtatcacaaaaaccgcgtcagcgcggtgggataccgccagcatgaaaagtcgggggcgtcgtttttttcctttgcggccaaagccatccgttctggcgcggggcgggcgcaggatctggcctatctgtatggcgtgctgtgccattttgcgctggatgtccgctgtcacggcttgatcggggaaaaaatggttcaaagtgggctgtcccatgccgaagtggaggtcgaactggatcgggcgctgct

SEQ ID NO: 2549 - DNA, 1553 bp, Unknown
  16S sequences of unknown bacteria
tacctcttctttcccatgcgaactccaaactgtctcattctgagtccgcacatccccccaccctgtcccttcgtgctatctcgacaggcggatgtggggtttccgtgcgcgggacctgcgcgtaagggtcctgtaaagcggctagggtacagttacccacacgcgcgtctttcgcgtgcccacctgccgtcacctgcgagaaaggagactgacccatgaccgacgctccgcgcacccaaaagccagccgaccctctgttcatcgacgaggtgcacggccaccaggcgcgctacaagaagatagtcgcgttcacgcattccgcgaccaaggccgccggcatcatgctcctcgccgccatcgccgcgctcgtgctcgccaacacggcggcgcaccaggtgctgctcgagttcagccacctcgaggtcggcttcgccatcggcgacaccacgtacacgatgggcatcgcgcacgtcatcaacgacatcttcatggcgctgttcttcctgctcgtcggcctcgagatcaagtacgagatgacggtgggcgagctcaccaacatccgtcaggccctgctccccatcatcgcggcagtgggcggcgtgctcgtaccggttatcatctacagcgccatcaacgccggccatccggacaccgcgggcgggtggggcgtgccgacggcgacggacatcgcgttcgcgctcggcatcatggcgcttctgggcagccgcatcccgtcgggcgtccgcgtgttcctctcgacgctcgccgttgccgacgacatcatcgccatcctcgtcatcgcggtcttctacggtcacgcgccggcgttcgagtggctgggcgccgccgcggtcgtgctcgcgctgctcgtcgtgctcaaccgcgcgcacgtctatgcgctcgttccgtacctggggcttggcgtcgtgctctggctgtgcgtgtacctgtccggcgtccactcgaccatcgccggcgtgctgctcgcgtttaccatcccgtccggctcgcgcgtcaacctccagagcttcggcgattggtccggaaagaagatccgccaggcaaaggccgcgctcaaccccgaagagccgcttgttggccagaaggagtacatccgcaacgtgcgcagcctgtccgcggtgtcgcgtcaggtcatcccaccggcgacgcgcctggaaaacgccctgtacccgtgggtgtacttcctgattctgccgctgttcgcgctgaccaacgccgacgtcagcatctcgggcgacatcgcgtccgtctttggcagccctgcgtttctgggcgtgttcttcggcctgctcgcgggcaagcccatcggcatcctgctggcaagcgccatcgtcgtgaagacggggctggccaagctgcccgagcacgtcaactggcggcacatgatcggcgcggcggtgctcggcggcgtcggcttcaccatggcgatcttcgtcgccaacctcgcgtacgactccgaggtggcgctcacgtccgccaagctcgcgattctgctcgcgtctgccgtggcgggcgttgccggctttgcaatc

SEQ ID NO: 2550 - DNA, 32759 bp, Unknown
  16S sequences of unknown bacteria
tccaccgccgagaacgccgcgtcaatcggcccatccgccttgacgaccgcctccttcaattcgccgtccttggtcaggcataccgtcgccatcgtctggatcgcagagccgctgctgatgacaaagctttccaattcatacaccggcatcacgatggttttctgggtggataccagcgcttcgatgtcgcggtccgtcacggtctttttcctgtccgccaattccttaaagcgcgcaaacgtcttctccagcgcctcgccctcaacttcgtagcccagctcattgagccgctcggcaaaggcgtgctttccggaatgcttgcccagcaccatcgtcgtctgcgcaatgcccacgctttccggcgtcatgatctcataggtattgcggttggccatcatcccgtgctggtgcacgccggattcatgcgcaaacgcgttggcccctacgatggccttgttgggcgcaatgggcacgcccgtgatggaggagagcagcttgcaggtcttgtagatctgttttgtgtcgatgttgcagtccatcccgtaaaaatcgcggcgggtctttatgcccatcacaatctcctctaagctggcattgcccgcgcgctcgccaatgccgttgatggtgcattccacctgcgtggcccccgcctttaccgctgccagggaattggccaccgccaggccgaggtcgtcatggcagtgggtggaaatatccacattttccacgccttccacgtgctttgccaggtaatcgatcatctcaaacatttcctggggcgtagcataccctaccgtatccggcgcgttgatgaccgtcgcgcccgccttcaccgccacggaaaacgcctttgccaaaaatgccttgtcgctgcgcgaggcgtcctctgcggaaaactccacatccgggcacaggctcttggcatagcctaccatctcctctatttgggaaagcacctgctcgcgcgtcatgcgcagcttgtattccatatggatatcgctcgtcgccaaaaatacatggatcaccggatgcttggcgtttttcaccgcctcatacgcacggtcgatgtcctttttcagcgcgcgcgccaggctcgccaccctggcatgctcgatcacgcctgcaatggcctgcaccgccgcgaaatcatccggcgaagaaatcgcaaaccccgcctcgatgatgtccacgcccaaacgatcaagctgacgcgccatctccaatttttccggcaggttcatgctgcatccgggagactgctccccgtcgcgcagcgttgtgtcaaagatcttgatttgtttttgcatgtcgtttgctccctttctctgttcggtttttgcggataaaaaaagcctccgtctcttgaaagagacgaaggcgtatgctccgtggtaccactcttacttggcagcttggctgcccgctcgttctcggcatcggccctttggggcgaatgcgcttgcctgtctggtaacggccaggaacccgtccttcctacttgccgcgcggcgttcagtcggctgctaaagggtgagataacgcgccgcccgtactgccttgcaccgcccggcagctctctgcaactgggaaaagcccgtctgttccctctcaaagcattttgcaatgaaattattatcatgatacgcgcgccggctcggtttgtcaaggtttttttcgccttggggcagatagggcctcggtcgattttatctgccggcccctacatgccccctttctttggctccccgtcgcgattttaagaaaaattctcccctttttcgcgcgccgctcggtttgctcttgcgggtccgttccgatataataaggggacaagcctacaaaggaggtgcgccccttgcgctgcgaagtgctgtatcttgtcatcccctgctacaacgaagaggaagtgctgcccgagaccacccggcagctgacgaaaaaaatgaacgatctgatgcgccgcggcctcatcgcccaagaaagccggatcgtctacgtcaacgatggctctaaggacaatacctgggcgctcatcgagcgctaccaccgggaaaacccgctggtaaacggggtggatctttcgcgcaaccgcggccaccaaaacgcgctcttggccgggcttatgaccgtcaaggacgaggcggatgtcgtcatttccctggatgccgaccttcaggatgacgtcgacgccatcgaccgctttctggaaaaatattacgaaggctgtgaggtcgtctacggcgtgcgcagcgcgcgcaaaaccgattcgtggttcaagcgccacagcgcgcaggcgttctataagctcatgaagtttttcggcgtggatatcgtctacaaccatgccgattaccgcctgatgagccgccgcgtgctgggcgaattggcgcagtatggggaggtcaacctttttttgcgcggcctggtgccgctggtgggctttccctccggggtcgtagaatacgagcgccgcgagcgctttgccggcacatccaaataccccctcaaaaagatgctgagctttgctttggatggcgtaacgtcgttttccatcaagcccatccgctttatcaccggcctagggctgttgatctttgccgtcagcattttgatgctgctgtattttctcatcgtgcattggacaggccataccgttgccgggtggacctccatcatggtctcggtctgggccatcggcggcttgcagcttttggccatcggcgtcatcggcgaatacatcggcaagacctatctggaaaccaaacggcgcccccgctacatcgtgaagcgatatttgcattaaaataagccttgcaggctatagcctgcagggctttatttgtttttcccagcttgctccaacgcttcgtccatcattttgattagctccagcgcgctgcggaagtgctgctctttgccgccttccacccattgcacgctgccttgccaagaagcgttctgcctatgctgtacacggatgataaaggtattcggttcatccggctgccatgttttcgtttcgttgaattccatcggtgagatctcctccttttccaaattgccatagaaggcgcgcagcctatgcgtatgccgcggcccgcccatgcaattcaagcagtgctcataaatccgcagcatttccgtcagcgtgttaaaccgccattcctgctgcgttgcttggtgcatcaatatgccctgcaaatccccaatgtcattcttctccgcatatacagatacccagttttgttttcctggcaccccactccattccatcatgtatcaggccgcatcctttccggcgggccgtcgcccgccttttacacccggcatttgctactatcttaccatctttccgtggtagttcctagccaaaaagcaatctgtttgtaggatttttttcattttagggccggaattttctcctttcgcggttgtcaagcctttgcccgatgctttatcataaaaatacttgattttctatctccttaagaggtgttgcctatggcgtctgcttttacaggtcgctcctgtcttaccattcgtacgcttggcgcgttttccgtacagcaaggcggccaggccgtccccggcttagcctcgcctaatagcgctgcgtcccggcttctcatgtgcctgctctcgcgccgccaggagcccttttccgtcgatgagcttgtagcgctgctatggcccaaaggcagggtgaaagaccccgccaaagcgctggtcgctttggtctaccgcctgcggcaggcccttagcgccggaaagggccgaggtacggactatattctatcaaaacagcaccgctacgtttggaacagccaagcgccctgttttttagacgttgccagctttgaatcgctctgccaacaagcccaggaggctgccggggaggacgagcagatttccctctatcagcaagctttttccctttaccaaggtgattttttgccgcaaaaatttcagccttcctgcgttgtggccgccgcctctcataataagcggctctatcaccgggtgatcggccgcctggcccagctctacgccgcccgggacgattacgccgccatcgtccaaatgtgcgaatctgcgcttaccctggaaggcaccgccgagtttatctatgaattgtacatcgacgccctgcttcgcctggggcagcctgccgcggccctggagcgctaccagacaatcacccagtatctatccgatgctttgggcctttgcccttcgccgcagctgcatacgctgtattggcgcatttaccaggccctcggccatgcgcctgcgccccttgccgccgtgcgggccagccttgcggaggccgagccttccacaggcgcgctgctttgcagcctggaagctttccgcggcctctaccagtttgcttcccggcttacccttcgctccggccaagtggcctttttggcctcgctcaacatccacgacgccggcggccaagtgcaggcgtctgcgcttcagcttctgacccatgtggccttgcagcagctccccggcgactgtgtcgtgtccacatacaaccaaacgcagcttttgctgctgctgtttttcctgccatacgaagattgcagccgcctgctcgccagcatcgagcaagccttttgcggctgttatgacggcgcgcccgtttccctgtcccacgagcttgccgtgctggatgcctgcccccccaacgcataaggaggatgcttgttgatcacccttgggtttttggcgcatgtagacgccggtaaaacaacgctgtgcgaacgcatcctttatcaggcccatgccctgcgccggcttggccgggtggatgcgcagtccgcctttttagacagcgatcctttggaacgccagcgcggcatcaccatttttgcctccgaggccggctttgttcaccgcaatacatcctttaccctgctggatacgccgggccatgtggatttttcctccgagatggagcgcgtgctctccgttttggactgcgccgtagtcgtcgtcagcgccgtggagggcattcagccgcataccgaaaccatatggcagcttttatccgagcataacatccccacctttttctttctcaacaaaacagaccggccaggcgctgacccagccggggttttagcatcgctcaaggcgcgtttttcgcccgccgtctgcgatctatcctacggcttttccacagatgccatcgaacgcatcgccgagtcggatgacgatctgctcgtccattattttgaggaaggctaccagccctccctctggctgccggcggctcgccggctcgtcgcttttcgccgccttttcccgtgtttttgcggcagcgcgctgtccggcgaaggggtggaggcgctgatggacgcgctctcctccctccttgctccgcctcctgtgttggaggggccgcttcaggcgcgcgcctttcgtgtccgctacgatgccaagggcgtccgctgggtacacctgcgcattttgcaggggtcgctggcgcccaagcaggtggtcggccgtgaaaaggtgcacgagctccgcatttttcaaggggaccgttcccagcccgcctcgttggcaaaggccggcgaggtatgcgctgtgtccgggctttctctgcgccccggcggcgccatcggcctgcccggtttgccgcagccccggcttcagcctgcgctgagcgccgaggtattgtatccggacgatgttgcgccgcagcgtgtagccgccgcgtttggccagttggaggatgaggacccgctcttgcgcgtggcctttgatgcggaaacacaccgcctacacatccagctcatgggcaaaattcagctggaggtcttgtccgcccaggtgccccggcggtttgggttccccgtttcctttggcccctgccgcatcgtgtaccgcgaaaccatcgcaaagccggtatgcggctatggccattttgagccgctgcgccattatgccgaggtgcattttcagcttacacccgcgccgcgtggcagcggcctttcttttgatagcgtcgtgcccaccgacacgctccccttgcagttccagcgcctgatccgcacccatgtctttgaagcgccgcatcccggcgtgctcacaggcgctgcgctcacggatgtgcgcatcacgctgacaaacggccgcgcgcatgaaaagcatactgagggcggcgatttccgccaagccgtctgccgcgccatccgccagggcctagagcaggcggaaagccttcttttagagccgtattacgccttttcccttgccctgcccctggcttgtgttggccacgccctgtccgatttgcagcggcggcatgcccggtttgatgcgccccagccccaaaacgaccgatgccttatcacgggccgcggccctgccgcctgcctggtggattatgccgccgatgtggctgcctattccaagggcgagggcgcgcttatgctccggtttgatggctacgatctctgccacaacccagaggaggtcatccaggcttccggctatgatcggcgggcggacagcggccacccctcctcctctgttttctgctcgcacggcgcaggcttctccgttgcgtgggacgaggtcgcctcccatcttcattgccagcgccggccgcttttggcggagtcttaatgatttttaatcaatctgccatctgcatttctttctttttttccgttttttcggtatacttttattcatacaattttttgccttcccgtgccggttggccggggatgaaaaggagtcttgccttcttatgaaacaaacacgcgatcctcgttcgcgccagcaaaaattcttaaaatatttctccctgttcgtctatctgtccctagttgcgtccatcatctatatcgttgtacgcatttttttggcgccggcttctatgccagccggggctgctgaaggcgaacggctgaaaagcgattatgtcctgatgcttctccagtgtattctcggcgtcgctgtgctgatgctgcccagtatcctggccaaacggttccgcctggagatcccttccatgatgttgatcctgtttgtgctgtttttatattgcgccgtatacttgggagaagtacaggatttctattataaggtatccaactgggataccattttgcactgctttagcggcggcatgctgggtacgctcggcttttccgtcattgcgctgttcaacaatagcgaccgcatccccgtcaacctcagccccatcttcgtggcgtttttcgcgttttgctttgccatgatgctgggcgccatctgggaaatttacgagtttaccatcgatgggctcatgcagctgaatatgcaaaaatatgccctggaaaacggtgtggcgctggtgggccgcgcagcggtcatcgataccatgagcgatctcatcgtcgatgccgtaggcgcgtttgtcatcgccgtcatcggatacatttctaccaaatataaaaaaggctggctggaagcgctgctcatcacgcgcaagcgcgaccatacagaaaaaagcgcttcttccaacgccgcctcataattttaattcaggagacatcatcaacatgcaaagaaaagtcattctcagtgcagacagctcctgcgatttggggccacagcttatccagcagtaccacgtgcatctgtttccctttaccatccttttggatggccaggcctataccgacggcgaaggcatcacgccggacgacctataccgggcctggtgggagaaaaaattgctgcccaaaaccgccgcaatcaacgtcgctcagtacgatgagcacttccggcaatggacagagcagggctatgacgtcatccatatttccctgggctcggcattgtcctccgcgcatcaaaacgcgttgctgtccgcccggcagctggggcatgtgtatgtcatcgattcgtgtagcctgtctaccggctccggcctaatcgcgctccaggtggcagaccgcatccagcagggcatgcccgccgagcgcatttatcaggaagtgatgcagctggtgcccaaggtgcaggccagctttctgctggatacgctggaattcatgcacgctggcggccgctgctcttccatcacccgcctgggcgccaacgtgctgcatatcaagccctgtatccaggtgcataccgatgatcacggcagcatgggcgtgggcaaaatgtaccgtggcaagctcatccgctgcctgaagcgctatgtgcaggatgtgctcgcaaagccggagggcatcgataccagccgcgtgttcatcacccattccggcatagaccaagccatcatcgatatggtgcgccaaaccattgagcagctggtgaattttaaggaaacctacatcacccgcgccggctgcaccatctcttcccactgcggccccaatacgctgggcgttttgttcctgcaaaaataaaagcctcgcggcagacgtttggtctgccgcttttttcattggtgccgtttatacgatgctcatgcggttccccaaaccctctgtgcaaacggcccagcctctctttacgcctgtacgcttaggttcgtttgctttcccttttgcgtttttgccgtttggcttccctttttcttttgccttcaaactcaaagcagagcctggctgcctccccatggagcgccagcaggcagatcaaattgggaagaatcatcagcccgttcatgatgtcggaaacgccccataccgcctgtaagggggtcgtcgcccccacaaaggcaagcgcgcagtagataaggcggtagacgcgattgtatcgctggcttttgctcaggtattccagcgatttttccccataatattcccagcccaggatggtggaaaaggcaaacagcacgatgctgcccgtgaccacccagccgcctaccggccccagcgccgcctcaaaggccgcaatggtcagcggtgcccccatcagcggcgcgccctgggcgtccactgtgcccaatacaccggaacaggcgatgaccagccccgtgaccgtacacaccaccagggtatcaaaaaacgtgcccgtcatattgatatacccctgcctggccgggtggtccgtttgggccgccgccgcggcaatgggcgcagagcccagccccgcctcgttggaaaacacccctctggctacgccccattggacagcctgccccatgtgcgctacgatggttcctcccacgccgcccgctgccgactgtgcggaaaatgccatgcggatgatctccgcaaggccggccggcaggtacgccgcgcggctggcgatggccgccaagcccgccgcaaagtatcccaccgccatcaccggcaccaccacgccgcatacccggccgatgctgcggatgccgcccagaagcacgcagccgctcagcaccatgaggcaaagccccaccagatacgcctccgcgcccgtcgaagcatagagcgcctctgcaatggaattggcctgcgtcatgttgccgatgccaaacgccgcggccgcggcaaacagtgaaaacaaaaaggccagcgctttgcccagctttttccgctgaaagccatttttcatcgcatacatcggcccgcccgccatctctccgtttggctgtttttcacggtaccgcaccgccagcacgctttccgcaaatttggtggaaaggccaaacagcgcgctgatccacatccacaccagcgcccccggcccgcccagcaccatcgccgtggccacgcccaccaggttgcccgtgccgatggtggcggccagcgcggtcatcagcgactgaaacggggaaatatccccgctgcccctccgcccctttgtcctttgaaatacagcgcgcagcgcaaaccccaaattgcgccagggataggcctttagccggatggttaaaaacacgcccgtgcctaccaacagcacgagcatccacggcccccacacccattggctgatgcgttttatccactgcaatgcttccatctttcctcccgatgcttgtttttttgtcaaaattatttcataatagagtcatctctgatataaaattgtattccgttgccgttgatagaatttcaaataggagcgtctcctattgtacgttttcagaagtttttgagttttggagggtttctctatgtacgactatcatatccactcctaccacagcgcagacggccagcagtccctgcgcgaaatcgccctgggcgcaatccataacggcctggacgagatctgcgtaacggcacattatgattacgattttccattggctccgcatctaaatttcctttgcgatttgatcgactatgtagaggatgtggagcggtacgccgcccggtttgccgaccagctcatcatcaaaaccggtgtagagatcggcatgcaggcgggccgcgacgatgtctttgccgccacgcggcaggccatggccggcttgcggttcgattatattttgggctccatccattggatggggtttgccgacggcaacccgcggcgcctcatagagccggatgtcaacccggttttcggctacggcgccacgccggatgaggtcatgcagaaatacgctttgcagctgttgtcctgcgctaaggatttccccgagctggattgtatcggccaccttacctattatgcccgccaaaacccctacccagaccggcagctccgctaccgcaacgcgcccgatgagctggatgcgctgtttatgtacctgatctctcatggcaaagggctggaaatcaacacctcctccaaaacgccatacggcttttttatgccggatgaggatatcatgtgccgttaccatgaattgggcggcgagatcgtgaccatcggttcggatgcccatacgccggaccgcatcggcgagcactacgcggccgcctgccaaatgctgcgccgcgccggcatgcgctatgtatgcacctatgaaaaccacaacccaatattccatcgcatcggaggataaggcccttgcagccgcataaaaaatattttttctttgatttcgacggcacgctgaccatcggccataccgcctgtgtgccgcccgatacccgccaagccctgcacgatctgcaaaaaaacggccattttgtcgccattgccaccggccgtctccaggccgaggccatcggcttttgcccggaattgggcatttcccacctcgtatccgacggtggatacagcctgaccatcgacgggcgcttggaacaaatgcgctctctggacgcttccctgtgccaccgcgtgctctcagagctcagcgaaaagggcattccctggggctttacctgtgaaaacaaaatggtgcgttataccaattccactgcctttttattgaaggtaaacgattattatatgcattccgtgcttgaccctgcgctggattttcgccgcgtttccaccttttataagctgtatatcgcctgtactgaagaggaggaagccggcatcgaggcgctatcctatgcgccttgggtgcggtacagccccacctgcattttcatagagcctttggaaaagcaggagggcatccgccatgtgatgcagcgcttagctgcgccggtggaggatgtggtggtgtttggcgacggcaccaacgacatccccatgtttacccagccctggacctccatcgccatgggcaacgcgcacgaatcgctcaagcgctgcgccgattatgtcaccgctccctcgtatgaaaacggcattgccaaggcctgccgccatttcggctggctctaaggcaaaaagccgccaaaaggcggctcaaacccctctatccgcaacaaaaacggcggccggatgcttgttcctgccgccgttttcctttcccttttcccgttttcttcctttagcctttgctttgcctgctctacggtttcgccttccttggtcaaatactggtccacaaatttgtcctctattttggtatatgtgcctactaccgtatcttccaccttttgatacgcgcccactacggtatcctctaccttttgatacgcacccgctaccttttctgctatcttttcattcgtctttacaagcttcgatttggccatcccaatcgtctcctttccttttgctgtatctcatcatccaaacgccaagcaccaaggcaaacaggcacacgcccgcgccggtgatgaggttcatcgtatacgcgtcaacgcctgtgccgtcgctaaacgatacaagcatggagcgctgcattgtcagcacggatacggccacctccatcatccgaattgtttgtatgatagtgctcagcggcgtccttttctttcgggctcttacggcgtttacgatgacccaagaaattttggcaaacgtataggccgcaatggtaatcatgagaatttcatcgtatgccatggctacatcttccagaaggctgatgtagacgatgccaatcaaaacaacgctcaatacacaaaacaaaacgcccgtcagccacataagggcgcgctccttttcaacgccgcccttccgcaagcccaacacagcagcgctgcgcattgcgctgagcaatatgtaatacacgcacgacgcgagaaaccaaatggaatggcgcgctaggccgagcacgccatggtaaagcgcatacgctaggtttaggcccgctgcccagcccaccggtacgatggtgcggtatcttccattgcttacgatccggctgccccattccgtcttttggattttgtgtaagatcgttttttgaattctcatgctctgttttcattcatcagcagggctgcccgcccttgacgccttttagtaagggaatcaggcatacaagcaatacgatccccactacgcctatgagcatccccggcagcatcctttgccataccatgcaaaagcacatgcccacacccagcagcattgcgccggcaacacccaaaagaacggcccgtacatgcctgccggacagatggcagggcgccttgtgttccatttttctccagatcagcatggtggcaatccccagcacaacgcctgcacagcccagcacaacgcccggcgtaaaggcattccattcggcaatcagcgccatgcacatgccgatggcaaacagcacgccgctaagcgttcccaatagcaacgcagtaaaactgctttttttcatcataaacacctccaaatctcatccattaaaacaacgcttgtagttttaatgcaattgcatcataatattttgtaggcttcgtttcaatcatcaatctttcaatatctgttggaataatggagggaccccctatgaatacaaaaaacaacaagcgccgccaggcttcgcaggaaaaaatcgaaaaggcgttccttgagctcttgcagacaaaggagctatccgccattacggtgtccgaaatcatcaaaaagacaaagctcaatcgcagcaccttttacgccaactatgcagatctctatgcgcttgcagacgcgatccgggaaaagctggaaacggatgtggcccagctttataaggacgatagggataataaggtgaacagcaacgactacctgcgcctgttttatcacatccaaagcaatcagcttttctacaaaacctatttcaaattgggctatgacggccagtacaaaatagagctctatgatacgcggcaggccgaaacatactttggcaacaaacacatcgcctatcatatggagttttttaaggccggcttgaatgccatcgtaaaaaaatggctggaaggcggctgccgggaaacgccggaagagatgaacgaaatcatacatagcgaataccaaggcagggaaatcgtccgctagcgtaggcgcccgtacaaaaataccgtccaagacgctctctgtcttgggcgcttttttatttttatcccgtaaaatttctttcttttccatttttagataccaattcctttctttctgccgtatgctatttgcagaaacttgaaggagaatgcagaattgagaaaaaatatcgtcggtcttttcatcaaacgcctgcgcctggcgcacggccttacgcaggagcagctggccgtgcaaatgcagctgcgcggcctttccctcacaaagctcaccgcttcccgcatcgaaacggggcggcggatggtgttggattatgaagtgaaagcctttgcggcatatttttgcgtgccggttctctttttatatcgataaatcattgccgccggttcttttttctgtgctacactgtgcttatccatgttttcgcaaaggagtgtttgtatggagctcgtcgtttcttttccgttagaggccgtcggcctgtttgcctttggtatgagcggcgtgttggtagcgctggaaaaaaggatggatctaatcggcgtttgcgttttggccatcacgacggcctgcggcggcggtatgctgcgggatgtgctgctaaaccagcccctgcccgcctttttcacccatcggtcttatctttgcatcttggccttcgccattgtcgtaacgctgttgggcaacgctgcgctgcgccgtcatcaccagctgcgccggtttgatttgtccctgccgctggatattgcggacgccgtgggcctggccacctttggcacctcggccgcgctcatcgttgtggacatgcccggcaacctgatcacctgcgtatccatcagctgccttacggcttgcggcggcggcatgctgcgcgatgtgtttgcccagcgcatccccatgatcttcagcggcccgctgtatgccaccccctgcatcctgggggccttggtgctgtattacggcgtgcgctttctgccgcgcaccgctgcggtgctgctttgctttgctctggtcttgggtcttcgcctactcgctatcttcttccacatcggcatgccaaggttcctgtattatgacaacaacgaaaccaacgcacccggccccgcacaataagcgccgcagccgcccgtttttgttgtataataagctatcatcatttttacattcataggagatatgccatgaaacgaatcctttgctttggagattccaacacatggggctttgcccccaaggacggctaccgctttgacgaaaacacccgctggaccgggctcgtccaaaaggcgctgccgcagtataagatcatcgaggaagggctcaacggccgtaccgccctatgggatgaccccatcgagggctacaaaaacggcaaggaatacctgatcccttgtctatccagccaaagcccgctggatcttgtcatcctcatgctcggcaccaacgactgcaagacacgctttgccctcactgcctcggatgtggcggccggcgtgcgcgagctggcaaacctcatcctagcttccggctgcgggccggagggccgcgcgccgcgccttctggtcatgtgccctgcgcccctgaactatacccgcgagccggattactgcgcttcgtttgatgacaattccaaccgcatctcccgcgagctgcccgccaaatttgcccgctttacccgcgaaatcggctgcgattatctcgatctgggccccattgcctccgtcagcgaaaaggacggcattcatttggacccggatcagcaccaaaaggtagccgaggccgttgttgccaaaatccgcgaaattctcggttaaatgaaaaaaaggagccagacgggctccttttttggtatactgacagtgagaaaccattcttttatagaaaagaggtcatgcgatgcaatacgagatccaaggcggcgcctaccccatcgtcgtctgccgcctgcaaagcggcgaaaagatgattaccgaaaaaggctctatggtgtatatgacccccaatatgcagatggaaaccaggggcggcggcatcggaaagatgttctccaaagcgctatccggtgaatccatgttccagaacatctatacggctcagggcgacggcgtcatcgcctttggcgccagctttcccgggcgcatcctaccgctggaaatcacgccggagcggccgatgatcctgcaaaaaaacgcctttttggcggccgagcccacagtagagcttgccatcaccttcaagaaaaaattgggcgccggcttttttggcggcgaagggtttatcatgcagcggctcagcggccgtggcatggcgtttgtggagatcgacggcgaattgatggaatatgtcttggcgcctggccaatcgctgctggtagataccggcaatgtggccggctatgaagaaagcgtttccatggagattcagcaggtagaggggctgaaaaacaagctgctgggcggcgaaggctttttccatacccgcctgaccggacccggcaaggtgtggatccagaccatgcccatctccacggtggcttctgcgctcatcggctttatgccctccggcaactaaggcaaaataaaaacggcggacaaaatatccgccgtttttctctattttacgattccagtgcgcgcagcagctgcggcagggcgcgctcaaagcacacgccgtagcgcgtctcaaggcccagcggcagcgtctccacgatgctttgctgggtaaagtccgccgcgatttgggccgcctgcaccagcgttttgcccgccaggtatgcgcccgtcagcgcgctggcgtatacatcgccggtgccgtggtagctgcccggcatatgcggggcagcggggcaggccgtctgcccagtctctctatcatacaccgcggcgcccagcttcccctcttccgggctgatgcccgtcaatacaacgctggcctgcgtcatttcgcgcagcgcctgcatcaaatcatctacctccgccttatcgggcgtttccagatacggccggcccagcatcaacgccgcctccgtctggttgggcacgatcacatccgccttttggcaaagcgttttcatcagctgcggcattttttccgacattccggggtacagcttcccgtgatcccccatcaccgggtccacgatgatcttggtctgctctccccgaaacgcatcgaacaactgctctaccagcgccacctgctccgccgaacccaaatagccagtatagatggcatcaaatgccaagtccagcgttttccagtgcgcaaagatagcgggcaggtcttgggttaaatcgcggaacgtcataccggtaaatccgccggtatgcgtgctcagcacagccgtgggcagcgcgcttgcctccagcccagccgcagataaaatgggcagcgccaccgtcaaagaacagcgccccacgcaggataaatcatgcacagccaatactcgtttttgtttcattgctttctcccttgcatcttttcggtctatgccctataataacgaaaaactgacctgattaaaagattcaattttatcattttttataaggtcagaagccaggaggcccccatgctcttttccctgccgccagatgatagccatacgccgctgtatatgcaaatcatccgccacctaaagcagcagatccgtacaggcgcgctgcccgcccatgccaagctgcccagcaagcgcagcctggcagagcatctgggcgtcagcgttaccaccgtggaaagcgcgtacagccagctggtttccgaagggtttgtggaaagccggcccaagcgcgggttttttgtctgcgagatcgagcccctcctgcctgccgccgcagagccggcccggcccgccgcaaaggcggacggcacggcggcgccgcttgtggatttttcgcccggcggcatcgatacgcgccatttcccgtataccacctggcgtcgtctgctgcgcgcctgttttgatgaggcggacgccacgcttttgcaaaacgcccctgcccaggggctggtttcgctgcgggaaagcatcgcgcagtacctggcacaggcccgcggggtgcgctgccgggcccagcagatcgtcctcggcgccggcaccgagcatcttttgcaaattctcagctatatgctggatagcagctggaccattgcgctggaaaaccccgtgtataacaaagcgtaccatatgttctcccgcatgggccattcggtgctgccgctgtatgtcgatgaaaaggggctgcccgtttcgccgctgggtgcgctgtcgcatgcggcggtgtataccaccccttcgcatcagtttcccctgggcgtcagcatgcccatcagccgccgcgttcagctgctgaactgggccaaatccgcgccggaccgctacatcatcgaggacgattacgacagcgaattccgctacgatgcaaagcccctgcccagcctgcaaagcatcgacgaccacggccgcgtcatctacctcggcacgttttccaaatccatcgctccctcgctgcgcatcggctatatggtgctgccgccatcgcttttgccgctttaccaggcccaatacgcgcaattcagctgcgccgtctcccgttttgagcagcaggtgctggatgcgttcctgcggcagggcgcgtttgaaacgcacctcaaccgcatgcgcaagctatataaggaaaagcgcaaaaccttggtttccgccctggaggcagcctttccccattccctgcaataccagggcgagcaggcagggcaccacgtgctggtgcatctgcccggcatgccggacggcggggcgctgtgccgcccggccatggcggagggggtcaaggtctatcccctttcgccctatttcatcggccccgtgccgcctgcctatcagggccatgtgctgctgggctacggttcgctcagccaagcgcagatacagcagggcgttttgctgttgtcccaggcctgggcgccgttcatagcataaaaaataccggccaaaacagccggtatttttgtgtttgttatccttccgcgtagtttgtaaagtagccctgtatccaaaccaccggcgtgcccttatcgccggaaccggaggtcagatcgcacagcgaaccgatcaaatcggtcagccggcggggcgttgtgccctgcgtggccatcgtgccttttaggtttttgtccttggtttcaatggccttttcaatggcttccctgagcgcctgcccagacaggtttgcaaactcgttgtccgccaaatacttgagcttcaattcattcggcgtgccttccaggccgctggtgtaggccggggataccaccgggtccgccagctcccagattttgccgaccggatctttgaacgcgccgtcgccatacaccatcacttcgatatgcttgcccgttttggccagcagctcgtcctgcacagcctttacaaaggcctcgcagtcgcgcgggaagagctttaccgtctcctccgtcgccttgttggagcccagcagaccatacgtggggttaaagccgctgccccctaccggctttgtcataatatcatccaggcccagcgccgtgcgcgcgccgttttgcaacagcagccgtttgctgcgcgccctggtatggatatcgcaggtcagcacgtccttggcatagggcagaatgtcttgggcgttgttgcccaggatgatttccacctctgcgccctcgccctggatcagttctttgtaatattcgatataatctacgcctgtaaagggatgctccacccggccgaatgcctggcggtattgcgcttcggtcagcacatcggtataggggttgatgcccttttcatccaacgcatccagcgagaccaggtggttgcccacctcgtcggacggatagctcagcatcagcgtaatctttttggcgcctctggcaatgccttttaggcagatagaaaaccggttacggcttaaaatcgggaaaattaccccaatatggccccccgggaaatgagccttgatgtcctctgcaatctcgtctaccgacacataattgccctgtgcccttgccacgatggcctctgtggccgctacgatatcgcggtcttgaaactcgatgttttcgctctgggccgccgtcagcagggaatcgacgacgattttgaccaggtcatccccttgccggatgatgggcgtgcgcacgcctcttaccacggttccgatcgattttgacataaaaggtgctccatttctcaacggcgaacatttgcccaagggcctgtctgccgttgacggcaggcccacaaaacagtattataccgcactttgacgatttacactagcggtttgctttgattttcttttgtgcatagcgctgccgtgcccgccccatactaacagcaggaggtgaagcgcttgtatcgcgaaatctatgcggacacgggcagcaaaccggctaaaaaaccacccaagaaaacgccggccggcgatccgctgaaaaacccaaaggacatttccaagatccaagtctagcacccgaggccgcagcgcagtctgcggtctattttattggatgcgctctatcgccttctgcaaaccttggatcgggccctgctcctggtacatctccgcggcatccttggccgaggccaataggatcacatacaccagcatggaatattcgttgatgaccttgggccgtgccttttcaatccatttctccgcaagcgccttgagcccttcctggttttcctcaataaacgcatccagctcgtggatatagcggaaccccaaaaactgcaaccgctgcacgatcttcaaccggctgataaacgcatcgtcccggcttacctccaagccgtactgcgatttggcgtggctgctaaactcccggatccgactgctggtttcaaaatactggatcagcgtatttttgttgatgtccgtttttaaaaccttttcaatcctatctatgctctggttatattgcgctacttcctggcggatcacctcgaattcctcgtcgatcaattccagcgtggccgcgatccttgtcagctttctccggatggaaagcggaatttcaaagttggatttatagcccagcccatgctcaatttccccccaggcatgctgtagcgccgtgcggatctgcacttcaaacttgatgtcccggtagcgctggtattccaccagctggcagcgggcatcggaaaaccgcaggatcacatggatggaattatagccaaaatcaatgtacccctccaggctctttttgcgcttgtccaccagctctatcatctcaaattcgcgagtcaaaacctccagcacccgctccatatccggctcaaacaatgtcacgatcctgcatccgatcaggtccgttacgtcggtcagctgctggtatttgcgcttaaactgtatctttttccgcaacgaatcctcgtttttgatacggaaggaaatattcgccacctcaatgccattggcagagagcagcgtggggataatgtcctccaggtcgtcttgaaaatccatcaggcgctgcttttgctccgaaaattggcgtaggatggtatcctcgttggcaaccagcgctacgccctgtatctcttgcatttccacttgcttatttcatcctttcgccgcaggtctgcgcagcatgcccgcgtttctatcgatattatactatatttttccgctgtgcgcctcggtatcctggccctttgcgccatgagggcaaagtatggtacactaaacagcaaaaggaggcttttcatgcgcatcatcgtcattgacggccagggcggcggcatcggccgttcgctggtcgagcagctcaaaaaacaatgcccgcagcacgaggtgctgggcgtcggcatcaacgccattgccacggccgccatggtcaaggcaggtgcggacggcggcgccacaggggaaagcgccgtttgctacaattgcgcgcatgcagatgtcatcgtcggccccatcggcctggtgctcgtcggctctatgctgggcgaggtcagcgccgccatcgccgccgcggtatccgccagcgaggcagaaaaggtgttgatccccgtttccaaatgccatgcgcacatcgccggcgtcaaagaccagcccatcggccggctgctcgacgatgcgcttgcggaaatcaaacgccttgtcggctaagcgcgccctttacattctcacttttttgtggtaaagtaatttctgcatggggcatgaagcccctgcatttcgccagaaggcggcttgtttgtttcatttatatcgtttgtcaatgcatcacgaagatgtttcggcctggcaagggctgctcttcgtggtttttttatgttctgtttggaggattttggatgcggccgcgcgcgcttaccatgttgggaaccattgcaaaaaaattggcacagtgtatcgttgtgctgtttttgctgtcgctggccgtgttttacatggcccgcctggcgcccggcgacccgctgcgctcctattacggcgaaagcgtagagcgcatgagcccgcaggaacgcgaaaccgccatccatagccttggcctggatcagcccatctacaagcaatacggcatctggttgcaaaacgcctttgacggcgattggggcatttcctttaagtataagcagcccgtcacctctgtgcttgggtccatgtaccaaaacaccttgctgttgggtggccttgcctatgtatgcacctttggcctggcgctgctgctgggggtgttttgcgccctgcatgaagaccgttttgtggataagctcatctgtaagatcggtaccatcaccaattgtatcccctctttttgggtttctcttgtcctaattttgatctttagcgtcaatctcggctggctcccttccagcggggcctatgccctgggcagggcgggcgatattctcagccgcctgcgccatctgattttgccgctttccgtgctggtgctcagccatctttggtattacgcctatatggtgcgcaacaagctcatggaggagattcggcaggattatgtcctgcttgccaaggccaagggcctaggccgtcggcgcatcgtatatcggcactgcctgcgcaatatcctgcccacctacctgagccttatggccatctccattccgcatattctgggtggcacctacatcgtagagcaggtctttgcctatcccgggctgggctccttgtgctttgaaagcgccaaataccacgattataatctgttgatgattctatgcctgattacaggcgcgctggtcatcctttccaatctcatcgcacagcttttgcaagataggatcgatccgcgcatgcagcgggaaggaggcaaaacggcatggacacccccgcccagggctttgaattagtcggcccccaccccgccgaaacacaggccctgccgcccaaaaagcgtcggtggtttgcctccgaggtcccgtatctgtcctttgtcatcctagggctgattttgctgggctgccttttctgcgaatgctttatccccaaagacccctcctacctggatctttcgcacatcagccagccgcccggtggcgggtttctctttggtacggaccccatgggccgcgatatcttttccatgatctggtacggcggccgcatctcactgttcatcgggtttgtcgccgccgcggtctccaccgccatcgccgtggtatacggctgtatcagcggctttgcccccgcgtggctggatgatgcgctgatgcgctttgccgaaatggccatgagcatcccttccatcctcgtcatcatctttttgcaggccatgatcggccaatccaaccccctggccattgcctgtatcatcgggctgaccagctggatgaatatcgccaaggtcgtgcgtaccgaggtgcgccagatccaaaacagcgaatacatcctggcggcaaagctgatgggcggccgtttcttctacattctgcgccgccatctgctgcccaattttatttcctccatcatgtttatggtggtcacaaacatcggctctgccatcggcacggaatccacgcttagctttctcggcatcggcctgccgattgaaacggtctcctggggcagcatgctcagccaggcggaccgggcgcttttatccaacaactggtggctcattctgatccccggcctgtttcttgtcgtcacgctggtctgcatcaccaacatcggccattacatccgaaaggccaatcatcggcgatgcagcaatctataaaaaaatttgtaagggagagactacgatgaaaaaacgcactgcctttttggcgctgctgctggcctgtacgatgctcctgctgtccgcctgcggctcagccggcaccagcggcccggacgccgcgcaaaacaacaccctggtatacgccagcggcgactataccagcatcaaccccgccctgtatgagcatggcgagatcaattccctgatcttttccggcctaacggcgcacgatgcagacaataaggtcgtacccgcgctggcggaaagctgggaatacgacgaggattcctatacctataccttccacctccgcaaggatgttaaatggcatgatggcgagccctttaccgcaaatgacgttgtctttaccttaacggaaattttggatgcagaaaaccaatcggaaatcgcctccaactatgaggatatcatcagcatggtagccctggacgactatacctttgtcctgggcttaaaggcgcccaacgtcgccatgctggattacctgaccgtcggcattttgccgcagcaccttttggaaggcaaaaacctcatcaccgatgaattcaaccaaaagccggtgggtaccggcccgtataagctgacgaattgggatgtgggccagagcatcacgctggagaaaaacgaggactattacggcggcgtgccctccatcgataccgtgattttcaaaatcgtacccgacgaaaaaacccgcgccctacaactcaaaagcggcgaggtggacttggcacaggtgaccccggaggacgcccagcagtttgcaggcctggagggctttaccacctacgatatgaaaaccgccgactaccggggcattctgtataactttaacaacgacctgttcaaaaacaaccccgagctgaccaatgcgctcagctatgccatcgaccgccaggccatcatcgacagcgtgctgctcggccaaggagaggtagcctattcccctctgcaaatggggccgtataacaaccctgatatggaaaagttttcctatgaccccgaaaaggcccagcaggcgctggaaaaggccggctggcaaaagggcagcgacggcgtctacgagaaaaacggcacccgcctttcctttaagatcaactgcggcgaaggggaccaggtccgcatcgacatggccaccatctgcgcccagcagctgcaagccatcggcgtggacgctaccgtggccgtcaatgcggaaacggattgggcaggccaggaggcctatctcatcggctggggcagcccgtttgacccggacgaccatacctataaggtctttggtacggacaagggggccaattacagcggctattcctacgataaggtcgacgagcttttgaaaaaagcgcgggaaaccgacgacgatgcgcagcgcaaggaatattaccagcaattccagcaggcgcttaccgaaaagatgcccttcacctttatcgcttatgtagacgccatctatgtcggcagatccaacatccagggcatcacgccggataccgtcttgggccatcatggcgtcggcattttctggaacatcgcagactggacgctcagcgcgtcataatcagccaaacagcatcaaagaaaggaggcgccggtatgcgcgcgttgctgcaagcggacaacatatccatccaatttcatacatcgcaaagcaccgttcaggccgtgcgcggcgtctccttttccctctatgagggagagacacttgccattgttggtgaatcgggctgcggcaaatccgtcctgtgcaaatccattttgcgccttttgccgcatagcggggccatcagcaatggcaagcttcttttccaaggtcaggatcttaccgccctttccgaaaaagaaatggatcgtattcgtggcagcgagattgccatggtctttcaggaccccatgacctcgctaaacccaacgatgcctgtcggcaaacaaattatggaggtcatcttacagcacgaaaagatctccaagaaagaggccaaggcgcgtgcgcttttctggatggaaaccgttggcctggatcacccggaggcgcgctttgcccaagtgccgcaccatttttccggcggcatgcgccagcgcgccgtcatcgccatggcgctggcctgccatcccaagatgctcattgccgacgaacctaccacggccttggatgtaaccatccaggcgcagatcttagagcttttgcagcggctgcaaaagcagttttccctttccatcctctttatcacccacgaccttagcgtggtggcaaaaatggcggaccgcgtagccgtcatgtatgcaggcaaaatcgtagagaccggcctggtagaggaaattttccgcgacccaagacatccctacacctggggccttttgggtgcgctgcccggccgcagcgcagagggtcggccgctgtacagcatccccggcatgccgccggatctgtccgctccgcctatcggcgacgcctttgcccagcgcaaccaatatgcccttgccatcgattatcaagagcagccgccgatgttttccgtctcgcccacacacagcgccgctacctggctgctggatgatcgggcgcccaaggtgccctgcccgcttacgccggaggtgaaaagccatggctgaggcattgttgcgcgtatcgcaccttacaaaggagtttcccctttcccggcatgaagcactgcgcgccgtatcggatgtttccttttctctggcccccggcgaaatctttggcctggttggggagtcgggctccggcaaatccaccctggcgcgcaccatctccgggctgtaccgccccaccgcagggcaggtgtttttagaggatctggaaatatcgcagcccaaggtctatgcacggcaccggccgcgcattgcccataccctgcaatttttgtttcaggacagcatggccagcctaaatccccgcctgcccattggcgcgctcatcgaagagccgcttgccatccaccacgagggcacgcgccaaagccggcgtgaaacggcgctgggcctaatggcgcaggtagggctggatgccgcgctgtacgatcagtatccggcggagttttccggcggcatgcgccagcgcgtctgcattgcccgtgccctggccctgtctcccaggcttatcatcgcagacgagcccatcgcttcgctggatgtttcaatgcaggcgcagatcatcaatctgtttcaatcgctgtgccaatcccagggcgtttcgcttctgttcatcgcgcatgatctttccatggtgcgccatatcagccatcgcatcggcgtgatgtgccgcggtaggctggtggagctggcgcccgcccgcaccttgtgcgcgcgcccgcagcatccctatacaaaggctcttctttccgccgtatatgtgccggaccctgccatcgccaaaacccagcggcgcacatcctttgatgccgacgcctttttccaggcccatccctccctcacatggcgcaaggccgggccggagcattttgtgcttttgccctaacggcctgcgcggagtataaaaacagcccgcatggcgcacactagggaaaacgaattcccaataggaggccatagccatgcataacgcactcaaacaacagatcttagatgaattggacaagcgtatccacgatttagaggagcatcgttacgatgaaatcatcgtcaccggcaaccaatacgatgagctcaaccaggtgctggccaagatcatcggcgtgccgcttctcaaggaagtgcaggatatccgggattttgtgctcggcctgcccgaagcctaaccgcccgcaagccctttttcaagggcttttttctttgccctttttgcgttgtgctgtataatgttcgtacatgtatacaaaggaggccacacatcctatgccggaactgctttcgcccgtgggcggcccggaacagcttttggcggcggttcgctgtggggcggacgccgtgtatcttggcgccaaagggttcaatgccaggcgcaatgcgcacaatttcggggcgctcgacctgccccaggccgtttcctactgccatgagcacggggtcaaagtacatgttacagttaataccctggtaacagaccccgaatggccgcagcttttggataccttacagcacatcgcgcaaagcggggtggacgccgtcattgtacaggatctcggcgtggcgcaaacgatacgggaagcctgccccacgttgccgctgcacgcttccacccaaatggccattcataacctggcgggcgcccaagcgctttggcagcaagggtttgcccgggccgtgctggcgcgcgaattgtgcctcgaagagatccgcgccatcgcagacaactgccccatcgagctagaggtctttgtgcacggcgctctatgcatgagcgtttccggcctgtgcacgctgtcctccatgctgggcgggcgcagcggcaatcgcggcctgtgcgcacagccctgccgcctggattttcgctgccgcggccgcagccatgcgctgtccttaaaagatctatgcgccgtgcgccatgtccgcgcgctggcggaggctggcgtggcctcgtttaagatcgaaggccgcatgaaacggccggaatacgtggcagccgccaccaccgcctaccggcaggccctggatgggcaaaaaccaaatcttcaacagctgcaggccgtgttttcccgcagcgggtttaccgacggatacctgacgggccgccgcgatctgtccatgttcggcatccggcgcaaagaggatgtgcaaagcgccaagcctgtgctctccgatctggcccgtctctaccataaggaaacgccgcgcgtaggcgtggatatgtctctggagctttccgcaggccggccagcacgcctttgcgtttctgacggcgaaggccattgccaggccgtgcaggggccggtgcctgaaaccgcccgcaccaagccgacagacgagcacagcgcacgcgccagttttcaaaagaccggcggcaccccgtattttctccattcgcttgcctgccgcatcgagcccgggctgatgctgccgagttccggcctcaatgcgctgcgcaagcaggcgctggaaggcttgtccgcgcagcgcagcgcccttcatcctcacgcctttgaccgccaagcctgccgcccagcgcccggtgcgcctgtctgtgatgcgcctgcgctgcggcttcgctttgcacgggccgcgcaaatgccggaagagggcctatccgaagcagaaaaaatcatcctgcccatcgaggaaatcgaagcacaccccgagcttttgcaccttggcagccaaacgttggtgggtgaattgccgctgttggtatttccgacggaggaacaggcgctctcggcgcgtttatccgccctatacgcctccgggctgcgccaggtcatcggaggcaacctgggcacgctggcattggcacaaaaggccgcgccctttacgcttttgggggatgcgcagctcaatatcctcaaccaaagggcggccgccttttaccatcgtttcggcatttatgatcttacgctttcctatgagctcaacgctcgtcttgccccgcaggtgcctggcggcgtgctggcctatgggtttttgccgctgatggcgtttcgcgcctgtcccggctgcgctcaaaacggctgcggggactgccccggccatttccatcttaccgaccgcaaaggcatccggtttcaggctgcctgccatcaccgccgctatacccagctattcaacagcgtgccgctttatatcggcgataggcgcataaagggggttgcatttgaaaccctatattttacctttgaaacgcaagagcgctgccgggccgtgctctccgcctttcagcgcggcgtgccgctggatacccccgtaaccaaggggttgtattaccgtacgctgcaatagcagttatccacgtttttttagagaggcgcgccggcggcgagcgcctctttttcttttttgcctgcgccacatccaaactgcgcccagcagccccaaagcgccccatagcagcatcgcgtaggtatccataaacgcgccaatgctgctccaagcatggcccagcgcccgcccggccaataccagcaccgtgttccaaagggccgagcccagcgtcgtcagcaacaaaaacggccccatcggcatgcgcgaaaggcctgccggtacagagatcaggctgcgcacaatgggcgccatccggcagaaaaataccgtccttttctggtaccgttgatagcagcgcatcgctttttttacattttcctcttttagccccaggtactttccatagcgccgcacaaaggccgtcagcctcgtttgccccacccagcgccccgcaccatacagcaccagcgcacccgccacagagcccagcgttgcggccaggatcacgctttgtacggaaagcgtcgtttgaagcgtcataaacccaccaaaggccaaaatgacctccgaaggaatgggcggaaaaacattttcaatgaaaatcaggaaaaagatgcccagcgctccgtattgccccatcacctgtaagatccatgcctgcaccgcagttccccctttcccgatgatacgccgccttgcctggccgtatcatcttccgtataataaaatgaagtgtgtccgccctgtaatgggcagaagggagcctccccatgacgatggaattgctgtccccggccggggattttgaaaaatgccgtaccgccctgcattttggcgcggacgccgtctatgccggcggcccgggcctgcacctgcgcaagggcgcttccggctttacgctggaagcattggccaaggcggttcagtatacgcatgaacaggggaaaaaattctatgtaacgctcaacgcctttgcccggaacggcgatctcgatgcgctgcccgatttggcaaccgcgtaccaggccatgggggtagacggggccatcgtggcggacctgggggtattgtccgtttgcaaaaaggccgcgccgcgcctgccgctgcatatcagcacgcaggcaaattgcgtcaactaccagacggcgcgcatgtaccatgatctgggcgccagccgcgtcgtgctggctcgcgagctttccctggaagaaatcgccggcatacgggccaaaacgccggccggcttagagctggaggcgtttgtgcatggggccatgtgcatgtcttactccgggcgctgctttctcagcgcctatctgaccggccgcgacgccaaccagggagactgcgcccagccctgccgctggcagtatgcactgatggagcaaacgcgccccggccaatattttcccgtagagcaggataaacgcggcacctattttctcagcagctatgatctgtgcatgatcgagcatttggacgatctgcaaaaggccggcgtcagctcgctgaaaatcgaagggcgtatgaaatccccctattatgttgccaccgtcacccatgcctaccggcaagcgctggacggggctgccccgctttccgtattgcagcgcgagctggattgcgtcagccaccgcgccttttccaccggcttttactatgggccgatggataccagccaaacggccgccgaatatctgcagtcttgccagttctccgccgtagtgctgggccgcacggaggaccgcctgctcatcgagcagcgcaataagttttccgttggggatacgctggaggtcgtctccccccgttataccaaagcaagcttttgtgtggaggccctctgggatgaaagcggccgccccgtggaaagcgcgccgcacgcccagcagcgcttgcagctgcgctgcccgtacccattgaccgcgctggatattttgcgtcgtcgcctctgatttgtcgccacaaaacgccgcgatcgtgcggcgttttttctatccggctgaatatgacgaacttgtcaccagatttgcaggattgtcactgtattttttacaggtcgtatgatatatttttatcaacatcaagaaatgggagcttttattgtgtctgaagattccttcaaccgcatatccccttcgctggaaagggggctcagcgccgagcaggtagcgcaaaaaacggcacaggggcaggtcaaccacgccccggagcccatcacaaaatccaccgcgcgcatcatcagcgacaatttgtttacctccttcaacgcgtttgtcgtggccattgcggcctgcatcgcgctgataggcgcgtatcaaaatctgctgtttttgatgatcatcgtcgccaatacgctcattggcatcattcaggagatccgttccaaaaaaaccatcgaaaagctgagcgtcctgtccgtccccaaagcgcgcgtgctgcgcgacggccgcttttctaccgtcgataccgaggccttggtcttggatgacctaatcgagctaaccctgggcaaccagatctgcgcggactgcatcgtgcgccaagggcaggtagaggtcaatgaatcgcttttaaccggcgaagcggaccccgtctacaaaaagcccggcgatgtgctattatccggcagctttgtcatcagcggccggtgcctggcccaggtggagcatgtaggcgcggacaactatgccaccaaaattgcgctggaagccaagcggccggaaaaatatcactctgaattgatggaatcgctgcgcaagatcacaaaatccaccagcctcatcattttgcccatggggctgatcctattc

SEQ ID NO: 2551 - DNA, 32314 bp, Unknown
  16S sequences of unknown bacteria
agcgtttttgaaaactttttttcgaattttttatttttctttcgaatttccgttctactccgcttccagaggcctctctcgaggacagcttgtttatattatcatatccttacctcttttgtcaactgtttttattacctttttttacttttttcgtctctttttttcaccctcccccttcgcttgacttctccgcctttctatgctatcattattatatagaaaagcgctgttaaattgagcgcgaaaatattcgacacgaaaaaaataaaaaattcttcaaaaaagtggcctgaaactattgacaaaattcaaaagatagtttataatgtatcatgctttcggggatatggctcagttggtagagcggtacgttcgcaacgtacaggccacgagttcgaatctcgttatctccaccagaattagtgaactcctgcttttacagatagaagcaggagttctttctttatattttcggtaaattaaatcgacttttattctcttttgttactaaacgcgttacttaaaatttgagcttctcaaccatctgaaaaaataagctacaggctgttgcttattgcatttttgtctttgaaacaaacagaacccacctgtccgtccactataatggtacggtaatgctccatatcttctcttttttctccgatatcgcggagagtaccgcccgttagctttatccggctttcctttcgcgtaatatactgcgtcaacagctttcccgcgtcggaagaaaattttaatctttccaattcagcctcggaacaaacaagcgccgcgattgagccgtcatatgccaatctgggagaagcgtcaatccccacgggaaactccgccaccgcacataaagcaagcgtagccgtgtgactgaagctgaaacaaataccgccggcaggcgaataaggctttcccgcttcggtaaacgcgactttgatcgaccttcccgcaagcttttgaagcatataaaaacaaagcgcggattgaaaacggtaatttttgtcatagaaacccgcgacatgcttttgataatattcgggcagagcgacttgtgcggtatcaaaacaggcgagcatacggggagtgttccgcacaaaaccgatttttatcccctcccgaagaagggtaagcgtctcgaattttacttgcgcggcgggcaggatttcccgccccttttttattccgtcaagcatgcccggccacgccagcgccctcaagttttttatcgaaatcgcttatcgcttccttccaatacgaatacttttcgtccgttcttctgtccgtcagcttgtcgccgaatttttccgtcagatattttccgagataccgcgtcgctttttccgcgccatagacgttgtaatgatttgctttgtcctgaaaatcccgggcgaaatccgcctgatatctgtcgttggagatattcatatccaaaaaatctattccgtgcgcgtcggcatactgctgaataaaattatgccgtgcatagctccaactcgtggcgttggcaaactcgctgaatacgatctgaatatcgtttttgcggcaaatctttacaaacctgttcagccccgaaagatgtacctttttaggcgcagccggcttcgcgtccgctttttccatatactcgcctggctgataaccggaaatttcggcggaaaatttataccctttggtgacgtcctgcgtccttacgccgggcgcgagataaaaatctctgggtttcaggtttttccagcgcgagtgaaagacaaacggagcaaaaaggctgtcgtaataccgaatcagaggaaacctgacatataaacaatccacgtccaaaaaaaccaccttgaacttttgacgtttaacggctttttccaaaaggtcgtcaattttttttaatcggttggctggcagtgctggaagcgtaggaagtatagccgtattccttatataaagttacgggagagaagcccgaatatacgcccgaatgtccgaacatgattatgtcgagcgaatcgtcgggttctcctataaagcccttcgcgtggtaatacttatccccgccccaatcggacacgtctttgggaataaagacaaagcaaagataggcataaacaagcataagcgacaatacgcaggagacaatgcgcagtatttttttatctttaccatcaaaatcctccgtaaataggatcgggcggcaagtacccagggccgtacgtcccgaaaacgatgacagcaaaaaccaccagcgccactgctcctacccgaacaaacagcgagcctttagcgagtttatcccccagcgaaatacggcaagagcttaaaattcccgagacaatcaaggcggcaagccccgctgccccgtcctccgcccacaccgttttgtatccttctccctcgagatagagcttgatcagctttgcaatctccgcattatcctccgcgatcagaacggcggactgttttttcgacataataggcgctcctctttcttctctccgccttaattatactccttaagcaacttttgtcaagccctcggaagaaaacgggtcgtaaagcgagaattttcccgaagaaattgacttttgcgggaaaactatgttctaccgaataggataatattatattcacagaaaaaaggatttgtccgatgaaaccgaaactccttctcatcgaagacgacgaaacgctcctgcgggagatgactgcttatttcagcgggtgttacgacgtttatgcagccgcttcactcgccgccgcgcaggaatatctggcggataacgcgcccgacgccgcggtgttagaccttattctgcctgacggaaacggattgtctctcctaaccgcaaaccttttgtccggcctgaccgtcattctcacgacgatggacgcggacgacgaccacgcggagggactcgacgcgggcgccaaggattacctcataaagcccgtatctctgcgtatcctcgcaaaacatctctccgtccgcctcgcgccgaaatcggaaagtctgctcgtctcgggaaagccgtccatcgacaccaataagcgcaccgtttcctatgcgggcaagcccgtctctctcacctcgaccgaatttaatcttctcgtctatctcttcaacgaagcggacaactttcatacggcgcaggaaatttacacggccgtttacggagaactgtttctgcaatcgaccgcgataaaaatgcacctttccaatctgagatttaagctgtcccgcgccgcccccgacgaaaattatatccagaccgcttacggaaagggctaccgcttcaggaaggagccataattatgaaaaaccgttccttaaagtccgtttttttcgcataggcggagctttgtctttgctcgcgcttatctttgccgcgttttttctgcccttcgtcctcgataacgcagcctccgtcgccgctgcggagacgtcgatcgccgtgatatcccagccctgtcggcagcccgaagtattggttcccgccgcggcgtttgcgtttctggtgccgaacgtgcccgacgtatcgagcacgccgttttgatcgttgatctgggacgcaaaaaagttatcttcaggattgttcggtccggagataggcgcaagggaggccgcgtctctgccgaacagccttcccgtgatgggaagaaggtcgggcgtgataaaatcgctcagcgtgatgtccgcgctttccacggagggcgaaacgaccatgccgccgcaccacagcgtaaggtcgcacagaggcagggacggattttcatatacaatcgcaagcgtccaaccagcatggttggtctccgaagtgcgcgcgtcgagcgcttcgatcaacgcgggtaccctgcccgtcgagtacgttcccgacatcgcgtttttcaccagtgtggtcacgtcggcgctctagacgtaaaacccgaccgtcacgttgtcttcggttatattgaaattttgttttgtcgaaggatcgggcacaatatcgttgcttccgagcggagcggtaaatctcacggagttatccagcagggaagaaatgttattggccgtagaacggaacaacccgccccagacgagctccgcgtacagcaccgtgcttcccgcgggaagcgtgagtacggcggcggaaccgttctgcgtatagtccagggtcgtcccgggaggaaatgaagacacctgcagggcattattcaagctgacaaacgctccgatggacccgaggatccccggagaggtcgcgttggccgctttgcttaagctcaaggtgtttcccgtaaagacgattcccccgtttttgatggttgagaatctttctataataggcatattttaacctcggataaaaaaataccgcttaacgttccgtcaacaaccgaagcgcacggcggtattcgttttatagtcgttgtatcatatattatgaaaaaaagacccgcggggggtacaatcccctgcgggtctcgggcgtccaaacgtcagaatccgattaaaaaatttgtaaaatacggcgtgaaaccaccttcggcaagctctaaattctgcgaaatatatcccagacgattgacctccgcgacggccgtcaccgagcgataggtactcagttgataaacccccatggcggaattgaaatagggaaacacaatcgaaatatcgttgatgtttatctcctgctttgcgggacggcaatcggcgggaaatatcagcttcaaaaattcgggcgccatatatccgacatccaccgtcaggctgtttttttcgttgaggttttgcaaaaccattttgcagccgtcgataaattctcccgcaaaacggttttttgcggagtcttgcgcccggtcatatacctgccggcatttttcgcccgtcagccgatagacgttataaaagccgtagccgccgctcccgcccgactgcgcggaatagaaaaggaagggctcgccctttgaaaactcgtaaaatccaataaacggatcgaagccgaaatcattgggcggaacaatcgaacagacaggttttcccccctgtaaaacgtccagccttatctccgtaatataggtttttccgacgccgctgagccgcacctcgacgggcttgccgtctatcacggccgttttttcggaaatcaccgtccgttcaacttcataggcgcgggcgcaaagtcccgcccccgccgcagagcctatccataccgccgcaagcagcgccgacacgcaaaaaagctttttcataccgtcagtatgtttcgttttccgtagattacgcagggttttacaaaaaaggatttcccgcaaaggaaatccttttctgatattcggttattcgcccgcaaactgcgaattgtacagccccgcataaaaaccgttccgttcgatcagttcgtcgtgcgtgccctgctcgataatgttgccgtccttcatgacgaggatcagatcggcgttctttatcgtggaaaggcggtgcgcgatgacgaaactcgtcctgccctccgcaagtttatccatactcttttgaataagctcctccgtgcgcgtatccacgttgctggtggcctcgtcgagaatgagcagcggcgcgttttcggccatggccctcgcaatggtaatcagctgtttctgtccgcccgagacgctcgcttcgttttccagcacgtaatcgaggccgcccggcagagtgcgcacatagtgccagatgcccgcctctttgcagatttccttcagccgctcgtcggaaacgcccgttttggaaaacagaatattttcacgcatggtaccctcaaacatccaggtatcctgcagcaccatgccgaagatgtcgtgtacttcctcgcggggcatatccttgatcgaaacgccgtcgatggtgatatcgccgcccgaaacctcgtaaaagcgcatcagcaggttgacgatcgtggtttttcccgcgcccgtcgggccgacgatcgccactttcatgcccggctttactttagccgaaaaatcgggaataataattttttcgggcgtatatccgaaatgaacgtttttgaattccacttctccgcggatatgctcccggccgtccgcgcccagcaatttgcgggttttgccgctctcgtcgtaaagctcctcttctccgaggaattcatagacccgtcccgcggaagccgccgccatctgcaggctgttcatcgcctgcgccatctggctcatggggctttggaaaaggtttacatacacgaggaatgcggtaatcgtgccgtaagtgacgatatctcccgcgttcatcagcaggccgccgacgacgcagaccgccgcgtaggcgaaatacgaaacgaagctaatcaggggctgcataacgcccgaaatcgcctgagccttgaacatggcgcctttcatatttttatttgcggtttcaaattccgcgccctttctttcgcctgcgtcgaaggccttaatcaccgtctgccccgtaaagttctcctccaccttgccctccagctcgccgagatactgctgacgctttctgaactgcggcatagcgaattttgtcagaataacgagcatgatcatcatgagcggaacaatcaaaagtgtggtcagcgccatctgccagcaggtaacaaacatcgcaatcaaaacgcccgtcaaaaggcatatcgaggaaatgaacatggatgcggcctgctgtatggacgaaccgacggtatcgacgtcgttggtgatgacggacagcgtatcgccgtactgatgcgagtcgtaatatttcagcgggatacggttgatcttgcgggaaatctgtccgcgtacctccttggtgtatttctgcgtaatcgtcgtcatgataaagttggagagataattgagaatcgcgttcgaagcgtaaaacacgataagcacgatcgcgatattcataatccgcttcagatcaatcgactgcgtggccgcatgatccatgatttcgtcggtgagcttggagagccactgcggcgccagcaccgcaagaacggtggaaacgacgataaataccgccgacagggcaatctgtccgtaatacggggacatcgctttgaggaggtgcttgtaatttttcgaccgttcttccttggacattgtttcggcgggcatcatacgattgtgtttcataagccgagctcctccttcgaaagctgggaaagggcgatctcccgatagacgggacaggtctccagcagctctttatgagtacctacgcccacggcgtccccgctgtctaaaacgacgattttatccgcgtccataatcgtgccgatacgctgcgcgacgatcagcttcgtcgtgcctgcggcggcttccctgaggttttcgcgcacctttttgtccgtcttgtaatcgagagcggaaaagctgtcgtcgaaaataaaaatttcgggtttcatggcgacggcgcgcgcgatggaaagcctctgcttctgtccgcccgaaacgtttttaccgccttgggagatatccgactcgtagcccttttccatccgcgacacaaaatcgtccgcctccgccacctttgccgcagcgacgatctcctcgtcggaaagcgcgggattaccgaacgcgatgttctccttgacggtgcccgtaaacagcacgcccttttgcgggacgtagccgatgatgtgccgaagcgtcttttgtttgatctcccgcacatctacgccgtcgatgagtatttttccttccgtgacgtcgaagaaacggggcacgagattaatcagcgtcgatttaccgctgcccgtggacccgataaacgccacggtatctcccttgtttgccctgaagctgatgttttttatcaccgcctcgtcggagtcgggatagcggaacgtaacgtttttgaattccaccgtgcccgtttccgtgcgctccgcgtccgtttcgggatctttcacggacacttcggtgcccagcacccgattgatacgctcggcggagacctgcgcccggggcaaaagcacaaacatcatcatcaacatcataaacgccatgatgatctgcgaagccagcatcataaaggaagaaatcgtcggaaaatcggtcgtccccttattgatgagcgaggcgccgatccaatacagagccagagaaatgccgttcatgatcagcgtcataatcggggacatcaacgccatgacgcggcccgtaaacaactgcgttttcgtaatcgcaacgtttgctttctcaaacttttcttcctgatagccttcggcgttataagcgcgcacgacgcggatgcccgtaagattttcgcgcgagacgccgttgagcttgtcggtcagtttctgcatgcttttgaacttgggcatgacgacgatcatgatcgccgtgatacacgccagcatcagcaccaccgcgacgatcgtcgcccaggtgagttgcatgctcgtggcgcggattttgcatatcgcccaaacggccgtaatgggcgcggcgacaaccattcgcagcatcatgatgttggctatctgcacctgctggacatcgttggtcgtgcgcgtaatcaaggacggcgtggagaatttatccacttccgacgcggagaaggaatccacctttttatatactgcggagcgaatattcgtcgaaagccccgccgaaacgtaagaggcgatcagtcccactgcgcattgcgccgccgcgctgccgagcgctaccgccagcatcaggccgccgctgcgccagatatcccccgtcgaagcggaagcgatcttcataagctcccctgccttcgagccttccactcccgcagccgcaagggcttcggccgtcacgttcccccagccgcccagcgagccgatcaatgcggccaacgcccccgcttcgtccagcttttcggggtggttgaaataatcgagcagggtaatcgactgaatgatgtctttcgtataatcgacgagcagcatcgtgcaatagacctgcagcaccgtcagcccgacgagtacgatcagcagtacccagtctatcggcctcagctttttgtataatttgaacattgcttcctccgttcttaaagtttgccttttacagtccgaaatcgatcagcttgcgcaggatacgcagaatgttttccgtatcttcctcgcccaaacgctccagcacttccttacaccgcgaaacgatctcctcttttcggcgtacgccttcttctcggcccgcgtccgtgatcgtcacccatacctttctgccgtcctcctcgtcgcggcgccgcacgacgtatcccttcgcctcggttgccttgagaagattcgctatccttcccgacccgaaccccgcaatttcgcacagctcgcccaccgtaaggctccctttgtcgatcagacaggcgaggagagcgccttcgcccaccgtcacgcccgcctcccgccttcggaagttgcgatgtattattttacccagcaaaataaacagctcgtttacctgcgaatcgcttatcatatcattatacccgaatttatcttttagtgtgagataattatattcgattgattcatacaagtcaacggaattttcgccgcaaaaaccaaatttcgtcaaaacaactcatttatcacaaaagcgacttattttgctcgtcccgcggcgcgcatttttccgcgcggtcatatactgaaggtatggcaactcttatctataatcgggccgccgcggcggcctatgcaaaaaaatgggcgttcggacgcaatcccgcttattacaatttcgataaattgggcggagactgtaccaattatgcttcccaatgcctgtacgcgggcagcggggtcatgaactttacccccgtcacgggctggttttataagacggccaacgaccgaaccgcctcctggacgggcgtcgaatattttttccgtttcctgacggaaaacgagggcgcggggcctttcggcgaagaagcgcctctcgacgagctggaaataggcgatttcgtccagctgggcaacgagacgggcgacttttaccacacccccttcgtgtgcggcttttcccgcggaaaaatcctcgtagccgcccatacgttcgacgcctacaaccgtccgttgtcctcctattcctatcagcgggtacggggcatacatattctcggcgtccgacgcggctgacttctcctataaccgaaagctgatttctcctataaccgaaaacggaactccgcttcccgcggaattccgttttttcattttttcgtttaagccttgctcttcactttcatcaaccgcaccactgcggcgcgctcgttttcgtcgagtttgtccttgatatacttaatcgtttcttccagctgcggaatcatgacgtattccaaggcgttgacgcggcgtttgttgcgctcgatctcatcggcaagcatgcgcaccgtcttttccgtctgcgcaagcagcaccattttcggaagcaacgcggacaccatgccgacggaataatccgcttcgctggtgatttccgcgtaggcgtaaggcagtccgtccgaacgtttttccttgacgagtcccaccttcggcacctccacgcccatgatgctttccgtcccgcactccacgtttacggccatagagggcatggaaaaagccgtctccgcgcgataggcgggcgtcaccgaacgggcgacggaaaactgcttcagcgtgagggaaagctcctgctccacctcctcccgaagccgtttgtcctctctgatgatcaccgtgaagcggcgcaccatctcgtccgatttgtccttgaggagcttatgtcccctgacggcggtggacaagcgcgccttcagctttttcagctccatgcgggtgggatttacgttaagcctcgccatcgtctccgtcctctgcggtcatatatttttcgatatattcggagcggatacgcttcaattcgcttctgggcagaattttaagcaacttccagcccaaatcgagcgtttcctcgatcgttctgtccgcctcgaagccctgattgacgtattccttttcaaattcctcggcgaaccgcgcgtacagcttatcggtatccgacagcgccgcctcgcctagaattgcggaaagctccttgcattccttgccccgcgcgtacgcggcaaacagctggttcatggtgtccgcatgatcctcccgcgtcttgccgcggccgatccccttgtccttgagacgggaaagggagggcaggacgtccacaggcggattgacgccctttttatagaggtcgcgcgacaggataatctgtccttccgtgatataccccgtaaggtcgggtatggggtgcgtcttatcgtcctcgggcatggtgagaatgggtatctgcgtgatcgatccctcgcggccgcggatacgtcccgcgcgctcgtacagcgaagcgaggtcggtatagagatagccgggatagccgcggcggccgggcacctcacggcgcgctgcagacacctcgcgcagcgcttccgcgtagttggtgatgtccgtcatgatgacgagcacgtgcataccgcactcgaaggccaagtattccgcgcaggtcagcgccatgcgcggcgtggcgatacgctctacggcggggtcgtcggcgaggttggtaaacagcaccgtcctctcgatggcgcccgtctttttgaaatcgtccacgaagaactgcgcttcctcgaaggtaatgccgatggcggcgaatacgacggcgaatttgcagtcgccgcttctaaccttcgcctggcgggcgatctgcgccgcaagttccgcgtgcggcaggccgctcatggaaaacacgggcagtttttgtccgcggaccagcgtattgagtccgtctatcgcggaaatgcccgtctggataaactcgttgggataatcgcgggcggcgggattgatcggctcgccgttgatgtccattttcttttcgggaatgacgggcgcgccgccgtcgcggggattgcccatgccgtcgaacaccctgcccagcatatcctgcgacaccgccagctcctggctgtgccccagaaatctcgccttcgagcccgaaatctgaagcccctgcgagttttcaaacagctgcaccaccgctttgtcgcggttgatttccagcaccttgccgcggcggatctcgccgtttgagttgacgatatccaccagctcgttatacttgacgccctcgacgccttctaccagcatcagggggccgaccacttcgcggatcgtcttatattccttaaacatcgtcgctgcctccctgcgcaagcgccttcagctcgccgttcatggttttgaatatctcgtcgaacgcggacatattttcctcggggatatacttcgcccgcccgatcatttccttgcacgagcaggccagaatatcgtcgagatcggcgtaattcgcaatcgcctctcccgcgaggcggttgaattcgtaaatgagcttcagcatcaaaaactgcttgttcatcgacgtgtaggtatccacctcgtggaaagcgttctgatgcaggtagtcctcgcggataatcttcgccgtctccatggtcagtctgtccttcgaggagagggcgtccatgccgacgagccgcacgatttcgtccagagccgcttcctcctgcaaaatcgtcatgacaaactggcgatatctgaagaaatcacggcccacgttttcgtcgtaccattccttcattctgtccgcgtaaagcgaatagctgatcagccagtcgatcgcggggaaatgccgcttataggcgagcgacgcgctcagcccccaaaataccttgacgatgcgcaaggtagcctgcgaaacgggttcgctcaaatctccgcccggcggggaaaccgcgccgatcgcgctgacggaacccctcctgtcccccgcgcccagcagcttgacgatacccgcgcgctcgtaaaattccgccagacggctggaaagataggcgggatagccctcgtcgccaggcatttcctcgagacggccgctcatttcgcgcagcgcctccgcccaacgggaggtggagtccgccataatcgccacgttatagcccatatcgcggaaatattccgcaatcgtaatgcccgtataaatagacgcctcgcgcgccgccacgggcatatccgaagtattggcgatcagcaccgtgcgcttcatcaaaggctcgcccgtcttggggtccttaagctcgggaaattcgttcaaaacgtccgtcatctcgttgccgcgctcgccgcagcccacatagacgataatgtccgcgtcagcccatttcgccaactggtgctgcaccaccgtctttccgctgccgaacggtccgggcaccgccgcaacgccgccctttgcgatggggaacagcgtgtcgattacccgctgtcccgtcaccatgggcttggagggagacattttttcgcgataaggccgcccctttctcaccggccatttgcgcagcatgcagacgggcatatcccccttttccgtctcaagcaccgccacggtctcctcgatcgtgtagtcgccctccgatacggaaacgattttccccttcatgccgttgggaaccataatcctgtgctcgacgatttcggtctcccagacgacgcccaaaacgtccccttcggaaaccgtatcgcccgccttgactttggggataaagtgccatttcttttcgcggtcgaggttattgacggaaacgcccctggaaatgcggtctccgtatttgaaatagagcgcggtcaagggccgctgtatcccgtcgaaaatacccgtaatcagcccgggggcaagctccgcggaaagcggctcccccgtggaatacacttcctcgcccggccccaggcccgaagtttcctcatagacctgaatggacgccttgtcgccgcgaagctcgatgatctcgccgatgagtcccttttccgaaacccggacgacgtcgtacattttcgcgtccgccatgttttcggctataatcagcggtccggaaatttttactgtcttacctgccatgtgtcgtgtcctctcttactctctgttaaacaaaatatccacgccgagcgccctttccatcgcgcttttcaaaagctcctcgccgtgtcccgaactgccgtttttggagggaatgctcaaaacgacgggatagggttcctcgtcgaatctcttcaaaaactcgctaaggggccttgcaagctcttcggtgaggaagataatctgatactcctttgcaatcctgcgcagggtatcgcgcgcctttttctcgttttcggcgggaaacgtcgccacacccgccgccttgaataccataatgctgtcgccgtctccgacaatcgccatctttcccgtcatgccgcctctgccgaatgtcgttttttccgccacattgtcgccgtttcccaaagccgtcccttttcccgtcatgccgcctccttcaaagcgcccgaagccgctttttgatctccgattcccgcatgcccgccagcaggcagacgaaaattatcctcacgttttcgctctccgcccgacggcggaatacgtaatataaaaaaggctgatttttttccagctcgtattttctttccgcaaaaaaatccgtctcgtaggagtcgcgcagcttttccgcctccgtcagcggccgtcccgcctgtttcgcttcggcgcatatctcgcaaaacgtcgcgtagggcgttttatccaaagcgtgcgccgccctttcaaggtcggcgtcaaacaacttttccaactgcttttccgtcaatctcccgcccgtcacgtacgcctttttcgcgttgctttcgtcgtccgaacggaacgcggtgaggatattggacatatccgcccgcgccgaaagaagctttttcaaaacggggttctttttacagacttcaaagaggtacgcgaacgccgccttttcaaacgcgacgcccacctccgcgcccgaagccccttctgcggacagcagccccgccgcctctttgacggcgtctccgagctcctttccgagcgcggaaaactccccgtttttgatgcggagctgcagctccgagacggaaatccgtccctccggcgcgagcattttttccgcgtccgcatggagatactcggcctttaacagggctttagcgttatgaaaatcgcgcggggcgagcagatacgccgcatccgcttccgagggcgcgtattcgcagataaagtcgtccaaagctctttcctccgccccgatcagcgcctcgtaatcgtacgcgccctccacttccgcaccgctgccgtagccgctctccagaaggatacggaaggcgtcctcaacctttccttcacacagcctcaaaagcttttccttcagcagatacttttcccgtgcggcgatgacgccgtttgtatatataacgtctttgcccatagtttactccgttaccttgtcctgaaaatctctgcggcgatatccgcctgatgctcgtcgcggtccgccgcgagcaaagtttcgtaagacaagtccttgtcgctggccgtcccgcggagtacgaaaccgccgcgcacagccgctttttcggcggaaatcttcagctttttttccgtcacgacgggaagccttgccgccgcgggaacatagagataacttgcggcgaaaaaaatctcgtcgccctcctccgcgtaagccttcaaaagccgatcggtcagcgcgagacattcctcctcgctcaaagaaatcagccgtccgagcgcttcggcataaatcgcgtcgatgacgcggcgcttttcggacaggagtatctttgccgaatcgagacgggcggcagccgctctccgctcggaaatgcttgccgtctttgccctcacctcggcctcggaatcccgcctgcccttttccgcgcgcgcggaagcggcggcgacgaccgccgccgccttttcctccgcgtctttgacgatagcgtccgcttcgtttcccgcgtcggaaaggattctttccacaatcgcttccttgctcataccttccgttccttaaaatttcccgacgagcatgatggagatgatgagtccgagaatggcatagaactcgatcataccgggatagacgatcagtttacccgacagggaatcctgcttgccgaccgcataaatacaattaaccgccgattttccctgaaagaaccccgacacgaggccggaaatcgccatgggcagaaccgcgccgaaaatcgcccagccctgcgcggtggaaaaatcaccgccgagtttgcccgacgcgataatgccgatgataaagccgtaaatcccctgcgttgcgggaaggagcacgagcaccatcactttgccgaactttttgggattttcgcccaaaacgcccgccgccgcgctgcccgtcttataaagccccacgcaggagccgataccgcaaagcagtacgcagagcgcaattcccgccatcgcaatggcataacccgttgtaatcataaatgaagtcctccgaaattttgtttgatttatagtttcgatgttcaaaagccgatatttaagacgccttggacggctgtaaataaatatacttatgccgcgatcccaacggcgcgaacagttcgccctcgccctcgaaaaatttgccgtaaaattctacgtactgaagccgcgcgtcgtggatataggcgcccaaaaggctcatggccaaattaaacgcatgccccacgaccatcaacaatatccccggcacggccagaagtacgttgccgcccgtgataaagcccacggcgtattgagagacgatctgcgcgatgaccgcgcccgagagcatcagcccgtagagacgggcatagcttaaaatatccgacgcgtaattgatgacgctgtacgccgcgccgaagcccttggaaaccttgccgaacgccttcgcctttctgcccgccgtcagcatagctgccaacagggaagcgcccgccgtaatcccgccgattttggcgagtatcggcacgttcgcctcgtcgataaacccgacgatcgcaagccccgcgcccagcgaaaacaacgcccagacgccgccgtcacagatgccgtcccaaatgtttcccctgtgccattcctgcgcggcgcggcacatatagcccgcaaacagctgaacgacgccgatgatcaggctgatgaccaagacgctgggtacggatattcccgcaaacgaccacatgtcactctgcgcgtcgggcatcaccgtcttgataaagggcagagaaagcccgaacagcgaattgaacagcacgccccagacgacggcgaaaaatccgccgatggcaaacacggcggacagccgcttcatgccgctctcccgcccgcgctttttataccagatcagcccgcccccgagcatcatcaaaatcccgtagccgatgtcccccatgataaagccgagaaacaggctgtaaaaaaacgccatgacggtgttgggatcgagttcccgatagtggggcggcgaatacatattggtgatttcctcgaagtttctcaccgcggcgttgttcttcatcagcgtgggcggaatttcgtcctccgcgggctcgccgaactcgaaatacgcggccttcgtcaccgagagcagcgtctccttcactgcctccgtcgcctcctcgggcacgtacgcctccaacaaaaacgtgcgttccgtcgcgcggagcttatcggacaattcttccttctccagctcgaaaccgaggtagtcgcaatatatcttcaaggggcggatataagcgttcagctcgtacatggcatattcgttcgctttcagcgcgcgcagttgcgcccccgcctcctccttgagggaagcataaatttccttgcccgatttttccccttcgaaaggacagggcgtaaagccgcagtcagaaagcacggcctccacggccgccgcttcgtccttatgcgccgcgacatacagcagagtgctctccgcgtccgacgccagaatttcgtaagcggtaagcggcagcgactcggccgcttcgataaacgcgtcccgcgaggtcgcaggcaacacgcccagcttcgcgcgggtgtgaagcgtatcccgaaaggcatttaacggcaggttcacgcacgaataaattctcgcgaccgccaaggtgcgctgggttttgaaaacggcgttcgtcaacgtgtttttttcgtctgcgagcgcattgatacgggcgacgagagcgtccgtctccgcttttttgtcccttgcggacataaagtcggagtacgaaacgtcgaagccgtccttcaggagccctgatttgatattgttgtttttgttgtagttctctacttccgtactcaggacggacagggccgcctccaccgaagcgagataggcgcgcagctcctcgccgcccgcggggagcgctacggtattttccgtatccgcgtgcagcttcacctctacggcgcccgtcctttgcagggcgttgagaataacgtccttgtcgtaagacatcgcaacgaggttgagcttgcgcatttcagcaatcgccaccgcataccctccttacgattttatttacggggagctcggtattttcgagcaggcgggcggcatacgcctccgcttccgctctcttttcggccagcgcggcgagatattttttctgcgcgtccgcttcggccgccttgagctgcgtctcgcggtacgctttgcacacttcctccgaggactttgcgatttccgctgcacgggtctccgcctgcgccgcgatctccgccgcgcgcgcataggcggcggttttcatgtccgtcgctttttcctccgcttccgtgatcgatttgataatttcttccgtcatatggctccaccgaaaaacgatattatttcacttatttattttatcacttttttccgattttagcaatcgaatatggacaatttatcccgcataaaattttattaacaatctatgcgcattttttcggcctttaacgcgcccactcgaagccgatttcccgcaaaaacgcctttgcgataatcacgctccccaccatgcccgggtgtatcctgtcccaggtgataaacgcgggatagcggtattgcaggatatgtacgaattcttcctgtaaatcgatacaaggaatcccgcgttccgccgcgatttccttcatggccgcgcggtattcgtccatgcgctttctcatggcgtcgctttcgttcggctccagataatacggcgtcatccagatcgttttggccctcgtcgcatccgccaaggaatttagatttttccgatattcgtccaaaggaaccgctatttgcgggatacagggcgtatcaaactgccgccagacgtcgttgaaaccgatgcatagcaccacccaatcgggattttgcgccgtcacgtccctgtcccaacgttcgaccagatccctcgaggtattccccgaaacgcccatgttgacgacatggatattccgctcgggatattctgcggcgaggtacgcgtctatgaggcgcacgaagccgttgcccaaagcggcgttgttgccctcgcccacgggcctggcccgattgtcgtccgtcacggaatccccgatgaaaagcaatttttctccgttttcaatcttcattttcctttctcctctttttttgccgaagcttgcggcaatccattaaattatatatcataaaaagcggtttgtcaacgggtatatgccaacttttttcataaaaaaatccgcgccggaaaacggagcggactttttctattttcgatttttttcccaacttactcggcaaactcgtagcaacaggaagaacactgtgtagggggcatggtttcgccttcgcccacgaacacgctgttcaaagtctttccgtcttcgttgatcactctgtaagttccggttttgggacaaacgtcgccgctgtgcaatctcatttcaattacctccgaatagccgcttgaaacggctaacttcagtatgcgcgcttttgcggactttatgcgtcgtccgattaatttttatccaggctgagcaggtccttatatctgtttttatgcagcgtcacgcactcgtccttcttatattcgcccaaaatccgggtctgaatgaggttggtataggtgtcggcgttggaactcttgagcgattcgtaatagagattggagaaggagccctcctcgtcgatctgcgcccaatcgaagttatatacttcgcccactttgtcgtacacgaaggagacgtaaataacgtgccagccgtaatcggtagggcagaccacgtaggtgcccacgccctttttgatcgcgtactgcgcggcgtattcgaattccgccatatagctggtcttatacggggaaaccgtatagcccatatatttattgaagagccccgtatccgtgctgtaggcgaacgtcagctcgttgatgacggaaacggccgtataggcgtccttgcctttcacgaaataatcgctcgtcgccgtatcgttgagcgtaactttcccttcgtaatacacaaactgcgaataatcgaacttgcccttgttatccaccgtgtatttatcggcgtcggtgacgtaggcggactttttcgaaccgcttgccgtcaggcccgcgtatttaagatacccctccatctctccgaggaaaccgtcgatcgtaatttcgttgggcttgcaggtatattttccgtcctcgtccttcgtgacggcgccgttgtaggcatactcgccgtaatactggccgagcttctcgtaacgggcattgtccccgtcgctcttcgtgagattattttcgaagaaaagataattgctcgcgtttccgtaataatcgcccgcttccgcttcgtaggcgtaattgctgtcctcgtctttggagaaccaggcggcgcggagatccttaccctttacgttttcaagcagctcggcgcgcttttgataaaattcgcgcttttcgaggcctttgtcgttggtataagtcgaaaggagctgggtctgcgtcttggaaaaagggagcagaatattatagacaaatccgaagccttccttcgggctatagaccacaaacgaatcgtcggacacgtttcctatctgcgtttcaaacgcgctctgatcggccgaatagatatttttctgggattccagcaaagcattatattgatcggtgacgtaggcttcggtgagcttcgcattggcctcctcgccgagatcgtcggtatatttggtgatgagcgcctgttccatctggctggcaagctcgacgaaataataatctactttggtgaaatcggtggtatcctcgtcgcccagaagcccgtttcgggaaaggttggcaagaaagtcgttgtaggcgcgctgcctggttttctgcgtggaaccgtccaaacgcttgtacgagccgcaggccgaggccgcgtttctgcccgtatagacttcgtaatcggtatcgtaataatcttccgtctccgtgcccacgcccgtcggagtcgtgcgggattcggcggaaagatcgtcctcgtcgtcctcctcttccttaatgtaggtcttttcggcggagtcgagggaattgttgatcattttcttgagcccataaacggctctgtcgtagtccgcggtatcctccgccgaggttttgccgcccgccgtgaggaaatatttcagcgtgaagatttcgggatgcgccgcatagagctttttctccgtctcgtcggtgacctttcccttttcgctttcgatataagcgttgtacccgcttacgctgtacgtatcggagtgcttatcgaaataatacgtcatcgcgtactgcaccatgatcttgcggctggtgagattgtccatcagcgtattaaacgtcttttcgtaagtatagccgtagttgcttatataagtggagcccgcgttgaggaagtaggcgacgagatcccgtttgaggatattctgattgatgcttccgatgacgtccgcatactcggcatactgcccgttgcccttgaaatcgtcgtggtcggcaatatttacggtgccgattacctgcgccatgtccttttcgctgttggtcgtgatcagcccttcgccgcatgccgccgcgctgagcgtaaatgcgacgctcagacatataaccgctatcttcctgaatgtgtttctgttcttcataaacctgctccgagtttttatcgtgtttaacctttgttgccgaaaaactttacaatccccccttgggggtcgtgtcaacagcttctattataaccgattttaatcaaatgtgcaaacgttttgcgttataaagttgtgaaagttagggcaaatttcaaaaattttgtcatttccgccatcagatcggtcgcttcccgcttgccgaaaaactccacgacgggcgcttccgccatattcaggcgcacgctttgcccgtatttgtccatcgcggcgaggatacgtttgtcgcccagcgcctcgagggagggaaactccagcgcccccagccctttcgccacggtgatctttttgacattgaattttgcggcgtagctcttgagcaccgccaccaccaaaagattgattaccgcctgcggcagagggccgtacgtctcctccagcgaggaatacacccgcttgtaatcgccgacggaggcaatctccgcgatctgcttgtaggtgtccagcctgcccgccgaggattcgatgtacttttccgaaatataggcgttggcgcggatatccagctccgccaccgtctgcgtttcgcccgtcagctcttccttcagcagcttggcgtaaagctcgtaccccacgcggtccatgtgcccgtgctgttccgcgcccagcacgttgcccgcgccgcggatttccaggtcgcgcatcgccagcttataccccgagcccagctcggtaaactccataatcgcctttaaccgctccgaggcgttttgggtcatcacccgttccgccttaaacgtgaaataggcgtgcgccagcctcgtaccgcgccccacacggcccttcagctggtagagctgggaaatgcccagcttgtcgctgtcgatgacgatcagcgtattggcgtttggcagatcgattccgttttcgatgatcgtcgtcgtgataagtacgtttgcgttgccgctgtaaaagtcgtaaacgctgttttccagcaccgtcttgtccatgcggccgtgcgcaacggagatctccgcttcgggcagaatcctcttgatcttcgccgcaaaggtgaaaatgctttccactttgttatagagaataaatacctggccgccgcgggacagctcgcggatacaggcgtcgcggatcagcgtttccgtctcctcgacgacgtacgtctgcacgggcagccgctcgccggggggcgtctgaatggtggagatgtcgcggatgcccgacagggacatgtgcagggtgcgcggaatgggcgtcgccgtcatcgtcaaacagtcgatatccttgcgtaagttttttatcttttccttatgctccaccccgaaacgctgttcctcgtcgagcacgagaagccccagctccctgaacttgacgtcgcccgaaagcaggcggtgggtgccgatgacgaaatcgatttttccttcgcttaaatcccgcagaattttttcctgttccttaggcgaattgaagcggttgagcgcggcgacgcggacgccgaaatcggcgaaacggccgcacgccgtattgaaatgctgattgcacaaaatggtgctggggcacatcagcgcggcctgcttgcccgccagcacgcagagataaaccgcgcggaaggccacttccgttttgccgaagcccacgtccccgcacaggagacggtccattaccttttccgagcacatgtcggccttgatctcctccacgctcgaagcctggtcgggagtcagctcgtaggcgaaggcgtcctcgaattcccgcatgaacgcctcgttttcgggaaagcggaagccccgcgactccgcgcgttcggcgtataactttttgaggtcgaacgccagccgtttcagcgacgcgcgcacccgcgccttcacccgctcgaagtccgcgccgccgattttgctcagcgcgggattggcgtccccgacgtatttggacaaaatatccatgtgctcggcagggacgtaaaggacgtcgccgtccttgtattcgagggcgatatattccttggtgccgtcggtggtctcgatttttttggtgccgactaccctgccgataccgtgcgtctcgtggacggcgtaatcccctacctcgggcgcgacgaacatatccccgcgcttgcggcggatgcgtttggcttcgggcggttttgtatagagatcgcccgagccgattaccgccagcttgcactcgtgcaggataaagcccctttcgaggggcgcggaaaggacggacacgccgttaaatttgtccaaagcgtcgggcaggcggacggtggaaacatattcgtccgcgagcagctccttcatcttcgacgcgcgggaatcgtccccgcaccagagcattacgcggtagccgccgcggagccagtttttgacgtccgtcaaaagagcgggaaaaccgttgagatatttcgccgcgggcgtcgccgcgagattgtaaatcttcagcggctcgaaaaagaagggcttgcccgtaaaggtctgaagcgcggcgcggcggaaacgcgaaacggaggaaagaaatttttccctgtccgcgtactgcccggccgaaaagggaaacgcctcgccgcccgcgttcaggcggtgaaatctttcctcaaattctttatataaagcgttgaatttatcccaaagcgtttttccctcgtcgaacaggagcactgtgttttcgggcaaaacggaaaagaaatcgacggcgttttccgtcaacggcagaatataggaggacttttcccccgcggggtcggaaagtatctcgtcggcaatttccttcgcgcgcgcgtaagcctccgcgcttttgaagcttttcagctcctctttcagcgcctttgcgattttttccccatcccgttcgccgacaaacacgtcggtggcggcaaggacggtaatttcccgcacgctccccagccgttcgcccgtcaccaaatcgtagggcttgatcctttccacggtgtcgccgaagaaatccacgcggacgggattttccgcattgacgggatagatgtcgaggatatcgccgcggagcgcaaacgtacctttcgtctccacctcgtagccgcggacataccccagacgcaccagctgcgcgggcacggaagcaaaatccgcgtcctcgccctcccgccagcagagcgcgggaagcttttgaggaaacagctgaacgagcgcgtcgatttcggccgtcaccacggggcagccgctttgaagggcgtaaatcccgttcagtctcctaaacagggaatccttggacagcgccttacggtagagaagcacctcgtccttggaggccagcgtcgccgtgcgtttccccgacagcgccgcgatactttcggcggcccgctgcgcggctacggcgtccgccgtgatatacacgacgggaaagggaagcagggcggcgagcagatatttcaacgagtcggcgacgccgaaaaccgccgtgggcgtgccgcggcggatatcttctccgaacaggggatactcccctcctattttgtcaaaggaaaaaaagttctctttcatcgttcctctttacattttttatgcgtctatgccgtcaaacaaaccgatcaggtttctttttcgtccgttttcacgaataagcagcgacagtcgtcgcaatagtgcgcgggcgcggaaaggttaaaaaaaccgcccgtaacaggaacgtccatttcgaccttatgaggattaaagaaaaccgttctttccctctccgaaaaaaatatgcggcgcgcactttgaatatatccgtcccggatttcttttccgcaaaaagggcagttcacgccttatccccgccgttgaatttattcatcaccgcctctatcgacgaaccgcggacgaactccgccgcggcctcccccgccttacggcagacggaagcgaacagctcgtagtcgtccttgcgaacctccgaaagcacataattgatgatggggatattcacctcttcgtcgcggattcccacgcggatacgcggaaacgccgtcagccccgtctcgcctatgatgctgcgcatgccgttgtgcgtgcccgcgctgccgcccgcgcggatgcggagttttcccttgggcagatcgtaatcgtcgtagatgacgagaagccgctcctcggggatcttatatttggacatcagctgtttcaccgccctgcccgaattgttcatataggtcagaggtcgggcgatgactaccttttcgccgccgatatacgcttccgcgacggaagcctcgcattccgtctttttgaattttgcgcccaaaatctgcgcggcgtcccccgcgcagatatatcccatattgtgaaaggtcttttcgtattgcttttcgggattgccgagccccacgatcagatacatatttttctattcctccgaaaatcgccgaaaccgccgccgcttattcggcgacggcggtaaatttctgtgcgttttatcagtcgtaaagtttggacataggtctgtcgagatacacgttttcgatcgccgcggcaaagatgtccgccgtcgtcaaaatactgaatttatcccgctttttttcgtcgggaagacgaaccgtatccagcatcaccagcttggtaatcgcggatttgtccagccgctccacggcggggccgctgagcaccgcatgcgtacagcccgcatagatctccgtcgcgcccgcgtccttcagcgcctgcgcgccctggcagatcgtgcccgcggtatcgatcatgtcgtcgatcataaggcatctcttgcccgacacgtcgccgatgatattcatgacctccatgacgttcgccctggggcggcgcttgtcgatgatggcgatgggaacgccgaatttttcggctacttttctcgcgcgcttgacgctgccgatatcgggagaaacaaccacgtcgatattcccctctctggcaaaataattgtaaagggtagggccgcccaacagattatcgacgggaatatcgaaaaatccctgaatctgttccgcatgaaggtccatggtaagtacccggtccgctcccgccgccgttatgaggttggccaccagctttgcggtgatgggatcgcgcgaacgcgcctttctgtcctgacgagcatagccgaaatacggaatcaccgccgtgattctgcccgcgctggcacgcttggccgcgtcgatcatgatcagaagctccatgaggttatcgttgacgggcgtgcaggtggactgaataataaacaaatccctgccgcgaaccgtctcctcgatgtgaatactgatctcgccgtcggagaaagaggaaacttcgatgcccccgagctcggtattgagcttgtctgcaatcgcttccgccaaaggacggttggaattaccggagaacaacttgatttcattgccgtgagttatcatgaagtaccttcctttattttttatccgccgcgcggagcgctttgccgcgttcccgaggacggatttttttatccgcagtatgacccctcaaaaccccttacgttctctattcgtcttaaaataagttgcaatataataatataataacccgtttgaaaaatttagtcaaccgtttccgccgctttcttccgaattattttcgggaaactttccttcctccgacaatttgcgccgctccttttcttccttcgtccgcctccgcatggaggaaaagaaatccgtcagcagcgccgaacattttttttccgccacgccgccctgtatctccagcgtatgattgagcagattggcctgagccagctcgtttgtcagcgaccgccccttctgctcgtaggcgccgaaaaagagcttgtctatgcgggcgttgagcgccgcgcccatgcacatgggacagggctccaaggtaacgtatagttcgcacccctcgggcaggcgccagctggaaaactttttgcacgcccgatcgatcgccatcatttccgcatgcgcggaagcgagctggagctttgcgcggcggttatagccgcgcgccaccactttatcctcgtaaacgatcaccgcgccgatgggcacttcgccctgttttaagcctctctttgcacacccgatcgccgcctgcataaatttttcttctctcgtcattcctcgttcctctcgttgtcttcttccgtttccgcggcgaccgccgccgcaagagagcaaagcgagcttaaattatgctcccgtatatctccgaattcttcttcgcccaaagggtgggaaaaaccgtcgtttcccgcttccaccgtaaacgcggggatcttcagctttttaacgcaccaatccttatagccgcccgcgctccccgccgcgtgacgaaggggatatcccgtcgcctccgaaagcgcgatcgccagctttttatcgcgtacgcacgccgacagcggctgataataataccagtatatctccccgcccttcgtatggtaactgagcgtataatcgggacggatttcctccgtaaaggctttcagagcgcgcgtctccggctctgaaaaaggctcggggccgatatagttttcgcttgccgccgcgcgcacgttgcgctttccctcgccccagtccgcgtcgaaattgacgttgagatcgactccagcgccgttcgctttccaaagggagaagtcctccccgccgtttatgcgcaaaagccgctcctgcgctgccccgtccctgacggagcttaacccgcattggcttaaaagcgcgccgtcgggattcatcaacggcacgatccacacgctgcccgcgcccggcccgaagcggaactgctcgagggcaagtttcgcagtgatccattcccgtccgtgtatcgcgtactgcgctataccgacgggcgttccctctccgagacggacggcgtaaatactgcgcccgaatacgcttttcccgataatccgctttttcgtacgcacgcctttataaaatttttccacttcgccgaaaatatccacataataatgtatgcggaaatttccgccgcggtgagcattttatttatgatacgccgaaccgctgttgatcataaacgcgcgatagacctgctccgcaagaatcacgcgcatcagctggtgcggaaaagtcatatcggaaaaggacagccgccaatccgccgcccgctttacgcgcggcgaaagcccgcacgaggagcctatcacgaaagtaatttcctttccttcgtcgcataaagctttcagcttccccgccagcttctcgctggagaccttttccccctccacggccaaagcgataacataacccttgactgcgcgcaggatatcctccgcttccgcctcgggatcggctccctccgccagctctctgaactccaccttcgcaaaccgcgacagccgctttacgtattccgccaccgcgtcgcggtaaaacgcttccttgattttcccgacgacgacaaaataaattttttgcatgattatttcccgaagcccgtcagcagtacgctgatccacatgaccgcgcagacgagtatccccgccgcggcgcagaggaaaaagccctttcgcgcgggcgatttttcccttttgcccgacttatcgaaaaagatcagccagacgaggcttccgacgaggcagagtcccgatacgatcatcaaagggatcattaccgcgttcggaaaggcttcgagcccgaatttcgaaagcagaataatcaatgcgttattgagaaaatgcgcgagcaccgtcggcagaatactgcccgcacgaagcgccaccaaagcgtacgccgcgccgcagaggaactgataaaccgtctgggcgggattttcgtgatagagcgaaaacagcgcgccgcatacgagcaccgcgcccgcctgtccgcagcttttcagcccgcccagcacgacgccgcggaaaatcgtctcctcgaaaaccgcgggaagaaccgccaccgtcaaaaggacgccgaccagcccgaagccgttgagcgagggcagcaaaatcggatcgtccttatagccgaaacggccgagaaaattcaaaaacagaccgttgagctccgcgagcgacaaaagcccgacctgcaataaaacggcgatgaggaaatatttcggcgcgcactttcccgccaccgcttttacgggcgttttcgacttaaaaaagaatacggccgcgacgattgcgaaagcgacctgcggcaataaaaagctgcaatagataaaccaatcgcttttatcatagttttccgtctttgtcgcccccgacgcctgaagaacgatcgtaaacgcaagcgataaaatcacggggagaaacgcggccgccgaatacgccagccccgctttcttttccgtcgtcagttcgccgaataatgaattttgtttttttttcgattccatgctattattataacagattttttgcggaaggcaaacaaaaaccgacgggaaaaaagattttttctctctccccgtcggaacgcccgtcaaccgatcagcttttgacggaattctttgataattcggctttctatcctcgacacctgcacctgactgacccctatcttttccgccacctcgctctgcgtcatgtcgcggaaataacgcagcacgatgatttttctgtcccgctcgggcagagattcgatcgcagtgcgcagcaaaagcttatcgatgatttcctcctgcttgtcctccgcgggaagagtgtctatcagctcgcgctcgttgccgtccttatattccgaaccgccgtaaatggatacgggcattttggacgagcccatgacgaacaccgtttcgctttcgtcgaggccgaacttttccgcaatctccttgacggcgggctgccgaccgtgcgcggaggtatattccgcgacaaacgtattcatctccttcgcggtctgcttcattgcgcgcgacaccttcaccgagccgtcgtcccgcataaagcgtttgatctcgcccgcgatcatcggtacggcataggtggaaaaacgaacgccgaagctttcgtcgaagcccgtgatcgctttcaaaaatcccatgcaggcaagctgaaagagatcgtcgtattccactcccttgcccaaataccgcttgacgatacatttgatcagggagacgttgccgtcgatgagtatctgctttgccgactggtccccgcgcttcgcacggcgaatgtattcgattgtatccttttcatcaagcatctgccgcgtcctttgcgccgatttttttgctcatccttactttcgtgccctttccttcttcgctggtcacggaaaactccgtcatgaaggtctgcatgatcgtaaagcccataccggagcgctcatcgtccgacagagtggtaaagaaaggctgcatcgcctgttcgacgttgcctatcccgcacccgtaatcggtgatatcgatatgtaagacgcccccgtcctccccgtccttgcattcgatcgcgcattcgatgagaattttatcctccgcgttttcctctccgccgttctttttcgcgtaggcatgcacgatgcagttggtcaccgcttcgctcaccgccgtcttgatatcggaaagctccgacaaagaaggattcaaaggcagcgcaaacgccgccaccgtgctgcgcgcaaagctttcgtttttcccgactgccgcgatttcaagtttcatataattttccatgctttttctccttgctcctgttgtgttcccgtcgtttcagccctttcaaagcttggggatcagggtatatacgccgcttaaagaaagaattttatccgcgggcaggttgggattggatatgtacatcggaattccgtatcgcttgagacgtttgtaccgcccgatcagaaagccgatgcccgtcgaatccataaaggaaacgttttgaagatcgaacacggccctttccgactgcgtgttttcgtcgatgatttcatccgctttacggcgagcctccgcggcggaatgttcgtcgatttcgccgtccatgacaatatataaaattcccttagccgaatgagcagcgagattcatattttttcctcccgtttttgtgtgtttacattttacacgatagttccctgcggattttgctttttttgggaaaatcgaggcgaattttgccgaaaaaaaatttttgtttttctatagaaaaatacttgacttttcctgaaaaatagtttatcatatacaagcacttgtgcgatagaccgtaagttttgaaggcggcggaagggcctttagctcagtggtcagagctgtcggctcataaccgattggtccgcggttcgaatccgtgaaggcccaccaa

SEQ ID NO: 2552 - DNA, 7921 bp, Unknown
  16S sequences of unknown bacteria
ttgtaatatagatatacaccgacgataaagtcaaggaaaggagtcaatgcagataggagacagtaaggagacaagttagtaaacgtataacacataatgcatagcgtatagtgcatgagacgcagcgcataatcacggtctaaatgtaaatgcggaaacaaactgcatattttaaactgtacaacttgcataaaaaatgtatatgaaaattgaagaacagcaaaccggaatgcaggttttgcgtataggctgaagtgcggactgaaaagcagacttatgggagacgcaaaatcaaaagcattctatctgaacagacataagcaaaaacacaagaaaaaagaaaaacaggaaaaaagtcaaacaaaaagcaaaagggaaaaagggaaaaggagatcaaaaatgcaggagaatgaaaaggtaagaaaaaacacaggcggcgacaacggttttacatttgaaattgtagagcatatatgtgtgctcggaaagggacgtgaagaggggtatacgaaagagcttaactatgtttcgttcagagggctgccgcctaaatgggatgtgcgcgagtggaacagcgatcatacgaggatgacaaagggtataactttcacttgggatgagatgagaaagctcatcgaggcgatgagtgaaaaagcagaaataacaacagaagcgtgctaagctgcgggttaggctgagcgtgaaagtgctcaattcgcgtaagtaatgcgcatacgcagagtaacgcaaaaatgcattgcggcatatagtaatagaaaagaataaacattatttggaggtaactatatgtcttgttatgattctaatggaattgacgaatccttactgtttttctttctgatcctcatacttatgttctgcaagccgagtattttcgggtgcggatgcgggtgtgaagaatattccgatccttgcggatgctaattaaacagtattaaaattaaagcagagcggcatagattttttctatgccgctctgtattttaactgtattttaacagattttccttttgcgcttgctcttcggcgcgtgtgacagcgcatagattatgccatatgcggattttgcagcggagaattttaaacagcggcttataataacgtgtacaagctatattctttgactttttcaatggttgtggtatactaaaactgtatgagaaaaaataaggagcttgattttttatgagcgatatagcgatcatgggcgggatagcggcggatatagaaggacgccccgatgggatgctcatttatgctgattcaaacccgggtaaaataaaaatttcatacgggggtgtcagccgaaatataacggaaaaccttgcgcggcttggtgctgacgtgagtttttgttcgatagcaggaaatgattttatcggcagggcggcaaagcagcagctcgaatcgttaggagcggatgtttcgggggttaagcttgaggacggagaaagcaccgcgatttatctctctattcttgacagctgcggagatatggagcttgcgctctgcaatatggacatactcgagaaaatcgacaaaagcttcataaatgaagcggcagaaacgctcaaaacatctaaaatcgtgggaatagatactaatatgactgaggaaaatatatattatctcacggaaaaattgcagggcacgcccatatttatagacccggtatctgtaacaaagtctcagagaattaaaaattttgtaggcagatttcatacggtgaagccgaatagaattgaggcgcaggcgataagcggtatagaaataaaaagcgatggcgaccttaaccgtgcggcggactggtttttaagcgccggtgtaaagcgcatttttataacgctcggtgagggtggagtattttttgcggatgaaaaggagaacggtatcgtaaaggcgggcagggtgaatatagtgagcgctaccggcgcaggcgacgcattttcggcggcgtgcctcaaagcgtttgtggacgggctcggaataagagaaacggcagagctggctatggcggcttcagcgctggctcttgaatcgtgtgcagcggtaaatccactgatgagcgcggagcttctcagagttcgggcaggcaatttaagcaaatgagacaaatgagagctatggcgaaaaagctttaaaaataaataaaagtatattaaaaaatagaaaaggagataagccgccgctgaaatataaaagcgtgcggtaaaaaggattatggaaaggtataaggagtatttggatataaagcctgaggtaaaagaggcgcttgactccggaaaaccggtagttgcgctggaatctaccattatttctcacgggatgccgtatccaaaaaatgtcgagacagcgcttgctgttgaagagttgataaggaaaaacggtgcggtgccggcaacagtgggtataataaaaggaagaattaaggttggccttacggaggaagaagtggagtatatggcaaaggctccggatgtgctcaaggtttcaaggagagattatccgctggtaattgccaaacagctggacggtgcgactactgttgcggggacgatgatagcggcgagtatggccggtattaagctctttgtgacaggcggtatcggcggcgttcacagaggcgcgggtgaaagcttcgatatttctgcggaccttgaagagcttaagaaaactggtgtagccgttgtctgcgcgggtgtaaaatccatacttgatatcggggcaacgcttgaataccttgaaacgtcaggcgtaccggttatcagcttcgggactgacgaatttccggcattttattcgcgaaaatcgggatttaagacggagtgcatgcttgactgcccgaaggatattgccgaggtaataaatatgaaatatgcgctcgggcttggcggtggaatgttaattgcatgtccgataccggaggccgatgaaattccttatgaaaagatggataaagtaatagtgcaggcgcttcgcgagtgcagcgaaaaaggtattacgggcaagagaattacgccgttcctgctcgaccgggtaaaacagctgacagacggtgaaagcctcgaagcaaatatcaagctggtgcttaataatgcgaatatcggttctcaaatagcagttgagctttcaaaactcggagagtaacgagagctaaggaaataagagatagcggcaaaagcagagctttgagatgatttaaagtatttgttaaaaaacggaggatatagagaaatggcaatagaaaaagtgagaaaatactttgaagatataggaattgcggacagaatacaggaatttgacgtatcgagcgcgactgttgagcttgcggcgcaggctgtaggcgtagagggcgcgagaatatgcaagacgctttcgtttaaaacgcctgagggcggctgtattttgatagaagctgcgggagacggcaagattaacaatcagaagtttaaacagacttttggctttaaggctaaaatgcttacaccggaggaggtcattgaatttacggggcacgcaattggcggcgtatgcgcatttgcgatagagcaccctgacgtaaaagcttatacggatgtttcgctcaaaaggtttaagacggtatttccggcatgcggcagtgccaacagtgccatagagctcacgccggatgagcttcacgattattctaacgccgtggactggatagatgtatgtaagctgccggaggatgaaaaacaggagtagacggcaataaaatgtaaggctttatagacggcaggcgtaaaaaagcacaatatgaaaatatgcggtttacatatgaatgaattttgcatatgaaattttattaaaacggggggagaaaaatatatgtgtatagcgatacccgggagggtcgtagcgatagatggacaaacggcgcaggtggattttaagggcaataatgttcctgttaatattgggcttgtagagccgaaggttggtcagtatgtgcttgtccatgcaggatgtgcgattgaggttatggagaaagaaaaggctgaagaaataatagagctgttcaccgaccttgaggaggagtttgaaagttgaaaacagaagatgttataaaatatctcaaagagtatgacggcagaccgctcaagctgatggaagtgtgcggcacgcatacggcgagtatttttaagaacggcatacgttcgcttatttcgccgaagataaagctgatttcagggccgggctgtccggtgtgcgttacgccaaccgcttatatagacagagtacttgattatgcggcaaggccggatcatatggtatacactttcggcgatatgatgaaagtgccggggaaatgcggcagtctttccgatatgaaaggcaagggcataaatgtgggaatgatgtattccccttttgaagttatagaaaaagcggcggcaaatcccgaaaagacttatgtcatagctgcggttggctttgaaacaacagctccgatatatgcgcttgcggtgcaggaagcggcaaaacgcggcatcaaaaatctgaaactcgtgaccgcgcttaaaaccgttattcccgcgctgagctggatatgcgaaaatcaggacgatattgacggatttatctgtccgggacatgtgagcgtcataatcggaagcggcgtgtacgaagcgcttgcagaaaagtacaataagccttttgtcgttgcaggatttgagccggagcatcttcttgctgtgatatatgatatagtaaggcagatagaatgcggaaaaagcgatgtgaagaatctttataaaaacgctgtgcgcgatgaaggaaacgcaaaggcgataaaagcaataaacgagtactttgagaccggagaagccacgtggcgtgggcttggcagcattcctgattcgggcttgtatttgaaaccgcagtatgcggagtacgacggcggcagccgcggcctggacagcgatatggagctgcctaagggatgctcatgcggcagcgtaatagtgggaaagctcaatccgaacgaatgtccgatgtttggcaaaagctgtacgcctctgcatccatatgggccatgtatggtttcggcggaaggcgcgtgcggtatctggtatcgctcgatatagatagtcgaatacggaagcagaggtatatgcggagcttgtgaaaatctgcgaaattcgcagaagcggtggcaggcgcgaagtttacagagcttgcggtgcgtgcggattttgcataagtgaggaaatttgaacttaggctcggtgatttgaaaggatataatatgggaaaaatcattatggcgcacggttcgggcggtaagaccggagcggaactaatgtcaaatatttttggaaaacattttaaaaatgatgtgcttgataaaatggaagatgcagcggtactggagataaacggccgtatagcattcagcaccgattcttttgtcgttacgccggtggaatttaagggcggcgatattggcaagctctgtatttgcggcacggtaaacgatattctgatgatgggtgccgtgccgaaatatataacctgcggatttattcttgaagagggtcttgatatcgagctcctcgacaggcttgtttcctctatggcaaagacggccgaagctgccggcgttaaaattgttgcgggcgacactaaagtagttgagggcagcggcggtctttatattaatacgtcgggtataggtgttatccctgaggggcgcaatgtgagcgctgcaaactgcaaatccggtgatgtgatcatactttcgggaacgctcggagatcaccacgcctgcatactaagtgcgcgcatggaaattgaaaataatatcaaaagcgattgtgcagtgctcgccgatattacaaacggtttgttcagtgcgggaataaatgtaaagacgatgcgcgacgttacacgcggcgggctgggaacgatattaaatgagattgcagagcagtcagcttgccgcatagaacttacggagacggatattcctgtgaatgacgaggtcaggggttttgccgatattctcggacttgatccgctctatatgggtaacgagggcaagatgatagctgttgtgcctgagaaggatgcggagcgcgctcttgaaataatgagggcgacggaagtgggaaggaacgctgctgtgataggccgcgttgctgaaggcagcggtacggtgatgattacgaggctcggaggcacgcgcgttgtcgatgtgctttacggcgaaggattgccgaggatctgctgattggccgcagaatgtgattttgtggataaatatgcgcgcattgatttgcacgcatattttttattgcccgaaagcgggagctggaacaggttttaccgcgtgctcataaaatataaaaggaaaatatctgcgtgctgcaagaaaataaaatgcaaggcggcgcggaagtgtgaaaaggagagcaaaatgagcgaacagcaaaaatacagcaatgttacaaaggactatttgtgccggttttatgagatattaagcgatatgataaagggaatgactgaagctgagctgacgtgcagtatttcgcataattttattgtgcagatgataccgcatcatatggcggcgataaaaatgtctgaaaacatacttaagtacactacatggatagaggtgcaggagattgcggagaacataatcgtgtcgcagacgaaaagcattgagaatatggaaaaggcgcttgcaaagtgcagcgagctcaaaaattcggaaaatgatttgtgcctttacggacataattttgatatgataactaatacaatgttcacagaaatgcacgatgccccggcggtgaacaatgtaaacgcggactttatgcgcgagatgataccgcatcatcagggagcgataagaatgtcggaaaacgcgctgcgctttgaaatatgttcggagctcatcccaattctcgatgcaataattatatcgcagagggaaggtgtgcgtgaaatggagagactgctcagtactatgtgcagcactgcttgcggagagtagactgaatataaaacagtgaaccggttacccgtcctgcttgacaaataggacgggtaatttttgataaaaggtgttgacagatagaggcaatatatgatactatacaatcagttagcataagctaacttacgatttacagcaacgcgaatttaaaacagaaaaaatgatgaaatgccatgaggcatttttattaaagcaatcagttagcataagctaacttaaaaataggaagaaaggagaatttgaatgagcacggtgctgcaaaaatcggtgagatatgtaagcgtactcatacaaataccgtaggtttatgcatagagcttataaggaaaagaagaacatatctgaagaattgattgttgatcattgtgcgccgactatggcgggattaaaaacaggaagtctgttcaactgtcctttggaggatagtgcagaactgatggaaaaaataattgaactcaacagaagaattgttccgcgcggacttcgcttggtgcctctcaagattaaggaacgaagcgcacttgtttatatgtatcgtccgcagatgcttgaggaggatttaaaacacgtaatggcggaggaaatacttacagagagggattaccctgtcgggcaggcagaaagatgtcttgcgtgtcttgtgcgaaggcttaggcacgaggaagaatttccgcatgaaataggactttttctcggttatccgcctgaggatgtggaggggtttataaaaaacggcgcggcgggagcaaaatgtgtcgggacatggaaggtgtacggagatgtggaaacagcgcagcgcaggtttgcacagtacaaaaaatgtacgcggctgtaccgcgcggcgtttaaaaaaaatcaatcgtttgataggct

SEQ ID NO: 2553 - DNA, 32759 bp, Unknown
  16S sequences of unknown bacteria
ttttgatgttatacttgtcatagaaaattcacctcttatggtactttgtttttgtcgttattaacatcataccatatttgagatgaattttcttctttttttgttacctatctattgtaccataacaaagtcggcgcttttgtctaatattatgcttgttttaaatttaaaaatgtgttattatatatttaacacaggttggagggagttttggcatgcatcttcaggaatcgggagaaatgtatctcgaaacaatacttatactgagccgcaaaagccaatttgttcgctctattgatataagcgaatacatgggcttttcaaagccgagcgtcagccgcgccatagggcttttaaaggacggcggatatataaccgttgacggcagcggatatatcgctttaaccgacgcgggcgcggaaattgcggggaaaatttacgaacggcataatgtgctgaccgaatttttaagaaagatcggcgtatccgaggaaaccgccgcggcagatgcctgcaaaatagaacacaatatatgcgatgaaacctttgacgcactcaaaaagcatataaaagaaatagaggaaaagccatgagcttctccctgagttttaccgaaaagggttacggcacgccgcttgttttactccacggaaacggagaagacagcggctgttttgtcaatcaaatcgataagttttcggaattccgccgtgtaatagcggtcgataccagaggtcacggcgcttcgccgcgcggaagccgacccttcacgctcgacacctttgcaaacgatctgaatgagctttttgataagctcggtatcgactctgccgatattttaggcttttccgacggcgggaatatcgcccttatttttgcactaaaataccccgaaagggtgaagcgaatggtgctttgcggcgccaatctgttccccacggggcttaaaggctcttttttgattccggtaagacttacctatgctgttctggggcttgttccccgccgcgtacgcagtgtccgccgccgcagggagctgctttatttaatggcaaagcagccgaacatacgcccgcaagcgctcgaaagcattaaatgccccgtgcttgtaatggcgggaacaaaggatgttataaaggaaaagcatacaaagcttatcgccgcctcgctgccgaatgcaaggttgtgctttttaaagggcgggcattttatcataaaaacaaacagtgttgaattcaacagtgaggttgaaaaatttctccgcgcgcagaagacctgaaaactgcgtctcaaacagaaagatgcattttcaaaagcagctttttaatgtaaaccgccagtaaaaacgccgccgccaccgaaataatatcctttatgagatacggtgctgaaaccaaaagaaatgcgggaacaaacttcattttatagattaatgcgtattgcaggctgccccaaatatggcatattgcaagccccgcaaagcccggcagtattttgagatatttattttttatgagcacgccgactccgcaaagcccggttaaaaagaggaagccgaaaataaatccgcctgtcgccccgaaaagcacctgcacgccgcccctgaagcccgagaacacaggcaccccaaccgtgcccaaaaggatatatgcggcaatcgaagccaagccccacttcacaccgagaacatagccgcaaagtgccacggcaaaggtctgcagggtaagcggcacatcaaacggcgtcggaattgcggtttgcgaaagcacggcggtaatcgcggtgaaaagcgccgccgttatgagtcttaaagttcttttttttgcattttctttcattttaaaatccccaatcggtttatactgtcataaaaagcattataaagcatacagtccgaattgtcaacctaattttaatataggttgacaattcggactttgctttttattaaaggctttaaagcgagcttccccgccgacctcggtttcgacgaaatcggcggggaagcagtaaattttgccgtatcagggacggagatgccttttatcctgccgccttattcagcggcagcttcgggcatatcacccgcttcggaatcggtcggaatgccgtcatcgagcatatcctcatcatattccggaggatttatctcggcgcagcgcatacctgtacctgcaggaacaagcttaccgataataacattttccttaagaccgaacagcgggtcaaccttgcccttgatggcggcttcggtaagcacgcgtgtggtctcctggaaggaagctgccgataagaacgattcggtagcaagagatgcctttgtaataccgagcagagttgcgcggtaggttgcttttgtaagcccctcctcgcccgcgtcgatacgcgcctgaacggcggcgtttgcctctgcgatctccttgtattcgtagctgacattctgcagcaggtctgtagagccggggtcggtaatgcgcagcttgcgcatcatctgacggactataacctcaatgtgcttatcgttaatatcaacaccctgggtacggtaggcgttctgaatttcggctatgatatattcttgaacagcctcaggcccctgcgcctccaaaatatcctgcggatatttagcgcccggaatcagcatatcgcccgccttgacctcgtcgccgtccttaacaaggcagcgaataccgtaaggaatggtgaccttttcctcggttttaagctcatcgtttgtgattataattacattgctcttcttttcctcgtcaatgcgtacggtaccgtccattttagcgataagtgcgcaacgcttcggtctgcgtgcctcgaacagctcctcaacacgcggaagaccctgtgtaatatcctctgtactcgcaataccgccggtgtggaaggtacgcatggtaagctgggtgcccggctcgcctatagactgagccgcaactatgccgacagcctcgcccgtggtaaccggtttgctggttgcaaggttgcgcccgtagcacttcttgcacacgccgtggtggctgtggcaggtaagcaccgagcgtatctcaatgctttcgattccggcgtcaacaattttcttggcgccctcgcccgtaaccatatcctcatgcgaccagataacctcgccggtattcggatcaatagcgtcatggagcagatatctgccctcaaggcgctctgcaagcggctccagaatgtggtttccatccttaatatcggtgacggtaagaccctcttccgtaccgcagtcgtcctcacggacgataacatcctgcgcaacatcgaccagacggcgagtaagataacccgagtcagctgtacgcaaagcagtatctgcaagtcccttacgcgcaccgcgtgaggaaatgaagtattcaagtacgttaagaccctcgcggtagttagcacggataggtacttcgataaccttacccgccgtattcgctataagtccgcgcatacccgcaagctgtcttatctggctcatagaaccgcgcgcgccggagtccgccatcatgaatatcgggttgaactcgtcaaggttgcccttcagcgcatcggcaacatcctcggtcgccttgttccatatttctataacatggcggctgcgctcgtcgttgcttataagaccgcgtctgtaatcgcggcttaccagatcaatctgtgcctcggcgcctgcaagtatttcctttttcgccggcggaattaccgcgtcgataaccgcaacggtaatagcgcccttggtggaatacttaaagccggtcgccttaatattatcaagaactatagcggattcgcttgttccgtgcattgtaatgcagcggtcaataattttaccgagctgctttttgccgaccttattctgaataatatcgtcgttgctctcaataacgttggtatcgggatttttaacggtataggtccattcaaggtcgagcttgtgcttggggtcggttctgtcaacaaagcctaaatcctgcggaatcgactcattgaagattataaagccgaccgtgcaccaaacaagaccgtgctcacccttatcgttggtcatacgcactcttataggcgcgtgcagaccgacaataccgtcgttataagccattatcgcctcgtttttatctctgaatatcttgtttgcgcccttttcgtcggacttaacaagagtgaggtagtaagagccgagtaccatatcctgcgtaggaacggtaacaggcttgccgtcagacggctttaagaggttgtttgccgcaagcataaggaaacgagcctctgcctgtgcctctgccgagagcggaatatgaatagccatctggtcgccgtcaaagtcggcattgtatgccgtacaaacaagcgggtgcagctttaacgccttaccctcaaccagcaccggttcaaatgcctgaataccgagtctgtgaagagttggagcacggttaagcagcacgggatgctccttgatgaccatttcgagcgcatcccagatttcggtggacgcacgctccaccatctttcttgcggacttaatatttgtaacagccttggtttcaaccaggcgtttcataacaaagggcttgaaaagctccagcgccatttccttcggaacgccgcactggtacattttaagctcgggtcctacaactataaccgaacggccggaatagtcaacacgcttaccgagcagattctgacggaagcgtccctgcttacccttaagcatatcggaaagagacttaagcgcgcggttgttcggacctgttacgggcttgccgcgtctgccgttatcgataagggcatcaaccgcctcctgaagcatacgcttttcgttgcggacgattatatccggtgcgcgcagctcaagaagtctcttcaaacggttgttacggttgataacacgcctgtaaagatcattcagatcgctcgttgcgaaacggccgccgtccagctgaaccatcgggcggagatctggcggaattaccggaataacatcaagtatcatccactcgggacggttgcccgactgcctgaaggcttcaagcacctcaagacgctttaaaagacggatgctcttctgtcccgttgcgtcctcaagctcggcgcgcagctcgtcgcaggtcttatcaagatcaatttcgcaaagcagcttctttatagcctctgcgcccatgcccgcttcaaagtcgttttcatacttttcacgcatatcgcggtactgcttttcgtttaaaagctgctttttttcaagcggagtagtaccggggtcggtaactatatactgcgagaaataaagcacctgctcaagcgccttcggcgtgatatcgagcacaagacccattcttgacgggatagtcttgaaataccaaatgtgcgaaaccggggctgcaagctcaatcgaacccatgcgctcgcggcgaaccttcgcgcgggtcacttcaacgccgcagcgttcgcagaccttgcccttatagcggatgcgcttgtactttccgcagtggcactcccagtccttctgcggcccgaaaatacgctcgcagaaaagtccgccctgctcgggctttaaggtacggtagttaatggtctccggctttgtaacctcgccgtgcgaccagcttctgatttgttcgggagacgcaagtcctatttttattgattcaaattcaatttctgccatatctgcccctccgtttaattttcgtcgtcgaattcatcgtctgatgcgaattcgtcatattcatcctcggctatcgcttcgccgttttcgtcctcaagaccgaatccggtcaaatcgtcagcaaccgattgaccgtcaaagtcaacatcgttaccctcgttttcgggaattgccggtgttccgagaccgatgtcgtcgtcatcctcaaagctctgcttcaagtcaatctcctcatcgttacggtcaagcaccttaacatcaagacccagggactgcagctccttaataagaaccttgaacgactcgggcacgcccggcttcggaatattctgacccttaacgattgactcataggtcttgactcgacccacaacatcgtccgacttaacggtgagtatttcctgcagcgtataagccgcaccgtaagcctcaagcgcccaaacttccatttctccgaagcgctgaccgccgaactgcgccttaccgccgagcggctgctgggtaacaagggagtacggacctgtagaacgcgcatggatcttatcgtcaaccaggtgatgcagcttgagatagtacatatagccaacggttaccgggttatcaaacggctcgccggtacgcccgtcataaagctgggtcttggcgtctgccgtcagcgggatgcgtgagaagtcaagcttcgcgctgttcttatccttatattcgtcggattttgtgaattcctccgccattgcaaagcacttgcggatgtcatcctcatgagcaccgtcaaataccggggtgcagatgttccagccgagcgctttcgcggcatatcctaagtgaacctcaagcacctgacctatattcattcgggacggaacgcccaacgggttcagaactatatcaagcggagtgccgtccggcaggaagggcatatcctcactcggaagtatgcgggatacaacgcccttattaccatggcgtcccgccattttatctcccacggaaatcttacgcttctgcgctatatagcagcgaacgacaacatttactccggggcttaattcagccgaattttctcttgtgaataccttaacatcaacaattgtgccgtattcgccgtgcggaacacgcagagaggtatcccttacctcgcgcgccttttcgccgaatattgcacggagcagtctttcctcggcggtaagctcggtttcgcccttgggcgttacctttcctacaagtatatcgcccgcggtgacctctgcgccgacgcggataatgccgcggtcgtcaagatccttaagcgcatcctcgccgacattcggtatatctcttgttatttcctcaggcccgagttttgtatcgcgcgcttcaagctcatattcctcaatatgaatggaggtataaacatcatcgcgcaccaatcgctcgtttataagaaccgcgtcctcgtagttgtagccctcccatgtcataaagccgatgagagcgtttctgccgagggatatttctccgttgctcgtagccggaccgtcggcaataacctcgtgctccttaaccttttgacccaccgccactatcgggcgctgatttatacaggttccgtggtttgaacgtaggaattttataagcttatattcgtcaatttcgccgtttgtcgcgcgaatcttaatgtaatccgcgctgacataggtaacctcgccgtcgcgctttgcaagcacaacaacgcccgagtcaaccgccgccttgtattccataccggttgcaacaatcgggttttcggggcgtaaaagcggcacagcctgcttctgcatgttcgagcccatgagcgcacggttggtatcgtcgttctcaaggaacggaatcatggcggttgctaccgaaaccaccattttcggcgaaacgtccatataatcggcacgggaggactcaacctcacggaaaccgtcaagataacgggcagtaacctttttgtttacaaaatgacctgcctcgtcaagcggttcgtttgcttgtgctacaatgtattcgtcttcttcatcggcagtcatatagcaaacctcgtcaagaactctgcctgtttccttatcaaccttgcggaacggagtttctataaagccgtatttatttatcttcgcaaaggttgcaagataggagataagaccgatgttaggaccttccggagtctctatcgggcacatacgtccgtaatgcgtatagtgaacgtcgcgcacctcgaaggacgcgcggtcgcgggaaagtccgccgggtccgagcgccgacagacggcgcttatgggtaagctccgacagagggttggtctgatccataaactgcgaaagcggagacgagccgaagaattcctttatagccgccacaaccggacggatgtttataagcgactggggggtaatgctgtcgggatcctgcgcctgcagggtcattttctcacgcacaacacgctccatacgggatatacctatgcggaactggttctgcagaagctcacccaccgaacggatacggcggttgccgagatggtctatatcgtcaaccgtgcccacattgtgaggaagtcccagaaaatagtttacggtagcaaatatatcgtcaagcgttatatgcttcggaataaggtcgtcggcatgagccaaaattgcctcgcgcagctcttccttgccgtttgtttcctcaagcagctttttaagaacctcaaacgaaacgttctcgtttatgcccagcccgtcaagctcgccgagttcatcggcagtgaaatcggtaaaatcgcaaagccttaccataccgtttgagagcacctttacctcagtaacattgccctcaaagtccataacattgatataggcttcctttacacccttacgctctatggtatccgccagctcgcggctgacggttacatccgcctcggcaagaatttcaccggtcatcggatctgccacagggcgcgaaagcacggcgccgcggattctggcgcctattgccaattttttattgtatttatagcggcccacgcgggaaatatcatatctgtgcgggtcaaagaaaagctgctcaagataagcctttgcaccctcaatggttacaggctcgctggggcggagctttttatagacctctacaagcgcgtcctcaaccgacttggtgtcatccgtctcaagggtcgcggaaagacgctcgtcctcacccaaaagcgttcttatcatatcgtttgtaccgattccgagtgaacgcacaaaggtagtaatgggcagcttgcggtttttatcgatgcggacataaagcacatcgttcggagaggtttcatactcaagccatgcgccgcggttcgggattatcgtggaggaaaaaagccgtttgccggtcttttcatcggtcttttcggcgaaataaacacccggcgaacgcacaagctgcgaaactatggcgcgctccgcaccgtttattacaaaggtgccggattcggtcatcagcgggaaatcgcccatggagacctcgctttccttgatctccccggtctcgctgtttacaaggtgcgcggtaacgcgaagcggcgcggcatatgtcgtatcgcgcgctttgcattcggtaacatcgtatttgggagtatcatcaaggcggtagtcaacaaagctgagcctcaggtttccgctgtagtccgttatatcggacatatccctgaagacttctttcaaaccctcctcaacaaaccatttgtacgaatccttctgaatttcaatgagattaggcatgtcaataacttcgttgatcttcgagaaggtcattcggttgttattgcccaggcgtaccggttttaccattgaagtcggctccataggtttacaatcactcctccatatattttgcggcaaaaagagccgcaagagcaagcattcacaatgggttcggcgcacttaaaaattgcttcggggcaaaataggcgcacaatcccccatcatcattagtaattcattattatataccgtttgggagcgatagtcaagcattattttaattttaaaaaaaaattcacaaaatcgggcataaagaaacaatttcttctgctccgattctgtgaatcataagcgattatatattttttatcctactgcttttgcttatctgtatgcctgccagcacaaacggaaacgcacagaggagtatcggtgcaaaaaagagcagaaatattttaaagctgaagggaaacataagaaaaaacataaacgacatcagtataaacgcaagcgggcctattgcaaaaaaagaaagcgattgcggctataaccgtcacggcaatcttatccgccttattccgacacagcagcacgccgagaacagcataatccgcagccgaaaaaaccgcctgcggtatccacagcattgcataattcggcccgggattctttatgacgcacgatacaaagtagatgcccgaagccacatatgcagccgaaatcaaaaaagaaagatatatcggaaaaattcgctttttcataaatatacctcgttttatttttctataaactccaaaatatcattcataacatcctgcctgcaaatatcgttgtgtatttcgtggcggcagttttcataaagctttatcgtaatgtcctccatacctgcggccttaagccttttataaaccgttttgacacccttgccgtaatttccgacggggtcgtgcgtacctgaaatcaaaagcacgggcagatttttgcgcatatttttaaaccaggcgccgcggttgctgagaatattcagctttacaaggtcgtgcatggcggacacggtaaatttaaaggtgcagtattcgtccgccgcgtattttgcggtaacctcgcggtcggaggttacccaatcatacttactttccccctcaaagcgcttgttatatgcgccgaaagcgatattgtttataagccttgagcggtgcttttccccgaaaaacatctgcattatgtcggtcagcagcagcccgaagggtgctgcggcgttgggtccgcccgttccgcagattatgaatttttcaattccgtcgccgtaattttcggcagctatacgggaaataaacgagcccatggagtgccccataaggtaaatcggtttatcggggaacatttttttcaccgcgtcctcaaaggctttaacgtcgtttacaaggtatttccagccgttgcggtgggctataaagccgagttcatctttacttttcgccgtttcgccgtgacctaaattatcatagccgcagcaaacatagcccttttcagccaaaaatgcgaaaacatggtcgtagcgcgctatatattcgcacataccgtgaacaatgtggaaaatgcccttaatatcgccctcgggtatataaattctgcctttaagcgtgtgaatattatcggtgcccggcacctctattgctttaagctcgtaatgcataggttttcctcctttaaaaggctttggtgctgcgcacggcgcgtttccagccttccgtcatcgcttcgcggtgcttagcattaattgccggcttaaactcggtctgcttatcgggcaggcggagaatctcgtttttatttttccaaaagcccacggcaagccccgcaagataagccgcccccgcggcggtagcctcggtctgcgcgggtcttataacccctacatccgaaatatccgcctgaaactgcattaaaaagttatttgcggcagctccgccgtccgctcttatatgattaatgggcagcccagtgtccgctttaagcgcggttataaggtcgttggtttggtaggctatggcttcaagacaagcccttattatgtggtttttgccgctgccgcgcgtaagcccgcaaattgtgccgcgggcgtacatatcccagtagggcgcgcccagccccgcaaaggcaggaacaatgtaaacccccgccgaatcgggaacggaaagcgccgctttttcgctttctgcggcggtagttataagccccaattcatcgcgcaaccactgaatgaccgcgccgcccacaaacacgctgccctcaagcgcgtagcatatgttgtctcccgcgtcggcggcaatagtggttataagcccgtttttgctttcataagcggcggcgcccgtgttcataagcaaaaagcagcccgtgccgtaggtgtttttaatatcaccctcgcaaaagcatttctgcccgaaaagcgccgcctgctggtcgcctgcaatgcccgaaaccggtatttccgcgcccagaatatttacatcgccgtaaatttcgctgcttgggcgcacctcaggcagcatacactttgggatttgcagtatttcaagtattcttttatcccaggtaagcgagtgtatatcgtaaagcattgttcttgcggcgtttgtgcggtcggtaacgtgaattttgccgcctgacagcttccatataagccaggtatcaaccgtgccgaaaagcaggtcgccgttttcggctctgtcgcgcgcgccgggaacattatcaagtatccatttgattttggtagcgctgaaatacgcgtcaatgcgcagccccgttgttttgcgtatatattcctccaagccgtcggcgcgtaatttatcgcacatttcagatgtacggcggcactgccacactatcgcgttatatataggctcgcctgtatttttatcccatataatcgtagtctcgcgctgatttgtaacccccacggcggcaatttcctcggcagaggcgcctattgccgttatcgcctcggtaacggcggcgtactgaaccgaaaatatctccaccgggtcatgctccacaaagcccggctgcgggtatatttgcttgaattccctttgcgctgccgatacggcatttccgcccttatcaaaaagcacggcgcgggcgctggtcgtaccctcgtcaagtgttaaaatatactttttcatattgcaccgtttttaattattattcgcggaacgcggggggatatgccgcagattatttcataatttatggtgccgcacatatctgcaagctcttcaaccggtaattccttgccgaataaaattacctcgtcgccctgctttacgttttcaatatccgtcacgtcaaccgacatctgatccatacatatcctgcctattataggggcttttttgccctttattaaaacatagcctttatttgaaagcagccgcgggtagccgtcggcatagcctgcggttacggtggcggtcttcatttccttttcggcggtaaaggttctgccgtagcttacggtatcgccctttttaacggttttaaccattgaaacaaccgatttcaccgtcattgcgggtataaaatcttcttttagctttaagcccgacgacggggtaagcccgtaaagaattatacccgggcggcacatatcaaggtgcttatcggcatcaaggcagaaagccgccgaattgcagcagtggcaaatcttcggggtgagtcccgcctttataaagcgctcctttgccgcaataaagcgcgaatactgcacggcggtaaagccgtcctcttcttgcggggtgcggtcggaaacggcgaaatgcgtgaaaattccgccgaattcaaagcccggcagccgcgcggcggcaatagcatcctcaataccagaaagggaattatcgcggcagtcaaaacctatgcggctcatacccgtatccagctttatgtgtattttaattctcaccttatccgccgcggctttttgtgaaagtgcggcggcgtattcgggggagtaaacgctttgggttatatcgttaatataaagctgtgaagccatactaacaggtgtataccccaaaataagaataggcttggttataccgcagccgcgcagcgttacagcctcctctatatttgaaacggcgaaagcgtccgccccctctgcctcaagcaggggagcgacgttacgcgcggagtgaccgtaggcgtcagcctttacgaccgccattattttagtgcccgccgcctcttttttaataataccgaaattatgtacaagggcgtcaacatcaatttccgcccaggttctgtgaagaaattccacttttatttccgccttattttttaataatattattgcccaactgtttttttaccttgcccgcgaacggaatacacacaaggcttaaaagcacccaaaggcaggaatagggcatgcagatctgcccgcctatgttcattggcattttgctgtaatcccaaacattcttctttaaaattatattaaacacaacgccgaaaatgaactctacacccgtaacaaaggtgctgcctacaagtccttttatcaaaagtcccgcttttttgagcttttcgcttatggtgccgaagaacacaaagcaaattccgcccgcccccagcattgaccagtgcgtgtaaccgcgccatataacctcaataagtccgtagcccacggcgcctattgaaaaaagcataaatcttatttttcgctgtttcattttatcacccgtagttattatgggtgataattctttcggctattcagccaaagccgtgcagtaaaaattaccgcctgtttctcttagtgatcgccaaaaggcgtataagctgtgcgagcgatacaagcagcgccgcaacataggtaatagcagcagctgaaagcaccctgcgaaccgcttttttctcgtcttcccttataagtcccgaggaatcaagcgtcacaagcgctctgtgagacgcgttgaactcaataggcagcgttaaaagctgaaaaagcagcgccacgcagaagaaaataacgcccagcttcacaagaaaataaaaattgaaaataagcccgattataagcagcggcattgaaagctgcgagcccaaattacataccggcagtattaccgagcgcacctttatgggcacatagccctttgcgtactgaacggcgtgtcccgcctcgtgtgcggcaacacccacggcggaaaggttgtttgcgccgtaaaccgaatcggaaaggcgtataacattagtcctcgggtcgtagtggtcggtaagattgcccgaaacgcgctctattttaacattatatacaccgtttgtctcaagcacccgccgcgcggcatccgctccggtaagcggcgaatgatgtgtgctgtactttgaaaaaaccgtttttacccttatctgcgaccagagcattattataattgccggaactacaagataaatgtaaagcgagtctataccgtagtaataaaaaccacccataaaatatcaactccgaaaatcaaacattaaaacggaagagaacaatgtctccgtccttcataacatattccttgccctcgctccttacaagtcccttttcctttgcagccgtcatgctgccgccgcattcgtttataaattcgtcaaagtttataacctctgcgcgaataaagccgcgctcaaagtcggaatgaattttccccgccgcctgcggcgcctttgtgccctgcttaatagtccaggcgcgcacctcgggcttgcccgcggtaaggtaagagataagccctaaaaggtggtagcatttttgaatcatacggtcaagccccgagcgctcaagccccagttcttcaaggaacataaccttttcttcatcagaaagccccgaaatttcagcctccagagatgcgcatatcggcagaatttccgccttttcgcgctcggcaatttcctttaccgcgttgtagtttttgtttgactctatgcccgaggtaaagtcctcctcgctcatattgcaggcataaattacaggctttgccgaaagcagcgccgtggtatcaagcacgctttgctcggtttcgtcgttaatttcaaccgagcgggcgggaagcccgttttcaaggtgggctataagcctttttaggaaatcgacctcgccttgcagcgatttatcgcctttgagcgcctttgcggttttatcaaggcggcgctgcgccatttcaatatccgaaaaaataagctccaaatttattgtttcaatatcgcgcgcggggtcaaccgagccttctacgtgaataatatcgtcgctttcaaagcagcgcaccacgtggactatcgcgtccacctcgcgaatgttggaaaggaacttgttgccgagcccctcgccctttgaagcgccctttacaagccccgcaatatccacaaattcaataaccgcaggggtaaacttgtccgggttatatatctccgccaatttttcaagccgcccgtccggcacgctcaccattcccacattcggctctattgtgcaaaaggggtaattcgccgactgcgcccccgcgtttgttattgcgttgaaaagggttgatttgcctacgttcggcagccctaccatacctaatttcatttattcccatatctccttattttataagtatttaagtaattgcagtttccaaagcctttccgaaaatacgaaaagagctgatacgactcttatattatagcgcatcagctcttctttttcaatataaataagtttaatttgttttgtgccttcggtctgtagctccgatggggtcgcactttatccgtctttattcattatctttgtactctgcccgagccgtcgccgccggcgaggttttcaacctccgctgccgcaacacggttaaaatctccctctatcgagtgctttaataccgccgctgccgtagcaaactccaccgcatcctgcggcgctttttgttttaaaagcgaatatataagccccgcggcaaacgcgtctccgccgcccaccctgtcggctatgtgcatacggtattttcttgaaaatactgtagcttctccgtcgcagagcattgcgccgaaatcgttatcgctggcgctcaaattagtcctcaatgtcagtgcggcaccttttagcggataccttttcattagcttttccgcaacagacgcggcaccctcgttatcgggctttttcaaatcaaaatccgctttatccgaaacaatgccgaacagatccttaatatctcccgggtttgttatgcaaatatccgtataccgcataagctcacctataacgcgggaggctttctctatgctccacagctttgagcggtagtttgtatcaagacttacggtgacgccgtgctttttcgctgcctttacggcttcaaggcatatctgctcaagattatcactgagcgccggggtaatgcccgtaatatgaaaccaatcggcgttttcaaatacagcgttccaatcgaaatcagagggtgcagcctctgcaactgccgaatacttgcggtcgtaaatgcaaacagacgggcgctgcgaaatgcccttttcaagatagtagattcctaccctgtcgccgccccttactattttttcggtatttaccccgaaatatcttaaagcgtttaccgccgcctgacctaccgcatgctcgggcagctttgtcacataggtgctgtctataccgaaattcgcaagagaaaccgcaacattcgcttctcccccgccgaaggttgcttgcataccgtcgttttggaaaagtctgtcatacccgacggaggaaagccttaacattatttccccgaaagtaataactttgctcatttcagttctctccccgtttttcaagcgcttcctttacaaaaaagctgccgccgattgccgccaccttatcaaagctcagaaattcatctatattgccgcgatcaacgccgcccgtagggataaacctgacctgcggaaacggtgcggaaagcgcctttaacgccttaagcccgccgtaaatattagcagggaaaaacttaacggttgtaatgccgagctccaatgcctgcataatctcggtcggtgttacgcagccgggataatacggcacgccgttttcacggcagacctcagctaccgataccgacagccccggcgacactatgaactttgcgcccgcctttaaagcagctctgcactgctcggcgttaataaccgtacccgcgcctatcgacatttcgggatagttctttaccgcgtattcgattgcctcctcagcacacgccgttctgaaggttatttcggcacagttaatgccgtccgctttgagcgccgaaagtattttatccgtttcggacagctctttgattaccacaacaggtatgtatttttccaaaacaatctgctccttgccgttcttttcgccgcatagcgaagtttataatcgttttttcaaattataccaatcgggcgcccgtttttcaacaactatctgaaatttttgcatatgggcgtgtaatcacgctcgtttgtttatatctataagctttgtagagccctgactgtagcaggcggcgataacatccgccagtgcaagtgcggtatctatgcttgtcatacagggaatctgcagattcatcgccttgcggtacaaaacgcggaaatctcccacagaggaatccattaccgcccccgtatatacaatataatttaccgttccgctttcaagcagattatttatatcgtcgttctcccacacattgcgcgcggtcgttacatccattcctcttgagcggatagcctcggcggtatcgggagtggcaaagatttttattcccaaatcggtgaatttttcagccagcgcaatggcatcggaataatcgtaatcctccaccgatataagaattccctgaagcgcccttttctttatttgcgccacatcgattccgcttgccgcaagccccttataaagcgcctcggttttggttcgcccgattccgagcacctcgccggtggatttcatttcggggcccattatggtatttgcgtcggctattttttcaaagctgaaaacgggaaccttgaccgcataatattcggacgcgggcgcaagaccggtttgatagcccattttcgaaagcgattccccaagcatcgcccttgcggcaaggtcaaccatcggaatgcccgtaaccttgcttatatacggtaccgtgcggctggctcgcggatttacctcgatcacaaaaagctcgccgtcctgcacaagatactgaatatttacgattccctttgtgccgagaccgcgcgcgatctcaaccgaggtcttcacaacggtatcggtcatgacgcggctcaaattataaggcgggtaaacagcaatggaatcgcccgaatggattcccgccctttcgacatgctccataattcccggaatcagcacggtcgtgccgtcggaaatgcagtccacctcaagctctgttccgggcatatatttatcaatcaaaaccgaattgccgatattgcccgagaggattatattcataaatttgcgaacctcgcctgccgagcggacaacgctcatgccctgcccgccgataacataggacgggcgcaaaagcaccgggtagccgagtattttagcggcgataagggcttcgtcaaccgtattgaccgaaaccgccttagggcgcttaataccgattttttcaagaaacgcgtcgaatttctccctgtcctccgcggtatctattccctctgccgatgtgccgagtatgtttatgccgcttttcgacaggaattccgtcagctttattgctgtttgcccgccgaaggcaaccacaacgcctatgggcttttcaacctttataacgcccataatgtcttcctcggtgagcggctcaaaatacaggcggtcggctgtgtcataatcggtcgaaacggtttctgggttgttgtttactataacaacatcatagcccatgctcctcagagtgcgcacgcaatgcacggagctgtaatcgaattcgattccctgacctatgcgtatcggtcccgagcccagcaccataataaccggctttccgcttcttttaatacttcttgcctcgcacgctttatcacatgatgagtaaaaatacggtgtacaggcgttaaactccgcggcgcaggtgtccacggttttatagctgtagctgaattcgggcagatcgcttttgccggtcagccgctttataaatgaatccgggaagccgctttttttcgcccttaaatacagttcattatcaaggggtgcttcgcaaagctccttttcaagctccgccgcctgcttcagacacataataaaatagcggtcaatctttgtaatctcatgtatcttatcaaccgatattccgcttttcagcgcctcgtataccgtgaaaagccgcatatcgttcggctctgacaagcgggtcagaatatcgccgtcgtttatcggccctgcgttcagcgaatcaagctttatttccgcacctcgcaccgccttcataagcgcctcaacaaaggactgtcccatagccataacctcgccggtcgccttcatctgcgtgccgagcctgcggcttgagcctataaacttatcaaacggccatttcggcagcttcaccgcaacgtaatcgagagccggctcaaagcaggcgcaggttttcccggtgatctcgtttttgatttcatcaagattgtagccgagggaaatcagcgtggaaattttagcaatcgggtatcccgtcgccttgcttgcaagtgccgatgaacgcgaaacgcggggattaacctcgatgaccgcatactcaaagctgtcgggattgagcgcaaactggcagttgcagccgcccactattccgagcgccgaaatcatatcgagcgaggcggagcgcagcatttgatactccttatccgaaagcgtaagcgtaggggccgcaacgaccgaatcgccggtgtgaattcctaccgggtcaaagttttccatcgagcacacggcaatggcgttgccgactgagtcgcgcatggtttcaaactctatctccttccagcccgaaatgcatttttccaccagaatctgcgttacgggcgaaagctttaagccgttttccgctattttttcaaacgattctctgtcctctgctattcctccgcccgaaccgccgagggtataagcggggcgcactattaccggatatccgattttttccgctgcggaaactgcggctttaatatccgttgcaatctcactgggcacgcacggctgccctattttaagcatggtctcacggaaaagctcgcgatcctcggccttttttatggcgtttatatcgctgcccaagaaccgcacgccgtatttttcaagtacgccgctgtccgacagctgcattgaaacggtaagcccggtctgaccgccgagtcccgcaagcaagccgtcaggacgctccttttctattattcgggtcacggtttctgcggtaagcggctctaaatatatctcgtcggcaaacgccttgtcggtcataatggtggcagggttggagttgaccaaaacaacatttatgccctcttttttaagcacgctgcatgcctgtgtgccggcataatcgaattccgccgcctgacctattacaataggtcccgagccgattaccaaaaccttttttatttccttgtttttaggcatttttgtccccctccatcataccgataaagcggtcgaacagaagctcggtgtcatgcgggccggagcacgcctcggggtgaaactgcaccgtaaaggcgttatactcgggatattctattccctcgcagctgccgtcgttcgcgtttataaaaaattcccgccctttattttcaagcgatttgaaatccacggcgtatccgtgattctgacttgtaatgtatgttctgctgccgaaaagctcctttacgggctgattcgcaccgtgatggccgtatttaagcttcacggttttgccgcccattgcaagtgccgtcagctgatgcccgaggcatatgccgaaaagcggctttttgccgataagcttttttatctgctctatgcagaacacattctccgcagggtctcccggaccgtttgacagcataataccgtcgggggaggcttcaattattttttcggcgggcgtatcatacggaaaggtctcaaccgtgcagccgcgcttttgcaggcagcggacgatgttcgcctttgcgccgtaatcaataagcgcaaccttaaatttttcctcggattccgcgggataaacggcaggagcaggggaagacacctccgccacaacgccctttaccctgtagtcccgaatctcatcaagcgattcgggcggtgtatcgcaaatttttccgttcattacgccctcgctgcgaagcattatcgtaagcgcgcgcgtatctattccgcaaataccgcatacattttcccgcttcaggaattcatcaagcgtatattcgctgcggaaattcgagggatgcttgcatagctcccgcacaacataaccgcgcacggcgcatttcccctcaaaatcggcgggaatcaccccgtaattgccgataagcggaaaggtctgcactactatctgacccgcatatgaggggtcggtcagcgtttcaagatagccgcacataccggtggtaaataccgtttcgcctatgcattcggtatccacgcctattttgaagccctcaaaaaccgctccgttgcttaaaatcaaataagcctttttcattctgaacattccttatttccgattgtttatactaaggttgccgccataaccgcctttatggtgtgcattctgttttccgcctcgtcaaaaacaagggacgccttgcccgagaacacactgtcggtcacttccatatgcgtcaagccgtatttttcgtatatctgctttccgattacggtttcggtatcgtgaaacgcgggcaggcagtgcataaacacacactgctcccctgcgttttcaagtaattcgtcggtcacgcggtagggagtaagatcgcggatgcgctcctcccaaacgctgtcgctttcgcccatcgacacccaaacatcggtatatatcacatcggcgttttttgtcgccttgatcgggtcttcgtcgaattcaagcttcgcgccgctctcctcggaaatttttttgcaggtgtttataagcttcttatccgggaaatatttttcgggcgcgcaggcggtaaagctcatgcccgtttttgcgcagccgaccatgagcgaattgcccatattgtaacgggcgtcccccatgtatacgagcttctttccctcaagagagccgaaatgctccttgatcgttaaaaaatccgcaagtatctgcgtggggtggaattcgtttgtaagtccgttccagaccggaacacccgcacagcttgccagcgtttcaacgatttcctgaccgtagccgcggtactcgattccgtcaaacattcttcccaaaacccttgcggtgtcggcaatgctctcctttttgcctatctgtgaagcggcaggatcgagatatgtggcgttcatgcccagatcgtgcgccgccacctcaaaggcacagcgggttcttgtgctcgtcttttcaaaaataagggctatatttttccccacgcaaagcttatgctcgattccgctctttttttcctttttaagctcggcggcataatctattaaatactcgatctcttctcttgaaaaatcaagcagctttaaaaaattccttccggtcaatttcatggcattattctcctttacaggcgttttttattatttccgcagcccttaaaagcaggctgtcgggcgtgttgagcggcgggagaaggcgcaccctgtcctttgcggaaaggcacaaaaccccgtcgtttatgcattgctttataacatcggcggcggctcttttcgttttaagccccagcatcagccccatacccgtaatatcctcaattccgggtgaacctgccagtgtgtcggcaagcattttcccctttcgggcaacctccgataaaaattcctcatccaatcggcttataacattgtacgcgcccgcgcagcagaccgggtttccgccgaaggtagagccgtggtcgccgaattcaaatatattttcgacctttttcgacagaagcgttgcccctatcgggagtccgccgccgagcccctttgcggtggttacaatatcgggcgtgattccgtaattcatatatgaataaagcctgcctgttctcccgttgccggtctgaacctcatcaatcattaaaagaatgccgttccgctctgtgaattcacgcagaaattttacataatcctttgagagcgggataactccgccctcgccctgaatgcactcaaaaagcacggcggcgatttttatccgccccgccagctcctttaattcctcgggcttttcggcgtttaccgaaacaaagcccggtgtcagcggtcggtaaagctcgtggtaatgctcctgcccggttgctgcaagggttgtaagcgttcttccgtggaagctgttttttatcgtcactattgtgtagcaggcgtttcccttttcccgtgcggcgtacttccttgccgcctttacggcgcactcgtttgcctccgcgcccgaatttgaaaaaaagaccttgcccatgccggttttttcacacagcagctttgctaatttcacgcatggctcggtgtaatacagattcgaggtgtgctgaattttgccgagctgcgcgcttaccgccgccgcccattcgccgtcggccgcaccgaatatatttacgccgataccgctgcccatatctatgtattccctgccgcgggtgtcggttaaaacagagccgcttcccgatactatctccaccggaaagcgattatatgttcccgcaatgtattcggcgtccgtttccctaatattcattctatttctccttaaacagagttcccgcgccctcatcggtaagcaattccatcaaaatggaatggggtacgcggccgtccataataaccacatttttaacgcccttatggattgcctcaacgcagcattccaccttcggtatcattccgccggagataatgccgaccgaataaagcttttcggtttcggcaatcgaaatttcgtgaattaaggtagacggatcgtccttatcccttaaaataccgtctatatccgtcatcatgataaggcgctcggcgttcagcgcaccggctatatgtgcggcggcggtatcgccgtttatattataggtatttccggacgcgtcgcagccgatagtcgaaataaccgggatataaccgtttgaaagcagatcctcaatggtcttcggattaatttttgtaatttccccgacgaatccgagcttctcgttttttatcctcgattctatgattctgccgtctattccggaaagtccgactgcccttccgcccttcatttccaaaagatttacaagcgttttattcaccttgcccgccaaaaccatctgaactatttccatagattccttatctgtaacccgaagcccgtcaacaaaaacactttccttgccgaccttcttcataagctcgctgatttcggggccgcccccgtgaatcagcactattttaacgcctataagccacagcagaacgatatcctccataacctgctgcttgagcgtttcgtttatcattgcgtttccgccgtacttcacaaccaccgttttaccggtatatcttttaatgtacggcagcgcctgggtcagcacctctgccctgtccgcatttgaaaactccatttttctgcctccgttcaggtgcggtaatcaccgtttattttaacataatcataggtcagatcgcagccccaggcggtggcgtccccgttaccgtcgttaaggcttatgagaatttctatttccttttcggaaagcacggtctttgccttttcctccgaaaactctattcccgcgccgtttttgcatacctcaaccgttcccgccttacttgcaaaagcaacatcaatcttgtttacgtcaacctccgctttactgtagccgacggcgcaaagcacacgcccccagttagcgtcagccccgaacatcgccgcctttaaaagacttgagcatataacgcttttcgcaaccgcctttgcgtcattttcgctttttgcgccgctcaccttgcattcgagcagctttgtggcgccttcgccgtcggcggcgatcatcctgcacaaatgaacatttacggtgttgagcgccgtcataaatgtctcataatctgcgttttcttcggttatttccgcattgcccgccataccgttgcaaagcacggtcaccatatcgtttgtggaggtgtcaccgtcaatgcttatcatgttgaaggtattttttatgtccgatgaaagcgcctttttaagaagcgcgggcgagattgatacatcgctcgttataaaaacaagcatggtcgccatattcggatgaatcataccgctgccctttgcgatgccgcctatatgacagatttttccgccgagctcaaactctaccgcaatttccttttttacggtgtcggtggtcattattcccgccgcagcagcctcgctgccgttttcgttcagtcccgcgacaagagccggcagcgccgccttaatgggagcgggatcgagcggctgacctataactccggtggaggctataacaatatcctccgccttacagccgagcacctccgccgcggcaaggcatatctcattcgcggtctcaacgccgcccgcacagcaggtgttcgcaattccgctgttgcaaatgcaagctttggcctttccgttttcaaggtggctcctcgttacggtaatcggcgcgccgaacaccgcattggtggtgtataccgccgcgcaggacgccgtaacttcgcttacaataagcgacagatccttcttaattttgtttttccttattccgcagtgaacgccgtttgccgaaaagccctttgcggcgcaaactcctccgtctgaaatcttcatttttaacgctccttatttatatttaagattaagtccgagggtctcctctgtccccaaggctatatttatattctgaacggcagagcccgaggctccctttccgagattatcaaaccgcgatacaagcaatatccgttcttcgttcccgcaaacggttatctgcatatcgtcaaagcccgaaagctccgcggcggaaagaaagctttcactgttatcctcaaagtgaaccagtccttttttataataatctcggtagacctcttttatcgcagcgcttccgccgtgcacacaatcgccgaaaagcgaaaccgtgacctccatgcccgaataatatggtgctactatcgggcaaaatatcggagtcttcttaagtccgcacacctttttcatttcgggcagatgcttatggctctgcgtaagcccgtacatccgcggcgcgttaagcagcgggtctcttccgtccgcttggtattccgcaatcatcttttttccgccgcccgaatagcccgtcagcgaaaagcaggaaatcggcgtatcgggcgcgattattttattttctgtaagcggcgcgataagcgaaataaagccgcttgcgtggcagccgggattcgcaattcttttggcagcggctattctttgcctgttatcggcaatttcgggaaaaccgtatataaaattctcatcggtgcggtgagcggtagaggtatcgattattaccgtgtcgggattctcggcaaacgccgccgcctcgcgcgccgcgtcatcgggcaggcacaaaacggcgatatccgccgaattcaaagcgtcccgtcttgatgcttcatcctttcttttttcctcgggcagaataatcagctcgatatccttccttaaaagcagccgctcctttatgcgaagacctgtcgttccggcgctgccgtcgataaatatttttttcataagcgttctccatagttgcataaatattcaatttatgctcatattttagcatattgtttcgaccttgtcaagtgatttaatatgagtttttcggggttttggtgatgaacttccgcatctgccgcataaacgcaaatattatgcataaaatatgcatacattaaatctcattttacgtctgaaacaagtctgtcaaatttattaacgataaattcatatatttgaatcacgcctgtaataatggcggtttaaaatatagtcaaaccaaaggaggagcgtttttatggatgattataataataaacaaaacggcgagcttcgcggctttgacgaagtgacaaacgaaaacggttataccgtaacaccggacggcggtttttacacaaagagccgcgaggacataattcaggacgaggcatttaaatctcccgagcagcccgataacgcagcacgggcagaaggcacggcacaggcagagcaggaggctcggcagacatatgccgattccggcgcaaattacagccgcaataataattataattacggcggaaccaccttttacccaaggccgccaaagcagaaaaagaataaaaggaagggcgccttcggcgcgggcactgtaatcgcggcagcacttttggcggcggtcataggtgcgggcagcggtatagcggcggtaacgctttcatcaaaaaacggcagcaatacctctacaccgataacctcaagcgtttcgggcagcaatgttaatataaacattgacgaaactgcggaatccgttgttgaggcggttgcgaaaaaggtaacgcccagcgttgtgggaataagaaccaccacctcagtgcgcagctttttcggcagcagcaatgaatcgacaggcgaaggcagcggcgttgtttattccgccgacggatatatcattaccaactaccatgttatttccggtgcggtgacaaacaagagcggttcaaaaatagaggtattcaccgatactctcgattccgattcgtatgaagcaaccgtggtgggttacaacatctccaccgatctggcagttataaaaatcaacgccaaaggcttaacacctgcggaattttccgattcctcaaagctcaaggtcggtcagtatgttataaccgtgggcaacccgggcggccttgaatttatggacagcgttacctacggcgttataagcggactcaaccgcgtggtttcctcggattccgatgttaagcttatccagaccgacgccgcaatcaatcccggaaattcgggcggcgcgcttgtaaacacaaagggacagcttgtaggaataaacagctctaagattgtatccgaggaatttgagggcatgggctttgccattccctcgaataccgttgcgaaaatctgcaagaatataatcgaaaagcaaaacgaccccgagccgtacctcggaatttcggtaagtgagaaatataactcgagcgtactgaaatattacggatatccgtcaggcgcggtggtttcaagtgtggccgacggcagtcccgccgataacgcaggacttgcaaagggcgacattataaccgaattcggcggcaccgagatcaccgaatacagcatgcttgaatcccttttgcagaaatgtaagccgggcgatcaggtaagcgttaaaatctaccgcagcggcagatattattcaacaaccgtaacaataggctcaaacaacgcagtgagctgattccaaaagcaaagtataaaagcgtcggttctccggcgcttttttgcttcggattttattgattgactcttccgcaaatcggtgctataatcggcatataaatcaatttcggaggttggatctatgaaaacttcaactcaaatagaggaagcatcccttatcctcggtgaagaaaaagcggtggaatatgtcgcaaaggcaggctttgacggctgggatttctccatgttcgcaatgtgcaaatacgattggcaatcgggcaagctgcttgaaaataaccatccgcttgcgggaaaggattatcttgcattcgcaagaagactcaaaaaaatcggacttgataacggaatcgtatgcaatcagtcgcacgcgccgtttccgtcctcctgccccgaaatacgctcttatttaaagcgcgcgatagaatgcaccgcagaagcaggcggggaaatatgcgttatccaccccgacaacaataaatctgcagaggaaaacgccgaaatgtatcttgagctgctgccctttgcaagggagcataatgttaagattgcaaccgagaatatgtggaattgggacagcgaaaaggacgaagcctgctttgccgcctgtgctacgcccgaaagctttgtaaagcatgttgatgcggtaaaagacgattttttagtcgcctgccttgatataggtcacgccgaaatgcgcggtgcgggtcagggcgccgcaaacacggctcgcgcattgggtcgccgcctgcaggcgctgcatatccatgataacgacaaatggcacgattcacaccaaatacccttttcaatgtctattgattttgccgccgttgtaagggcgcttaaggatataggctataagggctggtttacgcttgaagcggacaattatttaaaaagctttcgcaaggacaatattattgacggtatgaaggatctatactccgcggtaaggcggcttgccgatatgtttgaggaaatgtaaagcgcaaaaaaatcatcctccgttacttaatttcggaggatgatttttttaatatcccagactttccgcgcagattataacatttattctgtccttaaccctttgcattgccgaaatcagataatcgcagcaaatgcgggtgctgccgcagcagccgtcggtcattttagggctttcactcttttcaagggaaatacaatgtcccagctttttacagggagcgtcaacactcagccgtgcagtattcataggcgcggctgttttctttacgcgcagaatcccttcatctacattctttacaattttatttacgcctaccaccataacaacctttttagggccgaaacagattgaggacacgcggttggcatttccgtcaacatttataagctcgccgttttccgtaacggcatttgacgagcagaaaaagaaatcgcaccctattgccgcgcggaaaatttcaagcctttcttcctcggaaatcccgggctttaatctgttaaaaaacttatattcggggtcgcttataatatcccacacgccgctctcattcaggctcacagagccgcccgcggttataaccgcaccggggaaaagcatgctctttactatttcgcagacctgcgccttgttttctgcgtaatatgccttcatattgttgcgttcaaggtttatcattgttttttcaattacagcgttcatcagttccaccctttcactattgttccgccgcccaccaccgtgtcgccgtcgtaaaataccgccgcctgcccggggctgggcgcgcgctgcggctcgtcaaattctattataacgttatcgccgtcgggctttataacggcgggctgcgcaaaatgccgataacgcagctttgcggtaacccgcatctcgccttcaagcgtatcaaacgggataaaattaagcctgtctaccagtacctttcggcagaaaagccgttcctcatcacctaaaaccaccgtgttgttttcggcgtttttttcaattacaaagcggggcttaccgagcgcaatgccaagccccttgcgctgacctattgtataccttattattcccttatgctcgccgaggcgatttccgttttcctcggtaaaatccccagcagcggcaactttacccgtagcccgctcaataaagcctgcgtaatcaccgtcgggcacaaagcaaatatcctggctgtcgggctttgccgcgtttacaaagccgtacctttcggctatttcacgcacctgcggctttgtaaggtcgcctaaagggaacaaagtttttgaaagctcctcctgcgttatggaataaagcacataggtctgatctttatttatatccgtcgggcggcaaagcaaatatctgccgttttccgcccttttaacacgcgcgtaatgcccggtggcgattttatcgcaccccagcgtttcggcgcggcgcagcattttatcaaacttaattttgcggttgcactcaatgcaggggttgggggttctgccgtttatatattcgtttataaaatcggatatgacgtccttttcaaagctttccttaaaattaaaggcatagtgcggaatacccagccgcacgcaaaccgcgcgcgcgtcttccacgtccgataaagagcagcaggttttggtaagcccggcgttgtaagcctcgccgtcataaaggcgcagggtgatccccgagacattatagcccgcctctttaagcagcgcagcacaaacagaagagtctactcccccgctcattcctaccattaccctttctccgctcacctttaaacctccgataaaataaaattcagcccgaagaaccaagagttccccgggcagtaaaatcagatagaagtaatatgcgcgatttcgtacatatcatcatcaaacggtttcttcatgttgagcgcctcgtaaatatcgtaatctactatctcgcccttctgcatacctataacgcggttgcccttgccctctcttaaaagttctaccgcggcaaagcccatttgggttgcaacaacgcggtcgcgaacggtcgggttgccgccgcgctgaacatgacccaacacggtagctcttgactctattccggttacctcttcaattttttgggctatctgctcaacgccgcccacgccctcggctacaaccacaataaagtgctttttgccggttttctgggtctcccttatttttgcgatgacatcatcaacagaatgctcaacctcaggcaccaaaatagcggtagctcccacggcaatgccgctttgcagcgcaaggtagcccgcgcgcctgcccataacctcaacaaccgagcagcggtcatgcgattgagcggtatctcttattttatcaaccatctccatagcggtattcatagcggtatcaaagcctatggtgtattcggttgaggaaatatcgttatcaatagttccagggacgcctacgcagggtattccgcgcaaggataaatcgcgcgcgccgcggtaagagccgtcgccgcctattacaactatgccctcaatgccgtgctttttgcaatttgcaattgcctcctgcataccctcctcggttttaaagcgcgggcttcttgcggtgtaaagcaccgttccgcctcggtggattatatccgataccgag

SEQ ID NO: 2554 - DNA, 29233 bp, Unknown
  16S sequences of unknown bacteria
atgctcttttcaatgaaagcggcaagttcgcctatatccatgcggatctgcgacatggtatcgcggtcgcgcacggtaacggtgttgttatccagcgtttcgaaatcgatggtgatgcagtagggtgtgccgatctcgtcctgacggcggtagcgcttgccgatagaacccgcctcgtcgtaggtgatcatgaactttttggaaagttgtttcgcaacctccttcgccttttccgaaaggtttttctgcaagggcaagatcgccgccttgtacgccgccacggcgggatggaagtgcatgaccacgcgcgtgtcgccgccttccagcgtctcctcgtcgtacgcctcgcagaggacggcgagcatcaggcggtctgcgccgatggagtattccacgacgtaagggatatacttttcgttggtgacagggtcgagatagaacatattcctgcccgaaaattcctgatggcgggaaagatcgtaattcgtgcggttatgaatgccgttgagttcctgccagccgatggggaaaaggtattggatatcgcacgccgatttcgcgtagtgcgccagtttgtcgtggtctttgtagcggaggtgctctctttcgaaaccgaggcagagcaaaaattccagtgcctttttcttgtattcctcgtaaaattcggtgtccgtgccctctttgcagaaccactggtgttccatctgttcgaactcgatggtgcggaaaatgaaatttccgggcgtgatctcgttgcggaacgctttgccgatctgcgcgatgccgaagggcaccttggcgcgcgtggtgcgctgcacgttcagaaagttgacgaattcgccctgcgcggtctcggggcgcagatagattttattctggctctcgtcggtcacgccgcgcgaggtctcgaacatcagattaaaggtgcgtatgggcgtccagttgtgcttgccgcagttggggcaagccaccttgtgctcggcaatgtacgcctccatctcctcgttggataaaacgtcgggattgacttttcccttagaatggttttcgatgaggttatccgcgcggaaacgcgccttgcattccttgcagtccattttggggtcggtgaaggacgaggtgtgcccgctcgcctcccatacgcgcgaattcatcaggatcgccgcgtccacgccgaaagaattgtcgctttcctgcacgaattttttccaccaggcgcgcttgacgttattcttgatctccacgcctacgggaccgtaatcccaggtgtttcccattccgccgtaaatttcgctgcccgggaaaatgatgccccgcgccttgcagagatttacgatcttatccattgtcgccgctgttttatcagacatgatagattcctcgttctcttttcgtttttataataattttacttttttatacgtataaagtcaagtaaaaagtcgtttacaggcgaagtttcacgatgagaagcggcgtgaccgtcagcgcgaaaaagatcgccgcgaaatactgcgcgaaagtcgaccagttgccgtcgggcagaaagcggtacagcaaaagaaaggggaccgccgccgcgatgatcgcgatcgccagccgcagaatgcgtttccaccatttgtttgcgtccgcaaagcagaaaaatttctcttcgatcaaaagcccgatcgctgcggcgagggtgatggcggagatcttgaacatggattccgtcatcgtgcgggcgataaagagaaagggcagcgtaagaagggcgaaagcgaaaaacacccacagcctttttttgtagaagcccgcatagaccgtctgccagatgatcgcgaacagcacgccgatggcaaagcccgacagcacgtcggtgggatagtgcactcctaaatatagccgcgaaaacatgacgcccagcaccgcgattatggaaaatacgatgacgcccgggcggcggaacgtgagcgcgaggttaccgaaaaaggacgcgctcgcgcacgaatgcccgctcgggcaggacatatcgatatccagatcgtttgtggaaacgaagggcgtatccacgtccaccttatccaccacgcccgcggcatagggacgggtgcggcggatggcgcttttcagccccgtgcagaaagcgcttgccgaaagaatggtcacgagcattttttcgccaaggctcttattgatgcagaaaaatacgacggcgatgatggcggtgatgaaaatttcttcgcccagcatcgtccacgccgcgaacacaatgtccagaaactggttgcgtatgccttccagcgcctgtaatatcgcttgatccatgttgcctccgaatgcggatttttcgtttagtatatcataatttccaaaaaaagcctactgttttttgcgttaccgtcagatttatggtataatgagggtatgatatccgttcgtttttttctgaaagagggctaccccgtttcctgcgaactcaaagacggggaaaacgtgtttttcggcggcgtcaccgcgcagggagaatttttctgcgaaaagggagtcccttatcccgaaatgatgctgcgcgcgctcgtcaacaaatgtatggacgggcgtattcccgtgctctttgccagggacgaatggggcgtagatcttgcgcggttcggctttgaaagggagggaggaaaatatgcgtgcccgcgcgagcggctgcgcctgccgcacgattgcgaaaaagcgccgtaaattttttgcaaactcttgcattgtcgggaaaagtatggtacaataaaaaaaattgaaagagcgttcggcgactgacggattacatagatctctatggggaagccgaaattgcgtttcgtgtcgaccgtctgggcaaaaaacgaatgttttgctcgggctttttttattttacggagggaattatgaaacgtgaaatgggactcgcgcgctgcgggctcgcctgctgcctatgcgcgcaaaacgacgtgtgcggcggctgcggcgaaggggacgcgcccgaaaagtcctggtgcgaaaaccgccgttgcagcatcgaaaaaaatatcgcgcgctgcgccgactgcgaaacgctttgcaaaaagggaatgtttgaaaaggcgaaaccctacgctttcacgctgtttttaaagagatacggggaagaagaacttttaaattgtctggaaaggaacgaacaaaacggcatcgtctaccatcgtgacggcattatcggcgattacgacgggttcggtgacgcggaagcggtcattgcgtttataaagaccggcaaaagataaaaaagactattttcggaggtttttgatatgttgagcgatatcgagatcgcggagaactgtgccttgcgcgacatcgcggacgtggcggcggaactgggcatagcgccgcaaaatttagaatcatacggccgctttaaggcaaagatcggcggcgacttttccgcgcgcaaagccaaactcgttttggtgaccgccatcaatcccaccgcctcgggcgagggaaagaccaccgtttccatcggccttgccgacggtatgcgcaaactcggcaaaaaagtctgcctggcgctcagggaaccttcgctcggacccgtgttcggcattaagggcggcgcggcgggcggcggctacgcgcagatcgtgcccatggaggatatcaacctgcactttacgggtgatctgcacgccatcacggcggcgaacaatcttttgtgcgcggtattggacaatcatatcttccgcggcaacgaactggatatcgaccccgaaaaaatttatttccgccgctgtctggacatgaacgaccgcgccttgcgcaacgtgacggtggggcgcggcggcgagggcgtcgagcgggaagaacacttcgagatcaccgcggcgtgcgaggtgatggcgatcttatgcctcgcgacttcgctttccgatctgaaacgccgtctgggcaatatcatcgtcggcgaaaaccgcaggggcgaatatgtgtacgcgcgcgatttaaaagcggagggcgccatgtgcacgctcttgaaggacgcgatcaaacccaacctcgtgcagacgctcgaaggcacgcccgccatcgtgcacggcggaccgttcgcaaacatcgcgcacggctgcaacagcattcaggcgacctacgcggcgatgagtcttgccgactacgtcgtcaccgaggcgggattcggcgcggatctcggcgcggaaaaatttctcgataccaagtgccgcatcgcgggcatcgagcccgactgcgtggtagtggtcgccaccgtcaaggcgctcaaactgcacggcggcgcggacaaaacgacgctttccgaggaaaatctcgaagcgctggaagcgggcatgcccaacctcgtcaagcatatcgaaaatatcaagaacgtctataaaaagcccgtcgtggtcgcgatgaaccgctttgcgagcgatacgcaggcggagatcgaccttgtcatgcgcatgaccgaatacgcgggcgcgcaggcggtatttaccgacgtgtttttacagggcggcgaaggcggcaaagaacttgccgcggcagtcgtcaaggcggcgaaccagcccagccgcctcgcctattcgtacgaccttcgcgacggcgtcgtgaaaaagatcgacgatatcgtaaagaacgtctacggcggcgacggcgcggaattttccgaacttgccctccgtaagatagaggatatcgaaaagcgcggctataaagaactgcccgtcatcatcgcaaagacgcagtattctctttccgataacgcaaaacttttggcacgcccgcagggttttaccgtacacgtgcgcgacgtaatattaaagggcggcgcggaattcatcgtggcggtcgcgggcaatatcatgctgatgcccgggctcggcaaacatcccgccgcggaacgcatcgacatcgacgaggcgggcaagatcagcggcttgtcgtaaaaatcggctatgcggggaacgctttttgcattccccgcatatttttttaagaagagcgtaaattctccgcaaaaacttttgcaattatcgggtttttagagtaaaatagaggtgtaattctaaaatttacggcaataaatacggagaagaacttatgatcgaagcgacgaattttatcgaacagattatcaacgaggatatagacgcgggaaaagtcaccgcgatccagacgcgctttccccccgaacccaacggctatctgcatatcgggcacgccaagagcatgttcgtcaatttcgggatcgcccaaaaatacggcggcaaatgcaacctctttttcgacgacaccaacccgtccaaagaaaagacggaatttgtggacgccatccgcggcgatatccgctggatgggctacgaatgggcgaaagagtgctacgcttccgacttcttcgacgtcatctacgattgcgcggcgcgcctgatcaaagaaggcaaagcgttcgtctgcgacctttccgcggaagagatcaaaaatctgcgcggcacgttgaccgaaccgggcaaagagagcccgtaccgaaaccgttccgcggaggaaaatttgcgcctctttacggaaatgagagagggaaaatacgccgacggcgaaaaatgcctgcgagccaagatcgacatgagttcgcccaatctgaatatgcgcgatcccgtcatctaccgcatcctgcacgcgacgcatcaccgcacgggcgatgcgtggtgcgtctatcccatgtacgacttcgcgcaccccatctgcgactatctgcagggcgtcacgcattctctctgtaccctcgaattcgaagaccaccgcccgctgtacgactgggtgggcgtttccctcggattctcccccaagccccgccagatcgaatttgcgcggctgaacgtcaccaataccgtgatgagcaagcgctatctgaaaaaactggtggaggaaaacctcgtgcacggctgggacgacgcgcgtatgcctaccatcacgggccttcgcaaccgcggtatccccgccgaggcgatccgcgatttctgctcgcgcgtgggcgtcgcgaaagccaattccgagtgcgaatattcctatttcgaggcgtgcgtgcgcgaatatctcaacgccaacgccgagcgcgccatggcggtgttttcgcctttgaaactcacgatcaccaattacgagggatcggaagaagtggatttcgagatcaatcagaccaaagagggcgcgggcgtccgcaaagtaaaattttccaaaaatctctatatcgaaagttcggacttttcgctcgacccgccgcccaaatatttccgcctgaaaaaagagggctacgtgcgcctgaaaaacgcctatatcgtgcgctgcgacgacgttttgttggacgaaaacggcaacgcgaaggaagttttgtgcacgtatatccccgaaagccgcagcggcagcgatacgagcggcatcaaggtaaagggcgtcattcattgggtggatgcggaaacggcggcggacgtgaccgtgaaacagtatcagagccttttgcgcgatgcggactatgcgggacaggatttcaacgagcgtttcaacgcggagagcgaaaagatttttaccgccaaagcggagccctatctcgcggaggcaaaggagggaacgcctttccagttgatgcgtacgggatactataaaaagagcgaagaaaacggagcggcggtactctcggagatcgtttctctgaaggataattttaacaagaagtaggccgcgcgaattgaaaaatgcgattgacatttgagcggttagcagttataataagaatacagtaaaaaaatatttaagggtggtcatcgtgaaaatctgtaagaattgcggccgcgaatccgaggaagggaagatacggtgtcctttctgcggatacctgttcgaggatgaaatggacagcgtgctgcgggaaatgagtttaaatctgaatagttttaaagaggaacttacggcgcccaagccgcagcagacgggcataagcgcgcccgcgcagccttcggtttccgccgccgcgtccgcggatcccgtgctggcggctgcatatgccgtgcgcgagacgccgagtcccgccgcttatcccgcaaggatctcctatcccgcgccgcaaagcgcggcagagccggaagatctgaaactggaagtcgccaacctgaaagggcaactgaccgccatgcagggcgagttgggccgcctgagtatgcagcgcggcgtgcaaatgcagcaaaatcccgtttcgtatcaacctatacccgcgcccgcgcagcccgtgtatttcgcaaatacatacggttaccctgcgcccgttcccgccgaaggcgtctattcgcagatccccgaagcgaaagatcccgctgcgcccgcgtatgcgaacgcgggtaaagacaaagcggattccgcgcgcagcaagaggcgcatcgttctggcggtgtttacgaccctttttctggcggcgagcatcgcgtctttctttttgaattggatcaagttcgaagcgttcgaaggttttacgggtttcgaagcgataaaccacgtgttcgggatcaagggcggcgagccgtttgaagcgtatctgaatatcatccgcgcccacgaatttgcgggcagcgcgatgatcgcgaaactgtgtctgaatttttgcttttatgtcgtaaaatacggcgtcgtcgtatatgcggcgctgttggtattaagtttgcccatactgttcagtctgggcggacgcatccgtttcaaggcgtggcacgcgttttttgcatggacgtccgcgctcgcggctgtacttttgtttgcggttttctgctgggtaagcggcttttcggcgatgactttgtttttcctcggcggcgccgcggcgaacgtattgaggggattctttcttttgttctataaataaacggcgttttgtcgtttgcgagggtgtacatgagtatcattattgacgtaattttatgtttgcttgcggttctggtctttttcctcggataccgcaaaggttttttgcagaaggcatggtggctggtcgatctggtcgtcatcattctgttgttcatgatgctctctccgacgattttaaaatggatcgaagcgaataccgcgtggaaaaattctctcgttgactggattggttcgtttaccggcagcgtgccgcagatccagcccgagtcggtggcatactttattttaaaagcgggcatctgtctggctttggggatcgtggtcgtcattatcatgctgatcgtgaaattccttttgaaaaaactgatcactttgaaagttttcgagatcatcgacaagattctgggcggggtatattcggtcgcggtcatgacgctgatcctgttggtcataggcggcgttctgggtacgttcgtgaattttgcgcctatccaaagtctgagcgacactttttcgcagacatatatggcgaaatacctgttcggcgaaaacctgctgcaaggatttttcgacaaatacctgccgttcggcacctggatcgcgggtatcgtaaaataaaatcaaacagaaagcccccgacgcgtctgcgtcgggggctttttaggttcagtactttttgccgatcagataatcgagggaacagccgaaatatttggcgatttgaatgacgttttccagttttggctgtttgccttttctccattttgaaattgcggattcgccgaaactgcattctttggcgacggcgtaacaactgacgcggttctttttccgcaataaatcgaatttttcgagaaagggcagatcgttggcgtcgttgttcggtttcggggaatcggacaacccgaacagaaagtcgagcgaaacgcgcaaataattcgcaattttgttcgcgctttccgtatcgggataaccattatgttgcaaccaatttgcaacagattgtccgctcacgccgactgctttggaaaactgatatacggtggtgttttcctttatgataaagtcttcaatattttcattgaaaattataaagtgatccatatccaaatatctccctgaaataattattctacttcgggacagtattcgcataacgactaataatgggacagtaataatcaatattcaggagtttttatttatggatttgaaggatatgcatatgcgcgggctcttgcgttgcgggctttatcggtaaaaatttcctcgtttttgcgggtatttcgcgcaaatttcggcacatactgttttgcgtaaggaggatacaccatggagtttcaaaattcacagacatttatcaatcttgcccgttcctttgcgggggaaagtcaggcgggaatgcgctatcagttgatcgcaaaacaggcgaccgcagaaggctatgccgttttggcggataatattcgcaccattgcgaaaaacgaaacgtaccacgcgaaaacttttttcaatacgatccttcaaaatgcgggaagtatcgataacgtggatttacagaacgcaggttatccgtttcacttcggaactttggaagaaaatttaaaatttgctgccgaggacgaacgtgcggagtttgaagaaatttatgctgcgtttgcgaacgttgccaaagaagaaggttttcccgacgtggcggctatctacaatatggtcgtcggcgtcgaaaaggaacacaatattattttcaaatatttacacgaagcgttcaaaacgaatactctctataaatccgaaaaacccactctctggatctgcagcgaatgcggttatcgggtcacgagtaaagaagcctggcacatttgtcccttgtgtaaggcaagccaaggttacgttgagatacacttaccgtttgaaaaaaataatatttaaggagagaaaaaatgagaaacagtcagaattccaacgcgaaatctgcttccgagcagtctaaagcgaaggctacgtccggacaacagtccaaagcgaaagcgatgaacagcacgcagtctaaggaaacttcgaacacccagtccaaggcgaacagccagtccaaagcgaaagcgactgcgggccagagcagcgcaaaagcgcagcagtccggcgcgaagaacagcaagagcgcttcgaacaaatcgacgggagccaccaaatcttgcggaagataaaaaaccaaaagaaaagttccgaaatcatgcgttcaccgtatgacgtgaacggaagttatacaggcaaccctacgaacggcgaaaaaccgattcaggacgcggatgacctgtaaagaaaaggggaaggcaaatcgctttcccctttttttgttgacaaataccgctgcttttgttatgctctttttaaaaagagccaacaatttcggcgtttcgattgttgtatttacggaaggaatatgaaaaatgctaaattagagcggaagatagccgaactgcgcgcgggcgatcagcgcgcgttcgactacatatacgaacagacgaaccgctcggtctatttcgcaattttatacatcgtgcgcgacaagatgtacgccgaagatctgttgcaggaaacgttcgtgaaagccgtgcgttcactcgattcctatacgcccgacacgaattttcccgcgtggcttatgcgaatcggcaaaaatctcgcgctcaaccatatcaagagggcgtcccgcgagatctgcaccgatttcgataccgaatcgtaccgatacggttcaaaggagatggagatcccgttcgtcttcgaggcggcagcaaaaattttagccgaggacgaataccagatactcatgctctgtcaggttgcgggctacaagcgccgcgaagtatcggaaatgctgcgcctgcccgtcggcaccgtcacatggaaaaataacgaagcgctcaaaaaactcaaagcatttctcgtaaaggagggcggtttatgaaaaaagatttaaaaaaacttttatccgcgcaagcgcagaatatcctgcccgacgagcgcgtcaaagaaaacatcaagagcgaactgggctgctcggacggcgaacgcgcctatgcgcacggaggcacggaatccaaagggaaaaagaatattctggttatatccgtcgccgtcttgatggcgctgacgctctgcctctgcatactgctccccgtctttttgaagggcacagggacgcccgggggaggtgggaaattcaatcagatcgaaactacggaagatttttacgcgtacggcgccgcgtccgtcggctcgctgctttcggcgtcgtcggaaacgcggacgctgcgctcttacagaccgagcgatgaggaaatggaaacggtcgggcgttatatggcgttggtggaagggctgttgggcgacggaaatttcgaatacagcgagagcgcgtcatccgacggcgaatacgcatattcgatgacggtcagatatcgggaccttttgggcagagaaatttgctatgaaatgcgctatgatcgtttgttgtccgatcaaaaaggagaattcgccattgcgggcgtgcttctcgtcggacagaacgagtatcccgtagagggaagttatcaaatagagagcgaagacggagaaacggaaagcgaactttggttccgcgcttatacggacgatgccgggaagtcttatatcgaagtcatgcaggaatccgaggaagagacggaggacggcgagaccgagcgcgaacaaaagtacgtgtacgacgtttacgaaaatggtcgccgcgtcgagcgcacggtcgtggaatacgagagcgaagagggcgaactggaactgaaaatggtcgtacagaaccgggcaggcagggacgaacttcgcttcgaacaggaaaagaaaggcgaattgaaagtgcgcgggcagatgaacggcaaaaaaacggaattcaccgtgcagatccgcctgcgtgaggacggcacgacctattaccgttatatctttgaagacgcttccgacgatgaggaagaggacgaagattaaaaaaattaaaatatttttgaaaacttccaacaaatctcctttttgcattgttttataagagtaaaacgaaaaaatcaaaaaggagatttatgattatgaaaaaggcaatcctcacgttggcgatcgcagcggcgttgattctgacgctcgggctgagcgcctgcaaaacggacggaagacaggcggagggcggcaagttcgacgaactgacgaccgcccgcgaagtgtacgggttcagcgcggcatcggcgggcacgctcgtttccgccatgaacggcggcgcggcgcaggcttctttgaaagccatgtccgaagtgaccgatcaggaaaccgtcgacacgctcaatcggtacatgatgctggtcgaaagcatgctgggcgacggttcgttcggcatcgtcgcgggcgaatccgaccgcgcggaatacgccgtgaaagaaacggtcacgtaccgcgacctgttgggcacccccgtcgaatacgttttgtattacaacgaaacggatgtgacggacgaagacaaagacgcgcacgaaacggaaatcgaaaaggatttcgatatcgagggcgtgatggtcatcgacggcgcggattatgcgatcaagggcgagaaagaaacggagagcgaagagggggaaagcgagagcgaatgtaaattcacggtaacgctcaacgaaaccaaacgtcttgtcgtcaaacaggaaacggagaccgaggaaggcgaaacggagaccgaattcgtgtattccacatacgaaaacggcgaacagaccgagagaagtacgttcaaatacgagaaagaagacggcgagaccgaacttgaattcactctcttgaaagacggaaatatgcagatattcgcttttgaggaagagaacggcgccatcgaagtcaaaatcggcggcaagggcggggcgaaaaaatacaccgtgcgcatcgtcgaggacgaaaacggttcgtattacgaatatgaaagcgcgaacggcaagatcgacaaagaccgcgactgagcggtataaaaggaaagcggaaacgcttttctttttttgtaaaacagaagaacagcacgccttgcgacgtgctgttctcctaaaacaaatgagaaaaaatatgggtagtgagtgtaatctgattgagtggttcggaaaacaaataaggcttgcggagcaagccgtttgttttgaacaaactttgttttctttacacatatagtataaccgatggcatttgaaaagtcaagtttttttaagcgattttttccgcgtcgggaaaaatgacgaacgttctgcgatttgcttgccaaatcggcgcgtatcgggtaaaataaataggagagttgtcgaatcatgcgggcggctcttttcaaaaggagtgaaagtccatgtttcatgtcgttttggtggaacccgaaattccgcagaacacgggcaacatcgtgcggacctgcgccgctacgggctgcaaactgcatctcgtccggccgttcggttttgaaatatccgataaatatttaaagcgggcgggtctggattactggcatctcgtagatatttcctattacgactgcatcgaagagttgttcgatcaataccccgcctcccgcttctggtttttctcgacgaaagcaaagaaaacgcacagcgacgcaagttaccgcgaaggcgatttcctcgttttcggaaaggagacgcgcgggcttcccgaagagttgctgaaagagcgctacgacgaggctgtgcgcattcccatgatcggggaggcgcgctctctgaatctttccaattcggtcgccgtcgccgtgtacgaggcgtggcggcaggtcgggtttacggcatcggaaaagcaggggcatctgcaccgcctttctttggacgattgaatacgtattttatacgacagggataaaggcgaatggtactgacgataatcacacagttgttacttgttataggcggcatcaccgtattcatgatcgggatgaaaacgatgggttccaatctcgaacgcgcggcgggttcgagcatgcgcaccatgctcgccaaggtctccaacaaccgctttgcgggcgtggggatcggcgcggcggtcaccgccatcatcaacagttcttccgcaaccacggtcatgatcgtagggttcgtgaacgtcgggctgatgagcctgacgcaggcgggcgccatcatcatgggcgccaacatcggcactaccatttccgcgcagatcatgtcgttgcagagcataaacatcaacatggcggcggtcttttccgccgtcgccgccacgggactcgtgatcaatatgacgggaaaaagcggccgttccaaacagatcggcaatattctgatcggtatcggttttatctttatcggcttacagttcatgagtgacgccgtgaaagtgctcaccgccgacgaggtcatcgcgcccaaactcgacgcgctgtttttatccatcggcaatccgttcctgctctttctcatcggcgtggtgcttacggggctcttgcagagttccgcggcgatcacgggtattttgatcgcgcttgcgggcagcgggcttattacgatagaacaggccatgttcatcaccatgggcagcaatatcggtacctgcgcgacgtcgctgatcgccagtatgggaacaagcaccaacgcgagaagggcagctgtcatccatcttttattcaacgtattgggctgcgccgttttcttcattttgatgctggcgttccaaaaatacgtcgtcgagggcattattttcgtgagcggcgggagcgtcgaacgtcagatcgcgaactttcatacgctgttcaatcttctgaccacgctggttctgctcccgtttttgaaaccgctcgtcaaattggcgcaagtcatcgtgcctgagcgcaaaaaaatgcagaaacagggcgatttcaaatatctcgacgagcgtattttgcagacgcccgccatcgcggtggcgcagttgagaaaggagatcgtcattatgatggatctttcttatctcaatttccgccgcgcgatgaagatgatctgcgggggcgatctttccgaaagggatgagagcgccgaaacggaaaagcgtatcaaccaatacaataccgaactcaccgcctattgcgtgcgcgtatcgtcgtgcgaattgtccgcgcacgacgagttcgtcatcggttcctattatcacgtgatcagcgacagcgagcgtatcggcgactacgcaaaacatatcgtggagtatgccgaagaactgggcggcgacgaggacgcctttaccgccgctgccgtcgaagagatcaaggatctttacgagaagatcgacgaactctaccaaatggtgcgcaagaccttcgacgagcgcgacatcaccatgttcgaaaagataaacgatctgaaagtttccatcgcgattttgaaaaacgccgactgcgacgcgcatatcgagcggctcaaccgcggcgaatgcacgcccgcccgcggcgccatcttcctgcaacttttgggcaatatggaacgcgtttccgggcacatgaagaatatttccaattccgtcatgaagagcagcgcccgctatcagaaattattgaaaacgcagggctcggcggaaaacgccgacgcttccgtcacacagtgaatccaccgcgccgcagggcgcggttttattcttttcatgcggcgtattttattgacaaaaatgcaaaaaaaaggtatcatgatagacggaaaacaaaatcaaggagatagcacaatgaacaaaaagtctgttaccgacgtagacgtaaaaggcaaaagagttctcgtccgctgcgatttcaacgttcccatgaaggacggaaagatcaccgacgaaaaccgtattatcggcgcgctgcccacggtcaaatatctgatggagcacggcgcgaaagtggttctttgctcgcacatgggcaagccgcacaatatcttcaacgattgcgtcaaactcaacaagaaagagaaaaaggcggtggaggccctccccgaagcggagcgcgccgccgcgaccgccgaatatatcgaaaaggcgaagaagaacgacgccgtcaaactgacgctcagacctgtcgccgcgcgcctcaacgaacttctggacggtaaggtcgcttttgcggcggacgtcgtcggacccgatgccgaggcgaaagtcaaggcgctcaaagagggcgagtgcgtgcttttggaaaatctgcgtttttacgcggaagaagaggggaaagaccttgaattctgcaaaaaactcgcgtcctactgcgatatttacgtgaacgacgcgttcgggactgcgcatcgctcgcacgcttcgaccgcagccatcgtcgaatacggtctggtcaagaccgcggtctgcggcttcctcatcgaaaaggaactcaccgtcatggcggacagcctggaacaccccgtgcgccccttcgtagcgatcttaggcggcgcgaaagtggcggataaactcaacgtcatctccaatcttctgaataaatgcgatacgctcatcatcggcggcggcatggcgtacactttcctcaaagcgcagggctacgaggtcggtaaatctctggtggacgacgaaaaactcggctactgcaaggatatgatcgaaaaggcgaaagaaacgggcaagaggctcgtccttcccgtggactgcgtgatcgccgcgtctttccccaatcccatcgacgcgcccatcgaagtcaaaacggtgaaagtgagcgagatccccgcggatatggaagggcttgacatcggcgaagagtcctccaaactgtttgcggacatcgtcaaggacgccaagacggtcatctggaacggccccatgggcgtgttcgaaaatcccgtgctcgccaaaggcacgatcgcggtcgcgaaggcgttggcggcggcgaaggacgccacgaccatcatcggcggcggagacagcgcggctgcggtgcagcaactcggatttgccgatcagatgacgcacatttccacgggcggcggcgcttctctggaactgttcgaaggcaaagttcttcccggaattgcctgcctgaacgataaataatcaaagtgaacgggggcaggcggattgcctgccccgaaatttattcgtgaaataggggctgccatgaccgaaaaaaacgattcgctgctatataagatcacgcaccgcgtgattttgcccgtatatctgtttctttcgctgggcagcatcttcacgatcgccgtcaccatgtcgatcgacgaagaaaagtatacgtatcttacgatcgggctgaccgcgctctttttcgttgcgacggcggcatttttgatttgtctccgcccgctcaggaaacggcaggcgcgcctcgatttacgggagagcggtttattgcagcctgtttccgtacgagagcggtacgagtttacagccaaacgcagcggcgccgatcttccgagattggtcgagcaaaaaacgcggtgctggaattattcgccgacggtgcaaatcgtaatgactgccgagggcgtcgagatcgagggccgttttccgtatcggaaggacggattgtacgacgttcattacttttggcgggatacccgcatctggttgcagagttattcccggcgcatgcgcgcagcgttgcgtctgtatatctcgtttacggacgataaaaacctgtttttatatctgcccgtcgacgcggagaccgtcggaatgatcgaaagttttcatttgacggtgcagaaccgcgggctttacgactttttgctattgcggcccgaagaggcgttttatcagatcattacttacggaacgattaaaaaaaccgataaatttttgaaggagaagaaataatgcgcaaacctatcattgcaggaaactggaagatgaacaacaccgcggcggagggcgtcaaactcatcgaggcgctcaaaggcctcgtcaaagacgcgaactgcgacgtggtcgcctgcgttccctttaccgacattcccgccgtcagcgaggctgtgaaaggcaccaacattcacctcggcgcacagaacgtgcactttgcggaaaaaggcgccttcacgggcgagatctccgcttccatgctcaaagagtacggcgtggaatacgtcatcatcggacacagcgaacgccgtcagtatttcggcgaaacggatgaaacggtcaacaagagaatgcacgcggcgctcgcggtggggctcgtgcccatcgtgtgcgtgggcgaaagtctcgaagagcgcgagacgggcaagaccgaacaggttttgaaagtgcaggtcgaagaggggctgaaagggctggacgacgtttccaaaatcgtcatcgcgtacgaacccatctgggcgatcggcacgggcaagacggcgaccgcagaacaggcgaacgagaccatcggctttatccgcaaaacgtgcggcgaagtgttctgccccaaatgcgcggaaaaagtgcgtatacagtacggcggctccatgaacgccaaaaactgcaaggaactgatggcgatgcccgagatcgacggcggactcatcggcggcgcttccctcaaagcggaagacttttcgatcatcgtaaacttcgacaaataatgaaaaggcccgacgaacgtcgggctttttttcgcgtttaaaaaatttgacggggcgccgccgcaaacttgccaaaaagcgcgctttgcggtataatgatagggaaagaaagtttatagaggtaaaaaaatgaaaaaaccttatgcgatcatcatcatggacggctacggactcagcggcgaaaaaaacggcaacgccatcgccatggagggcagccccaacgttgaaaaatatcggcgcgaatatccctcgggcgaactcggcgcgagcggaatgagcgtcggtctcccggacgggcagatgggcaattccgaagtggggcacctcaacatgggcgcggggcgcatcgtctatcaggaactgaccaagatcaccaaagagatcggggacggcggctttttcaaaaacgaagcgctgctcggcgcgatggaaaacgcaaagaaaaatcataaaaaactgcacgtctggggacttttgtccgacggcggcgtgcacagccacaacacgcacctgtacgctcttttgaagatgtgcaaggaaaacgggctggacaatgcctacgtgcattgctttatggacggcagggacgtttcccccacgtccggctcgggctttttgcgtgatctgcaggcggaaatggacaaactcgcgttcggtgagatcgcctcggtctgcggccgctattatgcgatggaccgcgacaaccgctgggagcgcgtggcgaaagcctacgatatgctcaccctcggcaacggcatccacgcggagtacgcggcggacgcggtggaggcgagttataaaaacgaggtgacggacgaatttattctccccaccaacgttgtcaggggcggcaggcccgtggcgctcgtggaagagggcgacagcatcatattctttaatttccgccccgaccgcgcaagggagatcacccgcgccttctcgcaggaagattttaatggtttcgagcgcaagacgggctatctgaaaccgtattacgtgtgctttacgcaatacgacgcgacgttcaaagacgtgcgcgtcgcgttcaaaccgcagagcctcgacaacacgctcggcgaatatctctcgaaaaagggcctgacgcaactgcgcatcgcggaaacggaaaaatacgcgcacgtcacttttttcttcaacggcggcgtggaggcgcccaacgcgggcgaggagcgcgcgctcgttccttcccccaaggtggcgacctacgatctgcagcccgaaatgagcgctttcgaagtgacggatcgggcgataaaagaactttcctcggggaaattcgacgtgatgatcctcaactttgccaactgcgacatggtagggcacacgggcgtgatttccgcagcggaaaaggcggtggaaacggtggatatctgcgtggacaaagtattgcgtcagattttgaaaatgggcggcggagcgctgctcaccgccgatcacggcaacgcggacaaaatgatcgcggaggacggctcgccgtttaccgcgcacacgaccaaccccgttcccgtagtcttggtgtgcgacaggctgaaagataagaaactgcgcgaaggcggcgtgcttgccgatctcgcgcccacctttctggatatgatgggactggaaaaacccgccgaaatgacgggcaagacccttattatgtaatatgcgcgcagaacttttggaatttttgcgcgaaacgccccttttggactattccgcaaaacccatcgaaaaactcatcgaaaaccgcgggtggaaaatgctcgacgagtttcagcgcatccgtgagatctatgatttcgtacgcaacgagatcctgttcggttataacgtccgcgacgatcttcccgcgtcccgcgtgctttcggacgggtacggccaatgcaatacaaagggcaccctgtttatggcgctgctgcgcgccgacgggattccctgccgtctgcacgggtttaccatcgacaagaaattgcagaagggcgccatgacggggattgtctacgaaaaggcgccccgcgagatcttgcacagttgggtggaggtctgtttcggcggcaaatggacggagttggaagcgttcatcctcgatgaaaaatacctcggcagcctgcaaaagaaattccccgacgcgggagcgttctgcggctacggcgcggcggtgaaagatcttcaaaaccccgccgtcgaatgggcgggcgagggcacctatatccagagcgaagggatcgtgcgcgatctggggatctattcttccccggacgagttttatcgtgcgcacgggcaggatctgtcgggcgcggcggcgtttttttaccggcatgtcggcaggcgtctgatgaacgccaacgtaaagaggatccgacggcgcggataagatacgatttacgccatttttttccgaaaaatttcggaacggctgtaaaaagagttgataaataccgcggagtatggtataatatccaagcatttaatgtaaagaaaaactttggagtgatatacggatgtcgaaaatgatgtcgatgatgggttatctgcttgcgcctttggcaaacgatagcgtctataccttatacagaataatttgtcttgttttattgcttttaatgctcgtctgcgcggtgttcgcggtggttgtgatcttgttccagccgggcaactccacgggaatcgacgcattgggcggttccagcgaaacgtttttcggcaaaaataagtccaaatctttcgagagcaaaatgaagaaatggacagtcatctccctgatcgcgctcgcggtcatggcgatcgtcttctttatcttgcagttggacggcatttggggcgtttaggatcaaaaaaacgacaggacggctattttgtgtaagtagccgtcttttttattggcattttcaggagaatttatgaccgctgcacagcagatagaagaaaaattcgcttcgggcgaattcacatacaagacggcgcgcgagatcgcgcggcttttgggcgtcacgcaaaagagcgagcgtgaggcggtaaaccgcgtccttcgttctctcgaagaggagggcgcgatcgtccgcgacgagaaaaaccgctacgttctgcccgcggcgctcggactgtacaaaggcgtgctgcgcggcaacgagcgcggctttgcctttctggtgcgcgaagagggcgatctgttcattccgcaccgctccctgcacggcgccatgcacggcgacaccgtgttcgcccgctgcgtgggcggcgagcgcggggacgagggagaagtttacagcattgtaagccgcggctattccgagatcgtgggtacctatttcaaggaaaagaagggcgggtacgtacagcccgacgagcggcgtttttttaacgacgtgcgcgtggcgggctcgaaagtgcgcgcgtacagcggcgaaaaggttctgatcaaaattctgaattatcccgagggcggcgaacccgtgggcgaaattaccgaggttttggggcaaagcggcgatctttcctgcgaggaggacgccatcatccgttcgaaaaatttggcggaagaattcccccataaagtgctcgccgaggcaaagcgcgtttccgcggaaaaggtcgaagtcggcgggcggcgggatttccgcgaccgcctgatcatcaccatcgacggcgacgattcgcgcgatttcgacgacgcggtggaagtctggcgcgaagggaaatactatcgcctcggcgtgcatatcgcggacgtcacgcactacgtcagccgcggccgtgcgctggataccgaggcttacaagcgcggcacgagcgtctatttccccgacagggtgctccccatgctgcccgaggaactttccaacggcatctgttctttgaacgagggggaagaccgctgcacgctctcttgtctgatgaagatcgacgaaaagggcaaagtcaaagacagcgagatcgtgacgggcgtgatccgctcttccgcgcgcatgacttataaaaacgtggcggcaattttggaaggcgatcgggaactgtcggaaaaatatgaatttctgctccccatgctcgaagaaatgcggcaactcgccgagatcctcatgaaaaagcgcaaatcgcgcggcagtatcgacctcgacgtgaaagaggctgccgtcacggtgcaggacggcgccgtttcggtgaaagagtacgagcgcacggtcgcgcataagatcatcgaagaatttatgatcctcgcaaacgaaaccgtggcggaatttatggaacggttcgaaatgcctttcatctaccgcgtgcacgaaaagccgagcgaggaaaaggcggaatctttcaaggcgtacctttccgaactgggcgtcaaagcgaattttcacgccgacaacgtccgcccgggcgaatacggcaaaattctggataaactggaaggcggtccgctctttcacgtggtcaaccgcgtgatgctgcgttccatgtccaaggcgcggtacagcgccgaaaacagcgggcatttcgggttggcttcctcttgttactgccattttacttcgcccatacgccgctatcccgacctgttggtgcacaggctcgtcaaaatggtcttggacgggcgcgcggcggaggcggcggataccttttcgcggttcgtgtacggcgcggcgctttcctgttcggagagcgaaaggcgggcggacgaggccgagcgcgacgtggacgaactatataagacctggtatatgcgcgaacatctcggcgaaaccttttccgccgtcgtttcgggcgtgacctcgttcggggtgttcgcggaacttcccaacaccatcgaggggcttatccgcatcgaaaatctgcccaaggacgattacgtgttcgtggaacagcgctttttgctcagagggctttcccattcctttaaaatcggcgatcccattcagatcaaagttgccgccgcggatatcgggacgcgcaaatgcgaatttgttcttgccgacgagaactgaacgtgctataatagagagtgtatcatgaaaatcatatccgttaataaatcggcgtccttcgagtatttcatcgaggacaggtatgaggcgggcgtcgttctggaaggcagcgaggtcaagtcgctgcgcaaaaacaactgcaatttatccgattcgttctgctttatcaggaacggggaagtgctgttaaagaatatgcacatcgccgtgtacgacaagagcggcgcgttcaacacgcgcgaatcgcggcgcgaccgaaaacttttgctgcacaaggaagagatcgccaaaatttccggcaaagtcaacgaaaagggctatacgctcgtgccgctgaaaatttatttttcgcaggcgctcgtcaaggtggaagtggggctttgccgcggcaagcacacgtttgataagaaaaaatcgttgcaggaaaaggatctcgtccgcgaaaaagagcggcaaatcaaagaatatctgaaataattttttacgcgaggtaaaatttatgagttataaaatcgatacgctctgcgtgcagagcggttacaagccgaaaacgggcgaatcgcgcatcccgcccgtcgtacagagcacgacctacgtttacgaaaagacgcaggatatggcggatctgttcgatttgaagagcgacggctatttttatacccgccttgccaatcccaccgtggcggcgttcgagggaaaagtggcggctttggaaggtggcgtcgccgccatcggctgcgcctcgggcatgtccgcgaccacgctcgcggcattcaccgtatgcggcgcgggcgacaacatcgtttcgtcctccgcgatctacggcggcactttcaacctctttgccgtcacgctgcccaaactcggcatcgaatgccgctttttcgacgtggacgcgcccgccgaagagatcgaaaaactcatcgacgataagacgaaaatgattttcgccgaaacggtcgccaatccatccatcaaggtgctcgatttcgggaaaattgcgggaatcgccgaaaaatacggcgttttgttctttgtggacaacacgctcgccacgcccgcgctctgccgtcctttcgaattcggcgcgaatatcgtgatccattcctcttccaagtatctcgacgggcacgcggcggcgctcggcggcgtcatcgtggacggcgggaatttcggttttaagggaaatccccgctacgtttcgttcaacgaacccgacgagagttatcacggtctggtctacgccgatctgcccgcggcaccctttgcgaacaaatgccgcgcccagttggtgcgcgacatgggtgcgatcatgagcccgcagaatgcgtttatcagttttttgggctgcgacacgctggcgctgcgcatggagcgccattcgtcgaacgcggcaaaagttgcgaaattcctttccgaaagcgacaagatcgactgggtgctgcatccctcgctggaaaataacaaataccatgcgctcgcgcggaaatatctgccggacgggcaggggggcatgctgagtttcggcgtcaaaggcaacgtgaaggatgccgcgaaatttatggaagcgctcagactggtcacgcaggaaacgcacgtggcggataccagaagttgcgttttgcaccccgcctcgaccacgcacaggcaactttccaaagaggaactcgccgcggctggcgttcccgaaaatctcatccgtctgtccgtcggaatcgaaaatcccgacgacatcatcgaagatctgaaacaggctctgcaaaaaatttaaacaaaggaggccgcataaacatgcctatcgtcattccgcaggatatccccgcttattcagctctgatacgtgaaaatattttcgtcatgcacgacgaacgcgcgttcaagcaggatatccgtcctcttgaaatcgctattctgaatctcatgcccacgaaagtggaaacggaaacgcagtttatgcgccttttgtccaattcgcctttgcaggtcaacgtcacgctcctgtacaccgatacctataagagtaaaaataccgccgcggcacatctcgaccgcttttacaaaaaattcgacgacatccgaaacaaacatttcgacggcatgatcgtcacgggcgcgcccgtggaaacgctgccgttcgaagaagttctttattgggaagagttgaaacaaattttcgatttcgccgacaaaaacgtgacgagcaccattttcatctgctggggcgcgcaggcggcgctgtatcattattacggcatcgacaaggaactgctgcccgaaaaactgttcgggatctttccgcacaaaaaagttttggaacagcacgatccgctcttgaagggcatagacgacgtgttttatatcccgcattcccgccacaccaccgtggatatcgaaaaggtgagaaaggagaaggatctcgttattttaagcgaatcggaaaatacggggctgtccatcgcgaaatccagagataataaaaagatcttccttacggggcacatggaatacgaccgcgacacgctcaaaaacgaatatgagcgcgatttgaaacgcggcctgcctatcaagccgcccgtcaattatttcgcggatatagagcgccgcaaggtcaacgtcacctggacgagcgcagccaacttattctataccaactggctcaactactacgtctatcaggtcacgccctttcaattttaaaaagttgcatttttcacggaaacgtagtataatagtattgtaaagaagcggcggtttcgccgcgccatggggatgaactggtttcgattgcttgtggcgttcattgtaagcataccgaaggattcggcttcgttaaaacgatacctttaaatttaaacgcagacaataatcgtctcgcttacgctgcttaattagcgtatgttctccgcttgtttcctgtcggcaggcggcgggcatcattttcagacagggaacggctgtacgcgttttgaccgtgacgcgtgcgctgtattcagcggtccacggccgcgcgcgtctgtttgcctttcacgcgcggcaagggtcaaagacaaactaagtatgtagaaagcgtgaataaaacaggtaagacgcgggttcaaatcccgccatctccaccacgtttaacctaaattgaacatctcaaaaaggtgtttggtttaggttttttcttttgccgcggaaagccgtttaatcgcgtttaaggctcgaaatcggcaatttacggcgcacaatgctttcggtcgagtaaatctccgtaacggtgagcggcggcggtttatgccgcgaaaggctcttgacgcgagtcggagcgtgttaggctgtttccgccgaaggcaaaccaaaaccccgtaccctgtttagggtgcggggttgcatggtttcgcccgtatttgccctcaaacacgctccgagagaggctcgcgtcaagagcaccgtggaataaatagccgccgcttatacggtcaagatcactcgtatcgcgcgcattgcgggtgtaggtttattctgtatgatataaggcatgaaagcaatttcatcgtaaaaagaaaagccctgactgtttccgtcggggcttgtttgtatagggctattatagtaaactatcattttgtcgttatacaatacgatttgctttataagcaggtttatcagcatttgcggctctttcagtaaagcctgttcgtaatatttccgtatcttatcttcggatagggttatctttgttttgctctgttctatcaatatatttctttcgagttccgtgagtttgttttcgagttcgtgcaaacgcttatttgtcgtagcggagataataccctgttcgatagcggacatcaagttgttcaatgccgtttccgtctgacgcttttccgaaagcaatgttttgagtatcgggctttctttgttctgcatttcctgtatctgcataagccgtcaacgaccttgttcattgtatcgggcttggagagttcgcgcaggatagtttcaagtacaaagttttccaaaaactctttgcgtaatgccgttttttcacaaccgttgcgatacttttttctgccgtggcatttgtagtagtgtatcacttcaccgttcgaggaagtaccgctttccgcgcttatcgggtgtccgcaatatccgcatttcagtttatggcgcaataggtatgttacctgtacgctccttttgccgtacttgttcttttgtacttttgctcgtactttatcgaaaatttcaatcggtacgatttgcggatagatattgtcgtattcttcgcctttattgcggtaaatgccgagatacttttcatttttcagtatatggtacacggtattgggcgcaaacggttttccgttatggtaaactccgcgttccgtcaaggctttgatgatggtcggcacgtacacgccgagggcatattgcgaaaatatgtaacggacaatatcggctttgtcgcaatcttctacgattttgcgggcaaccactttgtacccgtaaggcacgcccccgccgcaataaaagcctttcttacggctctcgttcaatccgcgcaatatcttttgggagagttcttcggaataatattcggcaagcccgatatacatattttcaagtaaaataccgtcaaggtttttggtgccgtctatattttccgaggtgcgttgcgtagcggaaataagcgttttacggttctttttcaagcgttgtttattgacggctatctcaatggaatttctgccgaaacggtcgattgcatatacaagcacgatttcccacgttacgggcttttcgctgtcggacaataacttttgaaatgcggcgtgttggtcgttcttgcctgtcatggcgcggtcgatataggtatcgacgatttgtaaatcgttgtcttgtgcatactttttgcaaacgtctaattgcccttcgatagactgctcggtctggcttgcgctggaatagcgtgcatagataactgctgatttcatgatacataactccttagaattgttttttgtctttcgacggaaacggacgaaacggaaacgcaaagtctttcccttatctgtccgtgtgttgtctttccgtcaagggttgccgcaggcaatgtattttacccttgacggaaagggcgttttcgtttacgctccgacggacgaaagacaaaaaggattgttttccatttcttctttgctcaattcttttatttctgccaataccgcggagaaaaaggcatttgtttcgcaatctgataaaggcgctatatacaagtcattccccgcgatataagttaaatcctgtcgtttcatattctttccctgtccgtaaaatctttatggacagattatatcaaaaacgaattcaaattggtacggactgttcccgtacaaaaaccattatcaatcggattgttttcattaaatatcgttttttttcgtactcttcccgcagatatacggttggggaaaagagaaaagccctcggacaaaattccgagggctttcaaaagacttttattcctttacttgtataaaagacaagcgcacgtattactgccatttgcgaaaaaaaaggggggaacagcagaataaaaaagtatgcgcgacggtatgcgcgggagtgaccgccgagcggtttagcggcgccaccccgcgccgccgcgctttttttgtgcgttccgctgttgcgttgttgctttgtttggggcgcgtgcttgtcttcggcgcccgcgagcgcagcgag

SEQ ID NO: 2555 - DNA, 21529 bp, Unknown
  16S sequences of unknown bacteria
cttgaagccttctgaaaaaatattttagttttttctgcttttactcttgacttttgcgcggaacaggcatggaaactttgttccttgatgcgcaaagaaaggaagaaacgatggaagccaacgctctggcaaatggacaggggatcgacccccaaaggctgcgccccggggattatttcgcttcgctgacggaggaagcccttgcctgcgggctgctgacagaggatgaccttgcccgtctgcaggcacagctgccggggctgctgcgccgcatggccgccgaatatgccggggagggctgcggctccctgccggtggagaccgccggggaaatgctgcgttccctgcaatttgtccttggcgtggcgctgaagggctatgccgccccggaacaggccgcgatagcgctgaaggaacggccattgaacgaactgtacgacgaagggctttgccgggtgcgtcaaaagctgcggacggtgcggcttttgcagcggaggatcctgagccgattgtttcagaccccgaacggattctggcgttccaccatcgaaagcggggtcaacggattctttcggctgtaccggccggagtttgccgcccatgagatccatatcacagcggattatccgcctctgctgggtcggcccgccttgcagggcgtggaatttatggagcgctatctgcaggagatcgacggagaaaacgcctttctgcgcacctttcctccccgggcggtacaccggctgctgctgggcctgagccgggaatacgccagcgcgccggtgaacctgttcgagccggtctgcctgtcggcgctggggctgacgctgtgcggacgctctccgctggcattggacttaacgcccgacgaggtggaaaagctggcccgagatttcgaaaacagaacgatgatccgtccggcgctggaaaatgcgctgaaccgtctgggggagcagctggcgctgccgggccgggcgctgcgctatgccgcccaatgtctgcccaagctggaggaaaccgtccgtgccgcactggagctgggaaagccggaacgggcgtttctgctgcccgccgatgaaaatgtcccagagccggagctgttctacggcgaaagcatggacagtcgggattatgagcgcctgttggcacggctggttcaggcagattccccggaggagcaggcggcgctgatcggggaaaacgtccattcgctggccgacttgctggacctgctcaccgatctggacgcgggagacgatgcgctcgtcgcattggtgaagtgtctgccgccagatgcgctggcggggcttcggacccattacgccgacggcctgctggccgaacgggaggctgaccggcggctgtgccgcgcgttggacggaaaatagccttatgccttttcgggaatcagctattccttggctttttccacatccgattcaaagcggacggccatgccgaagggggccaaccgtcgggaaagctcccggcggactttactgtccgccccctggcaaaaacgccccagtccgtccaaatgctcgaaccagatcatcccgctgcgatagggcagggcaaaggactttttgcggaacccgggcagctcccggccagatgactccatggctttctctggcttcattttgtttcctcccatgcttttctttattattctcaatgattaatcaaaaacgctgaaaaaaagcgagttctttccttcggtgacaaaggccacgcatagcgagattcagttcatacgccgtctgccggaaggaaactgtggcaaaatcccaatatcatccgcagaaatggctcatttgtccattcttttcgcggcagtatcgagataagcccccaacaacattcatccatcaccatttccactcccgccccacttaccctggatgcgccccgcaagtccagagggggcgcggcgtcaccccggttgcatcgaaaggcgggggacgatataatagaagttgtccgcacgcaactttggcgggccagtccacatcgggaggttttttaggacgatggaggaagaaagaaaaaacgcggccggtgagcaggccgaggaaataacccaaacggtggaaaatcaacggaaggccgaggcaaaagcccggcggaaaaacgaaaaaaaggctgcgaaggctgcacgaaagctggaaaaggaacaggcgcgccgggaacgcactgcccgaaagcaggccgaaaaaaccgcacgcacccctcatttgcgggaaaaggcgctgtttgagctttggatgggtggctttgaaaaggagcatcaagcccttctgcgggaatattttgacgggctgaacgcccacctgtcgctggcacgggacgaggtcattcagtttcgccgggacttcaccgccgccatcgatctgctgctgcagctgggctgtccgctggaggaagccctgacccgtctgaacccggaacggctgggcggcttttacgcatggcccgccacgctgtggttccggctggatgacgcggcgaaaatttatcccctgtccatgaagcacgggcagatgtctgtgttccggctggcggcggttctgaaggagccggtgaagccggagcttctgcagatcgccctgcatttcaccatccagcgctttcccggctttgccaccaccgtgcgcaagggctttttctggcattatctggatcagaccaaacggcgctactgcatccagccggagacggatattcccgtccgcccactgaaaatcgccgccagcggctcccagagcttccgggtgctgtattatgaaaaccgtatcagcgcggagtttttccacattttgaccgacgctaccgggggcatgtgcttcctcaagaccctgctggcggaatatctgcggctactgggcacggactgcccctgcggcgacggcattctggacgtgacccggccgccgctggccggggaaaacgaaaacgctttcccggcggcagatcgccggggcaagggctccggcctgaccgaccgggcggccctgcagctcagcggccggctggccccggtgcacccctgtcgcatcctgcacttcgaaatggacgcggaaaagctgcgggaggctgcccgcaaccggaacgccaccgtcacggcctatctgctggggcttctgtttttggcgggacggcgggccacggaggccatgggcggcagcttcaacattcaggtgcccgtcaatatgcgcaagttctatccctcgcccacgctgcgcaatttttccatgtactgcggcattcgactggatatggagcaggtgaccacactggacgacattctgccggaaattcagcatcagctgacggagaaagcctcccgggaggccatgaccgagatgatccattcctccacccggctggtgaactcggtgcgctttgtgccgctgttcatcaaggcccccatcgcccgggtgatctacggctttctgggggataaaattttcaccaacaccctgtccaatctgggtgtggtgaacctgcccccggagatgcagagccgggtggatcatctggaatttttgctgggcacgctggtgacgaatcgtgcgggctgtgcgctggtgacctgcggcggcaaggccgtgctgaccatcgccaagcagaccgccgacccctcgctggaagaagcactgtgccgcctgctggacggcgatcaggtgccctatgccgtgaaaggaagcgttctgtatgaaggttgagtgcgtctatcccatcccccccaagcgccgcatccagcggcatcagctgatctgcgcggcccgctggccctttctggcggcggcggtggcctgcccggtggtgaacctgtgcctgggcggcagcgcgtggagtctggtggccctgtgggggctgtggatgctttggggcgatctggtggccccgacaatggtggaatacaaccgggtcagccagttcaccaaggtactggcccagtgctgcggccttcttttgctgatcgacctgatccttgccccgggccgcattcggaacctcctgcccatcgtgtgctttgccgggctgaccgtggccgccgtgctgtttttcaccgatttcagccggcagaagcagaacatcatcccactgatgctgttgtgtctggtggcgttcctgtcggcgggcgtatgcctgctggtgcccggcgtggaaagccagtgggggctgatcgtactggcggccctgtccttcggactgttcgtggtctgcgccgtctgtctgggcggcgggtttttccgcgggctgcataagtattttcatgtgaagtaaaaaaagttccctcgattccgcagcgcccaatttgcttcggaaccggggaattttctttacagctctgttttctggccgacggcatatccttgatcgtacacccgctgcagcaccgccgggtctcgttccaaccggcccatttcgatggggcggcggggacggatgaccttggcgacgccgtcctgctccagctggcgcagacggtcgagactttgattgtaggcctcgtgacggcagcggagccgctgctgcagggcaggatattttccgtaccacaggtcgataggcagggagggcatgggccccttgcggtaggaaccgtcccgggtcaggacgactaccagccggtcgtagcccagcgcccgcatggcctcaaaggggatgctgtccacgatgccgccgtccagatacaatccgtccccaaccgccacgggcttggaaacaaagggcagagacgcagaggcccgcagcgtgtccatctgctcaaacacgttttcgatcaggggatattccgcatggccggtctcgatgttggtcaccacagcgtaaaagggtacccccgaggcctgaaagctctgctgatcaaagggatccagctccgtgggcaccgtgccgtaggcaaagtccgggctgaacagattgccggtccttaaaagcgggccggggcccatgtagcgggggtcgcggataaagcgcttgttgtagcggatgacgcgtcccggctgccgggatagaaaattcaccccgaagaccgccccggcggaaacgccgatcaccccgtcaaaatgaaggccccgggcgtaaaaggcgtccaacaccccggcggtgaacatgccgcgcatcccgccgccttccagaaccagtcctgttttcatccttatgctcccttccgcgcagcccaatgagcgcgcttcccctttattatacacctgaaaaggccgggaaccaatcggcggcatttgctcaaaaccgccttttttcagccaaaatccgggaaggattgaaattttcccggtgacagggtataataaattcgtgtcattttgaccaatatggagggaaacgcgtgtataggctgctgatcgtcaccggaaaccagagtgtgagggacttgttcaccgcgatggaaggctgggagagcttgggcttcaagccgccgcgtctgcgtcagaccacgcaggaagcgctggaatgtatgcagaagcaccagatcgacgcgatcgccgtggacgacggcccggcttttgacgagctgaaccgctttgtggaagaacagtgcccggcaatgctccgttttcccattgaaaagaccccggacgaggaatggaaggtcatccgggcgctggatcggatgctgggaaaccttcacgccgatcattataacgacgaatacgatctgatgggctctctttcccacagtcaggaacggctgctgaagggcatcgtctgcggactgatccccacggagaaggagctgcgggcccgtctgttcatgctgcgctgcagggaaaagcccaacgtgccctgcgtgctggcccgcctgaccatggatatggacgaccccttcctgaccaaccgctggcattacggcagcgagcgtctggagaccgccctgcgcaactttttcggcgcgcggcagcgggatatgtacctgcacgtggctgtgatctccccggaggaggtgcgggtgctctgctaccccgtcaccggggacggcaccctgctggaaagcgcggtgcgcgcctacgtggaggagaccgcccagcagatcgaccactatctggggctgcatatgcaggttgccgaggtgcggctggtgccgggcctgtcggccttcgccgctgaaaatctgaaataaaaaagccgtccgcctgcggcggcagtaaggagaacaatatggggatttttaaggatttggtgaccagccagctgatcgacgtgatcgagtggacggacgacagccagaataccatggtgtacaaatatgacatgaacggcaaggagatcatgatgggcgcgcagctcaccgtgcgggaaagccaggcggcgatcttcgtcaacgagggcaagctggccgacgtgttccagcccggccgttatgagttgagcactcagaacatgcccatcctgaccaagctcaaggcgtggaagttcggcttcaattctcccttcaagagcgatgtgtacttcatcaacaccaagcagttcctcgaccggaagtggggcaccgccaacccggtcatgatgcgggacgccgatttcggcatgatccgcatccgggccttcggctccttcgccttccgcgtgaaggaacccgaaaccttcatgaaggagtgcttcggcaccagcagcctgttcaccgtggaaggcgtggagggccagctgaagagcatggtggtcagcggcctgagcgacgccatcgcccagagcaagatccccgcgctggacatcgccgccaactacagcggcctgagccagtactgcatgaacgcgctgaataccaaggtggaagcgctgggtctgaccctgaccaattttgtcattgaaaacgtgagcctgcccgaagaagtggaaaaggccatggataagcgcacctccatgggcgtgctgggcgatatgggcaagtatgcccagttccaggcggccgaggccatgcgggacgcggccaacaaccccaacggcatggccggtgtgggcgtaggtatgggcgcgggcatgggcatgggccagatgttcacgcaggctttcggcggcgctcagcagcaggttcctgccgcccccgcggctcctgcggctgcgacggtggcctgcacggcttgcggccagcccatcgcggcgggcagtaagttctgctcctcctgcggcgccaagcaggaagaaaagcccgctggcggcttctgccccaactgcggcggcaaggtcgaagcaggcagcaagttctgtcccaactgcggcaacaagatggcgtaacgccatgaaaatacgaatcgaccgcgctcgtcgcggtcgattttttgatgaagggaaaagcagatggaaaattttgatctccaagcctactgggacgcggtgctccggcaggacgcacaggccatggaaacctttctggccccgaacgccatcgtcaactggcactgcaccaatgaaagctttaccgccgcggaatttgtccgggcaaactgcgaatatcccggccagtgggagggcgaaattcagcgggtggagccgatccccggaggaatcgcggcggtcgtccatgtttattcggcggatcgtgcgttgtctttccatgcagtggcctttgttcgtttgacggacgggaagatcacccagctggacgagtattggggcgatgacggccccgcgccccagtggcggcaagataaaaatatcgggcggaaaattcgggactgaccccggattccgcccgatatttttggaaatgaaaaactcccccgcgcgaggcgggggagcggaatgctcttggaaaaagcaattacttgatttcgacagtagcgccgacttcggccagcttttccttgatcttttcgcattcttccttggaagcgccttccttgatggtcttgggggcggattccacgaagtccttggcttccttcaggcccaggccggtcagctcgcggacaaccttgatgaccttgatcttctcggagccagcgtccttcaggatggcgtcgaactcggtcttttcttcttcagcggcagcagcgccagcagcagcgccgggcacagccacaacagcggcggcggcggaaacgccaaacttttcttccagggccttcaccagatcgttcagctcgagaacagtcattttctcgatctcagcaataaattcctcgtgagtcattacggataacctccattcataatcatgtttttgggggcgcgtcatgcggcgcgctcagcacttaggcttcgggggcggcagcggtgtcttcgctgttcttcttggcgatagcatccagaacgcgaacgaaaccagcgatgctgctctgcaggctgccaagcaggcgggccagcaggacttcgcggctgggaacggtcgccagttccttgatctgcgcgtcgctcaggatctcggtgcccatcagaccagccttgatctgaatcgcatcggtcttcttcttgtcgatgaagtcgctgacaatcttggcggggctcacggggtcgctcatgccaaaggcaaaagcagaggggccgttgagcacatcgtccagaccttcgatgttcagctcgtgcagggcacggcgaaccagcgtgttcttcagaacgcagtattccacgttgttctgacggaactgagcgcgcagggcggtaacgtcttccacggacaggccgctgaagctgaccacgatgacgctctgggcatcctgaaacttcttcacgatgtcgctgacgacttgctttttgatctcgagattcttgctcatttgagttgcacctcctttttgaaatggtcgattccaaaaagaaaacccttgcaggcgcaagggcgaacatgtcgcaggggatttctcccgccttacacctcggcgggcgctgcttacgcttcttatgagggacaggccctcacccgctgtcttcggcataggtttccaaagaatcgtttatgattatacggatttttcccctgttgtcaagcgttttttccgctttcttccgcgttttcgaagggctccggctcatttttcggcacttggcagaaaggctcggaaatatgtttgttaaagaaatggacgaagggcccaaggcaaagggcgcaggccagcgttccccagcccacgatgccgcccagcaggaacgccagcagcgtgaacgtgccatccaccgcgatgcggcaccagaaatagggaattttgggcagccggtcatccagcgtcagggcaaggctgtcatagggggaagcgcccaactccgaggactggtacagggacacgcccagactgacgaagggcagcgccagcagcatgatgataaagcggggcaggaaagcttccgggaaggtaaagagctgcttgagcagccacgtgctgccgtcggccaccatgcccagcaggaaccagttgacgaaggtgcccagcccgataaattttcggccccagatgatctcgatcaggaaccagcctgcgccgcagatccacagcatcggggccagcgccatgccgaccttgttcgccagagccaacacaaaggcggtgctggggtcgttgcccaacagagacatccgaaaaatcgatacgctgatcccaatcagaaaattgcccagaaacaccgcgatcagccgccgcgcagtataccgtttcacgccttgttccatcctttattcacaaaatgaggggaaagcccaaagagagcgccgcgctcctgtcggaaggcgcggcgctccctgctcagactgaacaggagacggcgggtcagtccaccgccttggtttcgatttcgtgcttcagcttggccaccagatcgtcgatggacatattgccgatggtctcgcccttgcgggtgcgcacgttgaccacgttctgctctacttccttgtcgcccagcaccagcatgtagggaatcttcatcatctgggcctcgcggaccttgaagccgatcttctcgttgcgcagatccagctcggtgcggatgccttctttttccagacgggcagccagcgccttggccatttcgtcgctgcggtcggtgatggtgaggatcttggcctgcacagggctcagccacagcgggaacgcgccgccgaaatgctcggtcaggatgccgatgaaccgttcgatggagcccagcaccacccggtggatcatcacgggacggtgcttttcgccgtccgcgccggtgtaggtcaggtcaaagcgctcgggcaggttcatgtccagctggatggtgccgcactgccaggtacggcccaggcagtcctgcagatggaagtcgatcttggggccgtagaacgcgccgtcgccctcgttgatggtgtagggcacctgcaggtcgtccagagcgccctgcagaccttcggtggcctgctgccacatttcgtccgtgccgatggagttttccggccgggtgctcaactccacggtgtaggggaaaccaaaggtggagtacaccttgtcgatcaggtgatacacgcccttgatctcgtcccggatctggtcgggggtcatgaagatgtgggcgtcgtcctgcgtgaagcagcgcacgcgcatcagaccgtgcagcgcgccggaaagctcgtgacggtgcaccagacccagctcgccggaccggatgggcaggtcgcgatagctccacggcttgcgctggtagaccagaatgccgccggggcagttcatgggcttgatggcgaagtccatgtcgtcgatcttggtggtgtacatgttctccttgtagtgatcccagtggccggagcgctcccacagggctcggttgagcatgatgggcgtcttgatctcctcatagcctgcttcccggtgaatctcgcgccagtagtcttccagacagttgcgcaggatcattcccttggggtagaagaaggggaagccggggccctcgtcccggatgtcgaacagatccagctcgcggcccagcttgcggtggtcgcgcttcttggcttcttcgatgcgggccagataggcgtccagctcggccttatcggtgaaggcagtgccgtagatgcgctgcagcatcttgttcttttcattgccgcgccagtaagcgccggcgatggaggtcagcttgaaagccttgaccttgccggtggagggcacatgagggcccgcgcacaggtcggtgaagtcgccctgacggtagaaggaaatgtgcgcgtcctcgggcaggtcgcggatcagctccaccttgtagggctcgcccttttcttccatgaatttgatggcttcttcccggggcagctcgaagcgttccagcttgtcgttcttcttgacgatgcggctcatttccttctccacttccttcaggaagtcgggggtgaagggctcgtccacgtcaaagtcgtagtagaagccgttgtcgatggcggggccgatggccagcttggcctcgggatgcagctttttcacggcctgagccagcacgtggctggcggtgtggcgcagcacccgcttggcctcgtcgtcctcaaaggtaaggatctccagttcacaatcatggtcgatgggctgccacagctccacgatcttgccgtccacccgggcgcacagcgcctgctttttcagctcctgactgagctgaccggcaatctccagaggggtcatgccgttttcaaactcccgctggccgtttttcagggtaatcaacatgggtttctcctccttgtttttggggaacgaaaaacgcccccacgatttcggtttcgtaggggcgaatgaaattcatccgcggttccaccctgctttttgctcattggacgcgctgtaacgtgcgctcacgtgctgcggtcggcaggcggtacccgttcggtcttttgcggcgcgctttcagccggggcgcggcctctctttggcaaaaggagataggaagggcttgatctgcgtcattccgttagccaagggcattgtagcgcggaaaaccgccccgtgtcaagatgggaaacgcaggattttttccctgttttccgggtatttttcccgctgcttttcttttgcccttctctttactttttggggatgataatggtaaactgaatcgttaccataggcgaagggagtttctcccggcggaggacgcagggtcttccgcgccaaacgacgaaaggacgagacaggaatgaaaaacagggtttggaaaaaggccgtggtgctggcgctcctcagctgcctgctggcgtgctgcgccgtgccgggggcacaggcggaggattttttcaccctgaatgtggatatgctggatatggattcgctcaaccagaacgattatgtggcggcgaacctgtccgcggcctgtcagggcatccgggtgctgaaaaccatcagcacgtccagcgaactggcggagcctgtgcggctgtccctgacccggatggatacgcagacccttctgtttgacaaggactacggctaccagagccgcaattttgacagcgacgtgatctacctgccctacggcggcggctccaccgtgccctatttggtgacgctgtatgtgggcgacacggtgtatgccatgccctttatgcagctgcagccccggctccagttcaacagcgcctgcacctacggcgtgcggcttcgggatctgggccttggcggggactggctcatgggcaccatgctgaacctgaccgagctgcgcagcgtgggcatgaaggagattcccttgtgcgccagcaacgctttttatatcggcagcgccacggtgatgatgcagggcgattatctttccgtccagctgaacttctacccggaggccaatgtggaggtgcacggcgcgtctgtgtacgtcatcacgcagggcgcgtccctgaccggcgacccggcgtattccggcgcggcggccctttccataggggactgggcggatgtgaccggcgcgtctacggcgcttctgtacctgcccatgcaggtcagctacgacccatccggtctgcccgcgctttcttatgaccttggcagcgcctccacgcaggagcagctgaatctgtggcagcagaatctttccggcgcggcggcggagccttccgacacctttgtgccggatacggattggcagatcgtggagacccccgaaccctactggccggagaactccaacggggaatccggcagtgtcggcgaatggaaccagcaggaaccatcggacgaaagctccgtggagcgcggctggtaaaacaaaattcaaagccccgtctttcgttaacgtgcgaaagacggggccttctgttttttaccggcttttcagggtgatcaggtggatctgcggcggggcgaacagccgcaccggcgcgccggaggtgcccacgccgttgctgatgagcacggcggcgcggttttcttccagccagccgctcatgtaccgggggcctacgtccgtcttgagattgaagaagggcgatttgccgaaaaagctgatctgtccgccgtgggtgtgaccgaacagcgccagatcgaaccagtggttgtcgccgtcgctgctcttggccttgagcatatcgggcagcaggtcgggggtgtgcccggcgaagatcacaaaatcgctggctttgacctgcgaggccacgccctccacgtccgggtagccgttgtaatagtcgtccacgccagcaatgtaaaagtacgtctgcccccgcttgaccgccgccacgttgttcaccagcgggatgatgccccggcccttgatggtgccgatgagcacggaaagattgctttccggctcggtgcggtcgtggttgcccagcaccgcgtatacgccgatccgggcggaaatggaaggcaggttctcgaaaaattcgatggccccatcgctgtcctctgcatagtcgccgcccagaatgaccagatcggcactgagcccgttgatcgtcttgaccagctcgttgacccggctttgggagaaccagcggccctgatggatgtccgtggcgtagacgatcttcaagttttttagattggcgggcaggttggccacctgcaccgtgtgctcgtctaccgtcagcgtccgggcttcgataaagggatagatgcacagcgccaacagcgccagcagcaccagggccagccggacggggaaatgccgccgctggggtttccgatagcgataatgatatttcggcaagggaggaccctcctttgagcgagcgttgacagaggaactgattcattgtacactttttggaaaccagacacaagggggagatcgcgtgaagcccggcactggaaaaactttccggcctattggcccgacgacgtatctaagtcccatcccggcggtgatgctgggctgcgccgacccggaaaacggctatgaggccaatttgatcaccgtggcatggacgggcgtggtgtgcaccaggccacccatggtctctgtcagcatccgcaaaagccggttgagccacgagttgatccggcgcaccggggaatttaccctgaacctgaccgggcgcagcctgtgccgggccgtggacttctgcggggtcaaaagcggtcgggacgtaaacaaattcgaggcctgcgggctgacccccatccctgcgccgccgcttacccacgcccccgctgtggcggaagcgcccgcctacctgtgctgccgggtgaaaagcgtgcaggagctgggcagccacgatctgtttctggcggaggtggagcaggtctatgtggcggatgaatactttaccgagtccggctccatccgggaagaggatatggagctggtggcctacgtccacggcaaatactgtaccgtaggcaagccgctgggcttcttcggctattctgtcgcgtcccccaagacattgaaacgccgaagcgcccccaagggcggcggcaaacggaaaggatgaaggaagatggcttacgagctgctgctggccgacgcggacggcacgctgtttgattttgacgcgggcgaacagaacgccctgactgagctgtttacccattttgacattcccgtgcgggaagaaaattttcagacctatcaccggatcaatcgggagcagtgggcgctgctggagcagggcaggacgaccctgccggagctgcaggtggcccgcatggccaactttcttgcggcggtgggcctgcggcgctccccggaggagatgcacctttatttccgggaccggctcagctgccagagcatccttctgcccggggcggaggctttttgcgcccgggtggccgaaaaaatgcccatctgtctggtcaccaacggcgtggcggccattcagcacgcccgttttgaccgctgcccgatctcgccctatcttagcggcctgttcatcagcgaggagctgggcgcggccaagccagatcccgccatcgtccacgcggcgctgcgccgcatgggcgtcgcacccgaaaacgccgtgatgatcggggacagcgcggcggcggatatccctgcagccaacgccgccggggtgttcagcattctgttcaccaacggtcgtcccgccccggaaaaccatggagccaatgcggtcgcggccagctatgaagaggccgaacggctgattcttggttaaagccccaatgcgtctgcctgtctgcttttgcggacgtgcaggcgcttttttgctctgccgggggcaaaacctccgtacttgttcccaaagtcgtttcatgatataatataatactgaatctgttcgggcgcgggcgagcgccgatttctgatgaatcaggagtggagaaacatcatggactattccaacgaacagctgcgcgcgctggcgcgggagttctgccccgccgggctcgacaaagaccctgttccccttggcaacggccatatcaacgataccttcctgtttgaatccgaagggcggagccatgtgctgcagcgcatcaaccgcaatgtgttccgggagccggaaaaggtgatggagaacttccagcgggtcacggagcacatccgccagaaggtggcccgggagggcggcgaacccgagaaagagaccctgcagctgaatctggcccgggacggcaagccctatacctttgacgaaaacggcgacctgtggcgcagctacgcctttgtgaaggacaccgtgacctacgagcgcacggacgatcccgccctgttccgggaggcgggccgctgcttcggacggttccacgacctgctggacgatttcgacgcgtcccttctgcatgaaacgatcccttattttcatcatgagccccggcgctggcaggacttcctgcgggcggtggaggagaaccgttccggccgcgcagatacggcccggaaggagatcgagggcttcatggccttcgccgcccttcctcccgtgctgcaggatcagctggaagcaggcgtgctgcccctgcgggtgacccataacgataccaagctcaacaacgtcctcatggacgaaaagaccggccgcgccctgtgcgtcatcgatctggacacggtgatgcccggtctggcggcctacgactttggcgacgccatccgcttcggggccagcacggcgctggaggacgagactgatctggacaaggtacatttcagcctgccttattaccgcgccttcgcggagggctatctggaagccttcggcagccgcctgaacgaagccgagcttctgtccctgcccatgggggccaagctgatgacgctggaagtgggcattcgctttctgggcgattatctcaacggcgacgtgtatttcaaggtggatcaccctgaacacaatctggttcgcgcccgcacgcagctcaagctcctgcaggaaatggaagcccactggcaggagatgaacgagatcgtccgcgaactgggaaaggggcggagcaaggcatgaaaaagccggtactggtcattatggccgcgggcatgggcagccgctacggcgggctgaagcagatcgaccctgtgggccgcaacggcgagatcattctggattactcccttttcgacgcgaaacgggcgggctttgaaaaggccattatcgtcatcaagcgggaaaacgaggccctgttccgggaggtcatcggcgaccgggccagccgccagatggagattcagtacgcctatcaggaaatggacgatctgccggagggcttttccatccccgagggccgcaaaaagccctggggcacgggccacgcggtgctggcggcccggaagctggtggacgcgcccttctgcgccatcaacgccgacgatttttacggcgcggaggctttccgtctggcctatgaccatctgacccatttgaaggacgagggcgacgtggccatggtgggttatctgctgaagaacactctgagcgaaaacggctacgtttcccggggcgtgtgcgaaatggacgaaacgggacgtctgactgccctgaccgagcgcacccacattatcaccagcgccgacggcccgctgatgaccgaagacctgcacacctacacccgtctggagccagacacagtggtcagcatgaatatgtgggccttcccgcattccatgatggccgcactggaaaagggcttccccgtgttcctgcgggagcagctgtccaagaatcctgaaaaagccgaatactacctgcccatggcggtggacgcggaaatgcaggccggacgggccggcgtcagcgtcaaaaccacccatgacaagtggtacggcgtgaccaacccggaggataagcaggacgtggtggacgcggtggcccgcatggcggaagccggtctgtatcctgcccccctgtggccggaggcataaatggaaaaacggagacccaaagcgggcacggtggtgatgatcgctctgctgctggcgctgaccggcgtatgcgtgtacctcgcgccccgcacccgggacgcttatcaggagtaccgcacggaaagcgaagccacccccacgcccacggcggataacgccaacatgatggccgttaccctcgaccccaacgccacccccacgcccaccatgctcatcctcaagctgggcacgcagggcgacgaggtgaagaagctgcaggagcggctgtatcagctgggctactataccggcgagatcgacggccagtacgggcagggcacggcgcaggcggtcatcgccttccagacccagcacggcattgccggggacggtctggccggagaggagacccgaaacctgctgtattccgaccgggcggagatgttccgccccacgcccacccccacggaaacgccctcggtgctcgccatgggcgatcggaatgacgcggtcaaggcgttgcaggcccggctgaaggagttgggatatctggacggcagcgctgacggcgacttcggcggggccaccaaggcggcggtggtttggttccagacccagaacggcgaaaccccggacggcatcgccggggccaaaacgctggcgctgctgttcagcgacagcgcgcccaaggcggagcctacgccgacccccgaccccaacgccctgcccattctggtcaaccgcacccacccggtggatgcgagctaccgtcctgccgatctggtgcagttgaaggacgtgcttccttccagccttgtgaccgtcaagggatcggactgcgagggcgaccgcaccgccgcgcaggcgctcattaccatgttcgaggccgccaaggccgacggcgtgaccggctggcagatcagcgcaggctaccgcagcgtcaagtaccagcagaagctgtttgacaggcaggtggccgagtaccagaatcagggcctgagcgtcgccaaggccaaaagcgccgccagcaagctggtggccgaccccggagccagcgaacatcacacggggctggccttcgacatcaccgtggccggaaccaccttcaagggcacggagcagcaaaagtggctccagaagcactgttgggattacggcttcatcatccgctatcaggaggacaaggaagccatcacgggctttctggccgagtgttggcacatccgttacgtgggcgtacagcacagcgtggtcatgcgggacaagaacctctgtctggaagaatatctgggcgagacggattgacccctttccccattcattctgagaaaaaagagtacgagtagtatgtatgatctgatcgtcatcggagcagggcacgcgggatgcgaggcggcgctggcagccgcccgcatgggcgtcagcaccctgctccttaccttggacatgaattccgtggccctgatgccctgtaatcccgctatcggcggcacgggcaagggccatctggtgcgggagctggatgcgctgggcggccagatgggcttgtgcatcgaccgcaccttcctgcagagccggatgctgaaccggggcaagggcccggcggtacacagcctgcgggcacaggcggacaagcgccgctatcacgaggacatgatggccaccctgttttccaccgatcatctgaccatccgtcagggggaggccatggagctgctgacccagaacggggccatcagcggcgtgcgtaccatgaccggcgaggaaattccctgccgggcggtggtcatctgcagcggcgtatatctgaaaagccgcatcatcatcggtcagtattccaaaaacagcgggccgcaggggcttctgcgggcggaggggctttcccagtccctgaccgatcttggtttcgagctgcgccgtttcaagaccggcacgcccgcccgggtggacgtccgctccatcgactttgacaagatggagcctcagcccggcgacgatcccattgtgccattctctttcctgacggtggccaagcagccggacataggcgtgaagtaccccttggaaaaccgggccatgtgctacctgacctacaccaacgaggagactcaccgcatcatccgggagaatctgcatctgtcccccatggtgcggggagagatcaagggcaccggggcgcgctactgccccagcatcgaggataaaattcgccgctttgcggacaaggaccgccaccagctctttctggagccggagggcctttccagtccggaatggtacgtgcagggcatgtcctccagtctgccggattttgtgcagtggcagatgtaccgctccatccgcggtttggagcgggcggtgctggtacggttggcctatgccattgaatacgactgcatcgactcccgggagctgaacctgacgctgggcagccgccgagtccccggcctgtattttgccgggcagatcaacggcacctcgggctacgaggaagcggcggcgcaggggctattggcgggccttaacgcggcctgctggctgcagcagaaggagcccctcatcatcacccgggacatgggctatctgggcgtgatggtggacgatttggtggtgaagggcacggacgagccctaccgcatgatgaccagccgttccgagtaccggctgaccctgcggcaggacaatgctgacctgcgtctgacggctttgagtcacgccagaggtctggcctccgaccgtcgcatggcgctgatggagcgcaagagggctcagaccgaggaaatattgcagaagctgcacgtagtcaagctgcccgccagcgaagcgcggaacgaatggctggagcgtcacggacagcccgtgacccctgccaccttatcggcggaggacttactgcgccgtcccgccattgacttggcggcgctgggggagctatctcccgaattggtcggttatgcgcctgacgctgcgctggaggccgagctttccattaagtacgagggctatctgaaaaagcagcaggagcagatcgctcgggcccgggccatggaggactgggtcattccggacgacatcgactacaacgccatcgaaagtctccgcatcgaagcccggcagaagctcagcgccatgcgtccccgctccctttcgcaggcgggccgcatccccggcgtgaaccccgccgacgtcgccgtcctcatggtctacctccgcagggggtgaccccctgcaccccactccgcgcccatagggcgcgggagcattcgaaggacatgaggcttggccgggattttaccgccgtggcacgacaggtgccacggctcgccggtctggtgtggctccgtgccagttgaatagaaaagaccgccattcggcgacgggcctcatggctcacaataaaggccagcgtgcttctatattcacgctggccttttgcgttgcgaaaatatccaagctgcatcaaagcatcccaactgggtggtttgagcatgattatttataccaaccgtagagcaaaaaccaagtctgctgttttgcgctgcgaaaccacccaagccgcgccaaaacatcccaatacgcattggttgagtctgcccggcgccacctgcgggggagccgagcggcgataggcagcgaagggaaaaaggcccgcccattttgacggcggaaaaaggcgagcacaggagcgcgcataagcgcaggaaataactcgccactttgatgcgcgcgacgttgcgagccccgccggcaaaatgggcaatagaagcctttttcccggaagggtgagcgaagcgaaccgaggtcgaggacagccccgaaggggctaccgcag

SEQ ID NO: 2556 - DNA, 5189 bp, Unknown
  16S sequences of unknown bacteria
cccggtcgtacaggcagaccgacgcccgctgtgacgcgcctttttccagaaaatacagccccatccgcgcaccgccccggacgatgccgccggtctcgacgcccagagcccgcaggctgtttaccgctgcctggcccagggcattgtggggcagctttgtgataaacgtgctttgcagcccaaaatttgccagcgagacggcgacgttggcctcgccgccgccgaatgtcgcctccagccggggcgactggagcagccgctcatagcccggcgcactcaggcgcagcaggatttccccgaaggtcacgacccggggcgggtcctgctgcgttatttttgtattgcgttccttatccattggatacctcctccgcgatggccctggcctggtggcagagccgaatgaccgccgcccaatcgccccgggccagcacatctgccggggccaggaacgagccgccgcaggccaggacggcggggcagcgcagataggccgccaaattctccagcgtgatgccgccggtgggcagcagctgcagcccggggaacggcccgtggagcgcccggatcgccgccgggccgccggactgggctgcggggaaaaatttcacgacgcccagccccagccgctgcgccgcctgcagctccgtcgccgtcacagcgccgggatagaccgccaggcccgccgtctgggctgcctggacaatggcctcatccagcccgggggagacgacaaactgggccccggccccggcggcctcacgtacctgggtcgccgtcacgacggtcccggcgccgacgagaagcccgggctccgtccgccgcagccgggcgatggccgccagcgcagcaggggtacgcagtgtgatctccgtcacggggacgccgccctgcaccagggcccgggccaggggcgcggccagcgccgcatcctccagctgcaggaccggcaggatacgggtgcgggccagggccgtatcagcaaaaacctgcattgcgccgcccccttttagacgcccgcgtaggcggcaaagccgccgtccaccggcagcacgacgccggtgacgaaggcggaagcctgcgggtcggtcaaaaacagcagcgcaccatccaggtcctcgctctttccgaagcggcccaggggcgtggcgtcaagaatttttcggctccgggctgtgggcgtgccgtcggcctgccagagcaggggtttgttctgcgccgtcgagaaaaagcctggggccagggcattgacccggacgcctgctttggaaaaatgcaccgccagccactgggtgaaattcgagacggcggccttggccccggagtaggcggggatctttgtcaggggccggtaggcgttcatggaggaaatattgacgatgctgcaccccgtccggcccagcatctgccgcccgaaggcctggcagggcagcagcgtccccaaaaaattcagatggaatacaaagctgaccccggcggcgtccaggtcgaaaaagctcggcccgtctccggctggcgcatcgggcagggcgtattccgacgccgttgtcgccttggggtggtttcccccggcggcgttgatgaggatatcgcagggccccagccgctgcgcaacagcttccgccgtctccgccacctggggctgatcgaggacattgcagccgaaggctgccgccgggcagcctgctgcccggagctctgccgcaacggcctctgccttctcccggtgcaggtccaccagggcgacccgggctcccgcgcgggccaggcagcgggcaaagccgctgcccaaaacgccgcctgcgccggtcacaacggcaacacgcccggccagggccggggcttttacttggttttccatggttcaacgctccttcactatgataaaaaatcaattctgttccgcagcccggtctgctttttcgcacgcttcaaacaggcccgtcagatacgccgcgcccagggcccggtcgtagaggccgtagccggggcgaccggtctccccccagatcatccgcccgtggtcagggcggacgtagccgtcgaagctgcagtccgtcagggcccggacgatggcatagaggtccaagctgccgcaggccgacggatgcgcccgctcctcaaaatccccgccgggcagcaggccgatattgcggatgtgcagaaacgcgatgcggcccgcggcggcgtagcgccggacgagggcgggaacatcgttgccaaggcctgcgcccaggctgccggtgcacaggcacaggcagtgggccgggctgtccgacaagtctaaaatgcggtccagctgcgcgcggctcccggcgatgcggggcaggccgaagactgacgctgggggatcgtccgggtgcagcgccatccggacgccgcactgcgccgccaccggcatgacccgggcgcagaagcgggctaggttctccaaaagcccctgggggcccagacgccggtaggctgccagcagctcccgcagctcggcgggggcatagctctcatcccagcccggcaggtgcaggtctgtccgggtcgggtccatggccgccaggcgctgccagtcgagggccagtgccgtcgcgccgtcgggctggggctttgccaggtccgtccgcagccagtcgaagacgggcataaagttataggtaatgcaccggacgcccacggcggcgcagcggcggatgttctcgcagtacgtttccagcagcgcgctagcatccgggctgcccagcttgatgtgctcatgcaccggcagcgattcaacgacgtcaaacaccagcccgtgggcctggcactgggtccgcagctgctccagccgcgccatgggccacagttgccccggcggaacgtcatagaccgccgtcacgacgctgcgcatggctgggatctgggcaatataagcgagcggcaccgggtcctccgggccaaaccaacgaaaagacagcttcattgtgcgcctccttgcaaattgttccgtgtccccgcttccggcaggcggaaaaagcggcaggcattttcatagcagaccgcccggacgatgcctcccagcgccgcttcgtccggcgggcacagcccagcagatgcccagcggcccagcagactgcacaggacgcggcggaaataatcgtgccgcacaaagctggtgaagctgcgggagtcggtcagcatgccgatgaaatggcccagaagcccctgctgggcctggctttccagctgcgcggcgatcccggcggcgtgatcgtggaaccaccaggcgctgccgtgctgcagccagcccggctcctgctgggggaaggacgacaggagggtgtccaaatacgcgttgtccccggcgtccaggctatagacaatcatccggggcagggcgcggcggcgttggagcgtatccagcagtgctgcgagggatgcgcagccggcggggccgatgcagtcaaagcctgtatccggccccaacgcctgggcctggacggtattgacattgcgcaggcagcccagatgcagctgcatggcccagccccgctgctgataggccgcggcacagaacagcagcagatgcgtctgaagccgggccgcctgccggggtgtcagcgtccggcccgccagcgcgcggcgatagagggccgcagcctggcgcgcatcgcacggggcaaaggcgaggcggggcagggcgtggtcgctggcgcggcacccggcggcggcaaaggcatccatccgccgcagcagcgcctgctgggtgcctgccagcgtatctgtcccgcagcttgctgcgcctgccaggcgggcaaggtagcgtggccagtcgggctttgtgcagtccagcgcccggtcagggcggaacgtcgggctgaggatcaggtccagcgccgggttttgctgccaggccaggtgatagcgcaggtcgtccgccgggtcgtccgtcgtggcaagataccggacgccgctgcgggccagcagcccctgcacgccaaagtccgggcggtgcagccgccgggccgtccgggtccagacctgccgggccgtttgctcgttcagtacgccagtatagccaaaatagtgccgcagctccatgtggcaccaggttgccaccgggctgcccgccgcctggggcagggcacgggcaaaggccaggaatttctcccagtccggcccgtcaccggtgatgtccgactcccggaccccggccaggcgcaggatgcgccatttataatgatcgtgcgccagccagagggcgctgaggttttcaaagtgccggtcttcgcagatgtcccgggcgtccacatggctgtgataatcgacgatgggcagcgatgcggcatagcgggtatagagccgccgggccagcggcgtatcgagcagcagcgtctcaggggaaaaagcgtccaagcgtcttgcctccttcggattttttattagtatgcgcctgccgcccgcaggctatgcctgtttgcgccccgggctgaaaaattctttcccggcgtgcaaattctcccgtcggacgggcatactgagagaggaaaggacggtttttatggaaaaaacagcgcagcccaggccgtttggcctgcgggataagatcggctacctcttcggtgacttcggcaacgacttcacctttatcctctcgacggtcatcctctcaaaattctataccgatgtcatgggcgtctccgccggggtcgtcgggacggtcatgatgctggcccgggccgtggacgcagtgacggacctgagcatgggccgcctctgcgaccgcagccgccccaccccggtggggaaattcaagccctggctgctgcggctgtgcgtcccggtggcggcagcgtcgtttttgctctaccagagcggctttgccgggcggcccatgggctttaagatcgcgtacctggctgtgacgtatatcctctggggctcgttttgctacacgggcatcaatatcccctacggctccatggcctcggccatctccccggaaccggcggaccggcaatcgctgtccacattccggaccatgggcgggatgctggcggggctcatcatcgggatgctggtgccgctgctgtgctaccaggccgagacgctgcccagcggcggcgtcaagcaggttctcgtgggcagccgggtgacgctggcggcgggggtctgctctgtgctggccatcgcctgctatctgctgtgctacgccctgg

SEQ ID NO: 2557 - DNA, 6599 bp, Unknown
  16S sequences of unknown bacteria
ctgagacgcgcaccgatcgaggcgtatacgactgaagcgtggaaagatgaaatgcgcaaaatagaaaattgtattgaatgcggacagtgcaaggcaaggtgtccgtacgggctcgatattccgagacttttgaaagagaatcttgaaggatataagccgtatttttagaaataaagtaattgccgccggtaattgtgcgctttgtaccatatattttgcaaaggtatatgagttttatgatggttagctttttgctgttttgaagcaaaaagctaactgtttaaaatattattttatgaaaaatatcttttttagcgtatttggtatataaagataatcaatagggaagatagctgaatgattttttagagaattttacctatctttaaagctgattgcagtcaaaaaagataagtgcatagaattttaatagatgcactaaagttgtaatgaatatgtaattgatattaagggcattatgacatataattatcgtagcgaaataaaaaattgcgcagatgtttgtgtctgcgccggagtcgtagtctgttgagtagatatgccggaggcgctttatttatgggcagacgatgtttgaatttcgcggtatgtatttttaatatgggggtgtaaaggtttcgacgggggtgtagaaacaagataagcgagccgcagtttgccaagtctgcgttaaaaatggcacgttaaatataaacgctaaaaataacaataattacgcatttgcagcatagctgcctgccgcataaagcggccgcgtcgtcggctctgatttacctgtaggtcagaatcccggcgtcaattatacaggaaaactctgtgcctgctcccggaagtacaggggaatgacgggatagctgagcttgaagcctgccgcggggcgtcttgcttggcgaagtttaaatcagcggctgcgctcggagaaattcttgcggaaatgctttcggacaggagttcgactctcctcatctccaccacgtcgcagcaaactcagctgcattcaaaaactcagccaaaagctgagttttttcatatactttgttgctgctcctcttccccaaaagccttacagctttcggggacccctaaaataaaaaggtttttaatttctgtgaaagaaaaatcttcggaatattcttgctatatgttgcgcattaaaatggtatgatatataattataaagcaaaacattattcgagagtactgaataatgcggataaaatttcaacaaattatgcggaggagaaatttatgaataaaggaagatttgagggaagaattgcgattgttacgggcggcggcacaggaatcggacaggctacggcgctccagcttgcggctgagggtgcaaaggtcgttgttatgggaagaagacttgaaaagcttaaggagacagtcgagcttgcggaaaaagcgggaacaccggtcgttcctatggcaggcgatgtagcagttgaagccgactgcattaaagttattgaggaaacagtaaagaagttcggcacagttgaccttttggtaaacgcagcaggcataggaggcccttcggacagaatggaagaatgcacgatggaatctgtaagaaatgtattcgacatcaattattttggctcatatatgatggtgaaatattcgctgccatatatgcagaaacaaaaccgcggctcaatcgtgaacatcgcgtcgatcgacggaatgatgggatatgactgcgagtcaccgtatgcggcaacaaaggctgccgtaatctctatggcgaaaaccgttgcaacggagaacggtgcaaacggcgtaagaataaatgcaatcgcaccgggctggattgatacaccgatgcttgatgttgctatcgaaaattataagaaggcaggcgttgaagtaacaaaggaaactctcagaaacggttcgatgaaaagaccgggacttccgtcggaaattgcagagggcgcttgctggctgctttccgatgaggcaagctatgtgaacggtcatacacttgttatagacggagcgaagacattaagctaaactcaaagtcttttatcaacaatctccggtaaaacgatatttgaaaaatcgacagattatattcaaaagccggctcttacgagccggtttttagttgacagcattcgttatctgatataaaattattattagatattattagatttaatcagatgatgattctgtttattttgggagtgagattttatgattagcgaagggaaaacaattgaatttaaaaggcagtatgttgatgatataaaaaacacggttacggcgtttgccaactgcgacggcgggacgctctatatcggcattgatgatgacggaagtgtgtgcggcgtcgataatgcggacgatattatgctgcgcgtgacaagtgcggttcgtgatgctgtgcgtccggatattacaatgtttacggagtgcagaagcgaaattatgaatgacaaaaccgtgatatgcgtttctgtgcagcgcggaacagcgagaccgtattacattcacggcaaaggcattcgtcccgaaggcgtttatgtgcggcagggtgcttcgacggtaccggcgaccgaagcggcgatactcgcaatgataaaggaaacagcaggtgacagttacgaaaatgcccgctcgtttaatcaggagctgacatttaatcagacgcagaagttctttgaagaaaggggaattaaattcggcgaaatgcagatgcgtacgcttcattttataggtgaggacaacacatataccaatcttgcatttctgctttccgagcagtgcactcacacgataaaggcagctgtttttgagggcagtacaaaaacggtattcaaaaatagaaaggaattttcaggctcgcttctcgtacagcttgaagacgcattcagctatataaatcaatataaccgcacgcgctccgaatttccggggctgtatcgtgtagatacgcgggattatccgatagaggcaattcgcgaggcgcttctcaatgcaatagttcacagggattattcatttagtgcctcaatactgataagcatgttcgatgacagaatagaaatcgttacggtcggcggcttgttaaagggcatttctgtcgatgatgtgaaactcggtgtttcggcgcttcgcaatcagaatctcgctaatgtattttatcgcttaaaattgatagaagcttacggcacggggatattaaagataaatgagagctataacggatatacggtaaaaccgattatcgaggtcagcgacaacgcatttaaaattacactgccgaacacgaattttcctaaagaaaggcagacaagtttgtttgtgggggaaaccgctcctgcatacaacatacgcactgtgcggacaaaagccgatgagcgaaagagtgccgtgattgaaatgtgccgtgaaaaagggtatgtggtgcgcagggacttggagagaagtcttggtgtttcgcaggcgacagccatactcatcttacgtgatatgacagagtcgggaattttggtgaaggaaggcgcggcaaggcaggtacggtattatttaaactcttctgccgtaaacagcataaagaggctgtaaaagccgaggcttaggactttgtccagaagctctcggctgaatccggggagaagcgatttgccggatgtgatttcctcggtgagatcaacgccgttctttttggcatgtgcaagggcgtatctcatttcgccttggatccctggttttctgattgccataagctcgtcaattttagcaatctgttcatccgttaggccgagtgcggcagcgcagtctttttctgcggatttatttgtgtatgcgcttatgtgctcgtttctgcgctcgctctcgggctgtgctgaattttccgtgattttcagcgccggaagatatgtccttataactgccggcggcactgttttctgtatttcatgaagcttgtcgttaaattgtttttccttttcgtatatcgagtgtgcatatgaaacaatgatgtagcatccactttatatttgtaaaaagccgtctattcactcaagtcctcgccgttgctggcgatgacttttttataccagaagaaagaatcttttttgtatcttgcacggctgccgctgccatcatcgttgatatcgacatagatgaaaccatagcgtttgctcatttcgccccgcgactgtgatacgaggtcgatgcagccccagaccgtgtagccaatgacattgacgccgtcgtctaccgcaagcctcatttgtttaatatgctctcgcaggtagtcgatgcggtagttgtcgtgaacttcttttgcagcagtcagcacatcttttgcacccataccgttttcgacgataaaaagtggtttgccatagcgggcataaaaatcgtttaaaactatacgcaggccaacagggtcgatgactgtgccccagtccgtttgacgaagatacggatttttaaacgcttcacggctgaatgaagcggcgtccttgctgctgcatataagcgcagggtctatggatatacgtgaattataatagctgattggtatgtaatcgaccgtattttcacgcagaagctcgtcatcggcgggatcggtttcgattttaatttcattcctgcgtacggcagtatgccagtcgtaaggaaactctcctttgcaaagcacatcaaggaacatatagctgtactgcctgttgtcattcagcgcaaacaagatttcctcaggcttgctgctctgataatatccgagcgagccttctaccatagcggaaatatatgcgccgggtattatttcatggcataattttacgcagcgggcattggcaacaagctgattgtacgccacctgatattggagctgttctttattttcaccctcgtgcaggataacaccgccgttttggtagagatagccctgcataaaaatgtagtttatttcgttaaaggtaatccaatatttcactttgctgccgtaacggcgaaaacaggtctcggcatatttggcaaacaggtttatgactttcctgtttttccagccaccgtatttttttaatattgcaagcggcatttcacagtgtgagagtgtcacgagaggctctatattgtactgagcgcagcagctgaaaaggtcgtcgtaatgcctgagcgcctcttcatttggcttttcgtcatcgccgtttggaaaaatacggctccaaggaatggaaatgcgaaaacattttaagcccatttctccgagtaaggcaatatcgtcgcgataggtatgataaaagtcgatagcgctgtgcgtaggatagaatttttgcggatcaatttcgagaggtatgttgtctttgccataggtttcgcggtttaaaagatcggcggtgctaagtcctttgccgtcctcgagatatgcaccttcgcactgattggcagcaactgcgcctccccacagaaaatcaggtgaaaacgatttcatagctaacccctgcctttctgctcgaaaaagaacatcagcgcgccgatttgattggctccgcctctgaagcggcaaggcacgatttcgggcactgttaaatcaggctgagtgcgcgcgatctttttataggcggcattgattttttcggtgacttccgggcgggcgctgataccgccgccgatagcatagcgctctgcatcgagtacaatctgcatagaaaaaatacctgctgctacatacattgaaaattcgtcaagtgttcttgcggcgattttatcgccgctgtcataggcacggaaaaattcacggccgtccatttcactgcgtttgtacggaaagcccttattgacgcagtatctttcaagaagagccgtagcgctggcaatgctctcccaggtggcatcgtatacatatgtatcatattctttaacgccatctttgagcttaggaagaggcatattggcaacattgataagctttgcaaagtcgtgaggatagaaggaaagctcgcctgcggctccgcgtgatccgttccagacttttccgttaataatgatgccgcctgcgatgcccgttccgagaccgacgatagcaccgctttcaacaccctttagcgcgccttggcgaagctcggcattggcggcgcatttaccatcattggcaatgacaacgggagcactgaagatttcttcgtaaatttgtgcaagcggcgtgccgttttcaaagcggtacgggcttcctgtatgggcaatgcctttttctatatcgatgattcccggcagcgataccgccactccgctgtattcgtctttatgttcctctgccagcgctcgggcaaagcttttcatttcatcaagagaacttgtgggagcgggtttttcggcatcataaagcctatttgcattttcgtccatcaaggaaatctttaccgagcttccgccgtaatccaaaaccagatactttttcatagcgtgttcctccttaaagccttgcgccggctaaagcgaaaggcaaataaaaagcgctccaaaaagagcgccatttttcaaagctacaagacgggcggcgttatatccgtcatctcaagtgattttatgagctcatcgagagcatt

SEQ ID NO: 2558 - DNA, 32759 bp, Unknown
  16S sequences of unknown bacteria
gaatgagcaggtggacaccgtctccggcgtcaatgccgtcagcagcatcgccagcgttgccgcaccggccgggatcttactttgcaggaagcatatctgccgtccttattttacaatgatgatgcgcacgcggccgccctgaaggggatctgtatcacaatacagatcgaactgtttgaagttcatacgggcttcctggagggtgaggaaccggtccagcttgggtgcatagatctgcacactttcgctgatgggcacatacacatccccaatgcgcacccccaggcggctgtcaaatttgtcctcgctcaccgtggccgccttctgcagccgcttgcccggtgtggagaaagccaccgtcagccgtgcttctccatcctctgccgccggcgtcagggccacggccacagcgccaggcgccgcagtcgttcccatatccccgcagggatagaaggaagtgatctccttcgttccgtccttggtgcgcagacggagggtgtacaccgtacgggtcaggtcggaagatccggtacccgggatgggtttgccctgctcgtcataatcaggcccctcgcctgggatgatgactttttcgctcttatactggctcaccaggccatagaggaagccgtctccggtcacattgtccagcaccagcaaatcaatgcatcccgcggcatcctcccgggcatggattacccggtttttggccagggtctcgggcaaactctcccaggtgatgggccgcaaaggcatcccgggagcaggctgctcatagagggccacatttttggcaatttcccgctggcccagggttctctggctcttgcgcagttccccggccagggcattcttatagtccaggtgccgcagcaccagctggccccggctgttctgggtcacctgcaccagccgcccctcttctttgaagagagatgagacaatctcctggttggcgatgatctggggatagccgtcaaaggtggcgtccccttcccatttttccccgctgggcagacgaagggtgactttgccctccttgctcaggctctgaagcagggccacggtgttgggagccgccgctccctgggggaaagccccggccacctggccccgggtgtcaaagcaaagcagcaccagctgccccacctgcaccttttcaaagaacccggcggcactctggggcacggtgtattcctttccccccgcccggatgcgctccggtgcggaataaatgggcccggcctcttccagcagcaccagccgccggtcccggctcaccagatatcctccctcttccggggaataggtgagtacatcgtatttttccagcttgtcaaagggcatggcatggccgcccagcagcagctttgcattctggggcaaagcccggtcggaggccccatagacaaaggtgtcgctctccttttcctgggccatttcatagatcagctgcaaatctccccggctgtcaaaataaagccgtacccggaccccttcccgcagatccagaaagccctgctggtattcggccatctggcccagggagaagatcttcacttccttgcccacaggcaaggaaccggatgtgatctccagcttgttcagtcccgccttttttaccgtttcctcccggaaagacagggcggcgggcaaaaagccctttatctttccagactggcttttgtcccctaccggcgtgcccatggtccccagcaaattttcaggcaaaggtgcggacaggcgctgggcctccccggtcagggaaaacaggctctccttcccttccttgtccttggcatagagcatctgtccttctcccggcgcaaagccctggctcaggaagctgcccccttctttggtgggcaaagtgagaaggttataaagcaggatggccgcctggccccggggaatggggccgttggggctcaggccggaaagcccccggcacagccccacctgttcccctttggccagagcatcccggggccagaaggcccccagatcttccccggaataccccagaagccgcagcagaatggtcactgcctgaccataggtgatggggtcctccggtccaaaccggccatcgggatagccctggatgatcttgtatttcttcaccgccccgtacacatagggggcataccagctgccagcgggcacatcggggtaaatggtatagccctggtaggccgcttccccttcaaatcccgccgccagcaccgccattttgcagaactgggcccgggtcaggctgctccccggctgaaaagtgggactgtccgccaggattcccaaagaccgtaggctttcggcggccaggctctgggaaacctgggggatatcggaaaaggcccgggaccgggaaggcagcgcccccggccagaggaggcaaagggccagaagccctgccaggaatcgggtgtatcgtttcttcataaggaatttctcccgccgtgcgccccggcgacaaacaaaggggacaaaccggctcccgcgcggatttggagccgccccgaaattttggttattggctgcgcagcgcatccaccggctgcattttagatgccttgcccgccggataaaagccgaagaacatccccagcagcaccgaaaacaggaaagctcccagggccaccggaagggtgggcaggtcgatgcgcttgaagatggcggcagacaacagagccgagcccagactgcccaccagcagccccagaacaccgccgcaggcgctgatggtagccgcttcgatgaggaattgagccacaatggcccggcggggtgcgccgatggccatgcggatgccgatttcccgggtgcgttccgacaccgataccaacatgatgttcataataccgatgccgcctaccagcagggaaatgcctgcaatgccgcccaccaccaaggtgagcataccgtttatctggttgtcctgctccacccattggttgctggaatagacattgtagttgtattcggccttggcctgctttttcagaaacccttccagcaaggggatggcggccttggtagcccccgagctgttggccttgacggtgtagctttcgatgtttcccgatccggtgatcgtccgctgcattgtctggggcagcagcaccgcatcgtcctggctccactgtttgctctccgcccgttctttgtaaaggcccaccaccgtgcagctgacgcctcccacccgcacctgtttgccgatgggatcttccaggccgaagagctgctggcgcaccgccgagccgatgacacacaccggcaatcggttgtacagatcgctgtaagacagctcccgtcccttttccagctggtagttctggcacaggccgaagtcctcgttgccgaaatagatggtggtgctccagtttttgttcttataccggcatttcaggttctggctggtgttgggggtcactccaacgatcagcttgggtaccgattggcaaaactccctcagatcccgggaaatgtcccgcccctcataaaagctgacgctgatggtgttggctcccatctttttgtattcttcaatgacctggcgctgggtgccctgcatcaccgacaccagagcggtcaccgatcccacgccgatgatgatgcccagcatagtgagaaaggaacgcattttgttttgcagtatagatttgagggccatggaaaaggcctggaaaaatttcatgctcgtcccacctcccgcaataggggctcccgcttgtcctggggggtgatggaatcctccaccacctggccgtccatgatgcgcaccacccgtttggccagataggccaggtgcatatcgtgggtgatgagcagaatggtggctccctcgtcattgagggcgcatagcttgcccatcacttcggccccggccttggtgtccaggttgcccgtgggctcgtcggccatgatgatgggtggctgggcggccatggcccgggcgatggccacccgctgctgctggccgccggacagctccaccggccggtgatgcacccgtttccccagccccacttcctccagggcgctgagggccagctgccgccgctcccccgccttcatcccccggtagatcaggggcaattctacattttccagggccgtgagggcggggatcaggttgaagccctggaagataaagccgatatttttgttccggatggccgaaagccgccggggcgggatgagggatacattctccccatccagccaatattccccataggtgggggtatccagacagcctaaaatgttcatcaaggtggattttcccgaaccggactggcccaggatggcggtgaactccccatggtcaatggaaagattcacatcccacaaggcccgcacttcactttccttgccttcgttgtagactttgcggatattttccaaccgaatgagcatcctgtcacctcccccaggcgaagggggcggcgacgccaaaggccatgccctccatctcctcttctccctcctgaggctgagaggtcatatagatctcttccccttcggaaaggccatccagcacctgggtatttttgtcgtcggcaataccgatctcaatggtcaccggaacaaatcccttgggcacggtatcctttggcacatcctgagcctggttgggatactccttccccggctcctcccgcacaaaggcgcacacgccgccattctgatagatcacgccctgggaggggatgagcaaagcgtcttccaccaaggtggtgttgatcttatagctgacgctcatattgggcagcagttttccatcgttctccaaagcgatcttggccgggaaggtggcagctgtgctgccttctcccaccttggcttccatggccacctcgatcagcgtgccggtgagggtgttttcgctctgggtaccctcgccggtggtcaccgttaccggcatccccagggagaccttggagatatccagctcgtcgatgctggcttccaccaggaaggaggaggtatcggacacggccaccaggggtgtgcccgcggcggtgaggttgtcccccacctgcaccgacaccgaggacaccatgccgccgatctcggtgcgcacttcccggctgcccaggtcggcttccagctgggcggccttcttggccgccaggtcataggccttctgggcgttttcaatggcggtgtgcagcgaagggttttccagccgcaccagggcctgcccggcggcatattcgccgtagtccatcagggacgaggccgtcaccttgccctccccctgaagggtgatctcttcttcccgggcattttgcagcgtgccggtttcggcgggcatgatctccccctgggccgtggggatgctggcggcggccacggtgccggcggccagagtgcccgggttctggatggtgatattggcccggaagagcactgccccatcctgcaccttgcggatatgatccaccgattggaccgtgccttccacctgggtcatgctgtcggggagagaaaccaacgcccgcatacccgaagtgatctggttttcataagcatagctgtaataggcggccagggtcagggtgcggtcatcgatgagcttgcccaggctcatgccctgggaaacctgctgcccggcccgcaaagtgggggcgcccaccagcttgccctggaagggagcggcggtggtgagggaggagagggcctgctgggcttccttcacccttccctgagcggcggccacttcctcctgagcgtttttcagttcatccatcagttccgagggatcgacggtaaagagcacatcccccggctggaccttgtcccccggctggacaaagacctcggtaactttgccccgggccttgtcgccgtatttggcctctttcaaggggcgcacggtgccatagcccgaaacactctgcaccagggagccccgtgaaaccataccggtggcaatttcctcattcttttccttgtgcaaaagccggggaaagaggacggcaagcccacccacgccggccgccaccgccgccaggatcaccacccggggaatccagcggggcaggcgctttttctcttttccggcaaatttattccgccgggggcctttttcctcctggagtttttggggtttctttttggaaagcaggcctttctgttcgttcttttccggatctttcgccacggcctgtttctccggggccttctcgtttacggcctgttcctcttgggttttcttgattttcgtcccttccggggaaggaatcggttcctgtacaggcaatttatgttcgctcatccctttatacctccatctgtttcaatttcttgtgccttatttcagccctttttccgggactgtatcctttagatggaggccgatatcaaaaagttcttacaactttcttaacttatatctgccccaggcggcccctgttttccccctggccaacggcctctcccccgatgctttcagcgcctagtcaaggagagagaactatggtagaataaggaggtgtgagaatccgaaagagaagagaaagagagagtgatgtatgctgcatgttttccgtcaaccccggcagttttaccgggagctattgcatctggctctgcccattgccttgcagaacctgatcaactattccctggccctggccgacaccatgatgctgggagcggtggggcaaaatgagatcgccggggcctcggtggtcaattcctccttttttgtcatcatgctcatggtctttggctttcaaagcggggccagcgtgctcatcagccaatattatggcaagggtgaccacaaaacggtgagccgtgtgatgggcatctccttctttgccgccttcactctggtcactgccttttccctgtttgccgtcttcttcccccaggtgctggtggggatcttcaccaatgacccggtggcggcggaattgggcatccggtatatgcgcattgtggcctgggcctaccccattaacatcttcacccaggtctatgtgggggcccagcggagcatgggcaatgccaaactgggactttacatctattcttccgccatggtcatcaatacctttttgaactatgtgcttattttcggcaaattcggcgcacccaaactgggcatggagggcgctgccatcgccactgtcacggcccggtgcgtggaattgcttttcactttgatctattgcgcccgctgccgtcatttccgtctggatctttcctgcgctatacggccaggcaaaacactcacccgggattttgtccactatgccactccggtggtggtcaatgagaccctgtggggcctgggcacctccctgctccccgccatttatgggcggatgggcaccgatgtgctggccgccgtcaccatctcccggaatatggaaaacatcgccaatgtctttgccttcggcgtggccggagctgcggccgtgctcatcggtcgggagctgggagccgggaagaccgaaggggtctattccatgggcaaggcccttctggcggtggcactgtgcagcggttttgccgcctgtgccctgctgctgatcgcctcccaggtggtgactcccttcttcaacattccggaaagcaccaaggatattgccgcggccatcattgccttctatgctctgcgggccattcccatgcagttcaacaccacctgtgtagtgggcgtgcttcggggcggcggcgatacccgggcggccatgtatatcgacatcggcccgctgtggatctggtgtctcccggccactgccctgctggctctggtgttccatctgcccatcatcctggtgctcctgccctgcctggtggaggatgccgtcaagatgatctggggcctgctccgtttccgctcccgcacctgggtgcgcaatatcacccgctctaccgcagcgtgacgctgcacccatactgcggcagcgtgacgctgctcccatactgcgctgccgcgctaggcaacagaaccagagttccttctacgatcaatccgcaaaaagccgcgacctgtgcgtggctttttgcacttctcaaggggccagtgtggccgattggccggaaaatgcgggcaatcggctgcacgcagacccttgcaaagattcgaaaaagtggcttttgctactttttcgacacatgaaaagccctgcgccggccggcgcagggcttttcccatttctggggcgttatttcccgatcttttctgcaaaccgcatgagaatggttgcggcctgggcacgggtggcctgaccctggggattcagctgggcattgcccattccttcgatcaagccctgttccacggcccacgccatggcagactctgcccactggctggtctcgctcccatcggtaaagtctgcaagactgctttccgcctggggctttccggcatagcgccacagcatggccgccatctgttcccgggtgatgaggtcatccggaccaaaggtgccgtccccatagcccagcaccaccccggtgctgtcggcccagaggatggcctcttcgtaccagcttcccgaaggcacatcggtgtagttcatggccgtatccaccataggactgccttccagccgccacagaatggtggcgatcatgccccgggtggttgtgatgttcggctcaaaggtatctgcactggtgcccaccatcaggccatgttccacgcagtagtgaacgccgtcatggtaccaggccgtccggtctgcatcggtgaaaggggccatggaacagctttcgtcccggggacaatgggacacagcgctctttttcttgaaagtcactgtgatggtcacctttccatcgggctgggtgaaggtgtaggagccgtcctcctcgggtgtgacttccacttccttgccgttctggtcggtgaccatgacctgatccacctgatagccgtcctctggcttgggagtgatggtcacggtatctcccttcttgggggcatcggggctgatggtcacggtgccgtgttccggctgctccacaaccggcggataggtaggagttcccccaccaccaccaccaggatttccggaatgttcggtataaccgatggcataggtggagaagcactttacatgaaggatgagcacggttttgtccgaactcacctcaaaatattcgcccaaagcattgggggatgtggtcagtgcctcggccttctccttatgcacccggtagacggtgtaactttgcttgccctgcaattcgccgggcagaggcagccgcacttccagcagcacattggcctctgtgatgggagtggtttttgttgtgccgtttacttctgtcacggttttctccagcgtatagtccatcaccagagcaagattgctgccaccgattttctcgatcttctccagatcatcgctgatttcagcagcttccggctgtttttccgtggccttgaaggtgatctccacctttccgcccgcttccaccgtatcttgatcgttctgggtgtacaccgcatcaccaggattattaaacatagtgtccagctggcctaccacgatatccgggctgccggggatcacttccacaatggagttggtggcccccttgggcaaagtggcgttgcagacagcgttttgagctttgatctccacctttttggtgacggtgcgcacatccttggtgaccaccagattgtagatgccgggcgtcagattgtcaaaatgatagcccccgttggagtctgtggtggtctcattcagcttgttggcccccagccacagactgactacggcgccggtgacggcctggggatctgttccctcggtttcctcagtgacctcgccctccacccagaatacttcctgccactgagctttgaaggtcacatccccattgggcatggtgaagtggtcgccaggctgataggtctggccgtcatatgtccagccgataaactgataacctgttttgctgaaagcacacaccggcagggtcaaagtgcttccccctgcggttttcagagaaggcatggtaccctcatccgcttcatttccatcaaatgttacggtgtacagtatgggcggggcctgggtaatggtcaggtcgcccgcctgcatggtatcgctgccgttggtgtggcgatagttatgatcggtgatagtgacccacacttcatagcggcccggctccttgggagcggacactgtctggccttcctgccggtattccacggtataaccggagaatgtgctctcatcaggagtgaccgttgccgtctttccgctgccgtcggcctgcactgcattgtccgtcactgtgaagagcaccggcttttgctggatggtcagggtggctttgtcgtttttgaagatatagttgggtgcatcctctcctgtgagaatggctgtcaacagatgctctccggcattctggggatcggcgccatacacctgagcgctgacctgatccccggaaaccacaccgtccagcacgattttcaccggcgttccatcgccatacacctgatccaatccctgccaagtggcataaatttcttttttgccgatggaaaattccgccgttgccactgccgcttcatagttttctactggggcaaaggtggcagtgacggtatactcccctacctgagtgggcagggcatcgctgtcataggccgtgccgcttctcccggtgtagtgataggtcacactaccggtgccattggtgccggaggcgggagagggctcattggcctcttctccataagtccagtcttccatggtgacgctggcctcgcccggggcctttgtgatctcccaggcaaaggtggtattgcttccgccctccagggtgtagttgggattgcccaggccggtgacttctgcctgatagcttccggcgttggtcttttggttctcactgtattccagatggaagacatcctctcccaccgggttttccacctctgcggtgacggtatgctcctgcccatcgtacaccaccgaaggctcaccgctccaactcagctccaccgggcgaggggcgatggtgaaggcatcctgaacggtgatggcgttgtaattgtcgtttgcggcaaaggtggcgatgacggtgtagtcccctgcatcggtgggcacggcatcgctgctgtagtcctggtttccggcggtccggccggtgtagtgataggtcacacccccggtgccatgggtactggaatcgggagagggctggctggcttcttccccataaatccagtcttccatggtgacgctggcctcaccctggccctttacaatctcccaggtaagggtggtattcgttccgccctccagggtgtagttggggttgcccagaccgataacctgtgcctgatagcttcccacatcggccccttgatttccactgtatgtcagggtgaaggtatcccccttcacctggtttttcaccactgcggtgacggtgcatggattcccggtataggagaaggggccggtgtaattccactccagctctgccttgcgaggagcaatggtgatgttctttgttccgctggtctgagtgaccacctggcccccttgatctgtaatggtgacctgcacagaatagctgccgctgtctgccacatcggacagggtgagaatttttccggtttcgccgctgagcaatgtctcccctttataccaggcatactcatattgcaggccgctgatcttatgatctacctgagcggtgagagtgattgtttccccataggtggcctctgtcatgctggctaccagggtgacggtgggcgtgttcaatgtccattttgcagtaagggtgatattctgggtgaccttcgtctcaaagtcccactcacttccgccgttataccaaccgccgaaggtatagcccttcttttccaggtcggccggttttgtggcaatgccgccgcttaccaccaactgcttttccacgccgctgtcaaaagtaatgctgtagattgttacggctttcgtggtagtcattccggcgttggaagtggcggtgaaggtatatgttcccgcttcggtcacagtgtaggagtccccaaccggaaccgatgcgccgccgtccttggacacggtgacgctgctctcgctggacgcaatcgttaaacggagggtactcccgccggtctcgccgccggtgacctccagagtgggggcgtttttattgatccggatgggccccacaaagccggtggtggtattggccgggcgagcagtaccgtcgccgtaagtaccggcagtgccgtcggtgacttcgtaatagatgtaccattcaccgtcctggctgacggtcacattgcccccagtgttggcagaaaatgccgtcagatcggtgggcgtttcggtgttactgtccacaatggcatatcgagcggtatccaggccgctgccgccctgatcggcaaaggtgaaaccgatggtcatatccttggactgccacccggtgggcacatcggtataggtggccgtgggggcggtggtatcgatcttatcgatggtgcagctggccgaattgctgccgccataggtattgtccaccacggagacggtataggtgttgttccgggacaccagaatcgtgccggatgaatccgtcgtggttcggccatcggggagagtgaccacataattattgtttttgactccgctcaggctccactccagggtctgggtctcattggtccagcttttgccatcccagggggtgaaatcctctgaccccttgttggacaggccgatggtgatggtgggagcatacgccttggccccctccggcgaaatcaccggataggccgaagaagtgacagtgacggcatttcccacctggtcggtgaccctcagatgcaggtaaatggagctttcctcggtttccgtggcggtataggtcagctgtggctggttccccatggtttgccagtcatcgctgggtgccgcagccgagctgctccacgcatattctgcactcttcacaccggactgagcatccagatagcttaccggcagagtgatgctgtggtagacacccgccttttgggtgggcgtgcccgcagccatatccccgatggaagcagtgggggcggcggtatcgattttttccaccgtggccgaggcggtagccgctccctccattttagatacacagcggaaagcgtaggtgccgttttgcgaaacggtgatgctgccgccgtctatgctcttccattccccctcgccatagcggtattccgccgtgccgttttctgcctctaccgtgatggtgcggcttttggcccattctctgttatccacagagacgctgatggtggggggctggacgatctccggatcgccggaaccaccgctgccgctgccaaaattcacgctggtttgcttgtaggccagggcgccgttttcattggttacccccagcacatggaggtaccaggtaccgctctcctggcgggtcatggcggtgtagccgaccgatgttttggcctgggccagttcatcgctggtcaaaaagatccagccggtggcaggcatggtgctgctttgcgaccaggcgtaccgcagggaatcggtgttttcgttggcagaggaaatggtggcctgacctacgccattggcaatggagccgttggacagattgaaacccggggttttggtgtccacattggccgtgacgttgccgcttcccaagtgacctccattacccgccatatccgcaatcacagcagtggagtcaatgctgttgacggtgagggtagtggtggcattggccggaaccgtgccggtgaaatagagcacattggtatcggccccgccggcataggtggcctttccccagctggtgttgatggtctttccttccagtgtgctgtttcttctgtccacgatctcatcgaagatcagggacacggtgaagctgtcccccacccgataggtgctgtcccccatgtcgccaatggccagcagccggggttcctgggtgtcgctgaactgatagtggtagaccacatttttcgtataccatttgtcgctattatcgccgcaggcaccgtaggagaccgtgacctgatcggtattcacaggaaaggcgatatagtccccggtgtcggttccttgccatgcttcctgtgtcaagctggactggttgggcaatgttcccgccggaaaatgataggaataccagttggtatccttgctggacccgccatgctcaaaaagtgcggtgtaaccaaccgatgtggaaacagaatagctgccttctagcttaccgccgtttttgtcatagggataaatggaggtatcagtgacgcttcccggcacgatctggacggcttgataaccactatcctgttcttttgcttcaaaagtcacataaaaacgaatattctcggccacattttgcacatatgaggtgggagatggcagagagatggtatccttttgattgccttgtttgttctctgtccagcccaaattcccatctttatcgtaatcgccccgggtggtttcgccggtagccccgtttgtcgtcttttcgtcaaatgtgttcctatccaccatttggtttcccgtcatggtgcgcttggccgtggcccggttgtcttcgatcacggcgccgccgtccacccggtaaatttccacaaagtactcccgaatggcgttggaatagcctgtggccgcttggtcgccatagacttcgttgacaccatgctccgtaatggtgatggttgcagaggactgaccgtcggcaatgatcacggtgccgctttgatggtcaaagtgggtaccgcccacagcggagccgttcaccgtgcggtaatagacggtctgctccccgtcggtgccgccgctgcggctgacggtgaaggtacgatcattgttattctgaatggtcaccacgccatagctgggaatgttgtcgccaacggtggcctggggaccgtaataggtgacacctcccgccacggcgtaggcccgggcataataggtcacgccctccgccagctccaccggggtgctgagaagggtatccggctgcgtcatatccccggttgcttcgtatttcccattgttgaccttcgtcgtggggctgctgatggtgctccagacaatgcccgcctcagtaatagtatccggccccggctccagcagggtggccgaaagggtatcgccactgtaaacaggcgctgtcaattccagggggctgggaaccacctttagggtcacactctccgtggttttgttgcctgctttatccgtaacggtgaccgaaacctgcttttcacccttgagcctggcggtatcatcattggcatccactgtaatggtgcactcactcaccggctcgttgtcggtgatatccaaagcggccttgatgacgctctgcaccgtttccccggaggtcccggtggtcacctctactgtatcacaggtgaatgtggggtgctggatatccttccacagggcggtcagggtgtagccatcctctctgtagtcgatcggttggccggggttgtatcgtgtcccgtcctcctccacccagtacaggaattgatatcccccggtgcggctgggctgtctactggcaatctgcaccgattcgccgggctgcataccctggacggcgggcataccggtcacattcagcccgcccggccgatagagaaccacaccgggcagaaccacttcgccctggatggtgttgccttcgttatcggtgatggtgatggtggcggtgttctcatggacctccaccgtatagcttctgggctccagtgtgatggagttcgccccgtcgtaggtcagcttcaccgtataatcggcgctgttgttggaattgatgttgccgggatcgttgagatagacggtcacatcatcccaggcgatctttgcggtgtcataggtataggcatacaggggtccgcagttctgtgcgcctccccgccagcagaaataccggtattcgctgggattttgtgtgtccggcactttgtaaagcccgcctttggggcaatagtcaaagccccggcccggctccaccacatccacataggttgctacatttgcattccccttataaaccctctgtatgtattttaaactattgttctgttgatccgtggcctgcagcacggcgccggagcccagctgagccacggcgtcatccgggccgtacacatcatccagaaaggcgtaggtctcccccggtgtaaatgttgtagtctcccgaaagttatagtaaataaatccctctccggagccggaaccctccaccttatgtaattccatcggcccgttctccgcggcccgggcgggcaggcgcagctggggcagcaggccccacaccatgcacaccgccagcagcaagcttgcaattcgtttggatcgtctcatgttttgcctcctccttgggtcatcggctgttttttgcacattccagctgccccaggcagcatcggtcccggccggtttccttggcccgatagagcatccggtcggtttcttcataaagttgctgataatggcatcggcccttggggcaaacacaggcccctacgctgcaccgtatgtccaaaggcctcccctgccaccggatatctttcagctgccgggccagactttcgctcagggccatcacctggctttctgtaagggggcggtcataaaggacggcaaattcatccccgccgatccgccccacccctgccccatcggcaaaggtgctgcgcagcgcatccgccatctccaccagcacatggtcaccgcagggatggccgtaatggtcgttgatctctttgaatcggtccaggtccatgagaaacagggttacgcctccctctccccccggacactccgggccggaaagcagctgctccacccggcattccaccgtggttttgttcagcagcccggtcagcgggtcctgctgcaccaattcctgcagcttggcattgatctccacgatctgcttttgctgcttcagcatcaccgcggtgtggtgggcatgggccagggacaccgccaatgacaccgaaaaggtgatagtgagattgagctgatcgccggccggcagcagcgggaccatggcggccagaaacagcagatagcctattccatatagcgcagcgctataccggggcggcgcctggatcagcagggccagtcccagcagcgccgtggtgagcaccgctgtccctgcgccggaatcccggtacagatcataggcattgagcccgatatgccacagcaaaagaaggcaggtcactgcatattggaaaatccactgtccctccaccgaagcctgccgcatgggccgccgcaaagccagccaaactgcgccgatgagaatcaacagacagtacatggaaaaataaatgcggttgttccgggttcccagtccggactgggaccagagcaggacccgggcgatgttataaagttcaatgggaaaaataatggcgcagatgatccgcagggaaaagtcatttttccgcaccgtttccgttaaaaactcccggcggatatagccgggaacttgcagcgttgcccagtgcttgttccggatcgcctttcggaacctatccatcgttgcatctccccctttgaaaccacaaattcccttttcggagcagcagaaccaaccgggcctacgccacagtgcacccccggctgtcctccaagccgccgcttgacggctcaccgcctccatgttatctttattttgacaaatggctgtaaaattggaaagcagttgttccgaatccgtccgtttctgcgcagaatttacggccattttccgccccatctcctggaaaaacccattcttgggcggctgcggagagaagaaccaaagggggaaaagattttgaagctggatgtttatcacactttgctcatcggcattacccaggcgtttctgggcagctatgtgatgctgctcatcgatttccgcaagccggtgtcccgctggcgcacccgatggattgccatcgcttccgtcattgtgggttccaatctggtggggctgctctttttcgatttctgggaaatgtattatagggtgggggccttcaccgtgacgcttccctacattctggtcaccatctggtgctccagccaccgggatttccgtgcggctttcagtctggccactggtctgtttgtgggcagtgccggaacggccatctcccttctggccaatctgctcttatgggacaatgactattttaccctggccatgcgggtggtctcctttcttgcgctgtttttcctcctccggcgtttcagtgccacctaccggagcatgctccatcaaatcaaccacagctggggtattttgtgcatcatccccatcgtttcgtttgccgccacgctgtatggcgtcaaccggctgaacattgcaaattccttgtcggcctggttccctattgccagtttgctgattgtgtgcggctgtgcctattatttgatgtatctcttttttgaaggagtgcagaaggaaaatgacgcccgccatgaggtgcagctatctgtcctgcaggtgtcggccctgcaaagccgcatggaggcggtgcgggccgctgaaaacgccatccgcaccgaacgccatgatctgcgccaccggctccagacggtggccgaactggtcggccgtggggacaaggaagctgctctgaactttctggataccgctcagaagcggctggacgaaggaaaggccatccgctggtgccgcccgccggtgctggacgcagtgttttcctcctattttgatcaggcccggagccaggacatccgggtggaggccaaaatttcccttcccgatgtgctgccggtgaacgaaggggagctggctatcgttgtggccaatgctttggaaaatgccatccaggccaaccggaatctacccctggaccggcgggagatccattgcaagatggtgggggcccctggtattatgctggaaatttccaatccctgcgcaggcgaggttttcttcgacaaccggggcctgcccatcgctcagaaagagggacacggcctgggcgtgcagtctatttctgccttctgccgcaaaaatggagccgtgtgccagtttgacctgacggaaggatggttccgtctgcgcctggtgttgtaggcccagaagcagacccgtataccccagatttcttatgacgaatgacaaaaagcccccagcgccgacggcgctgggggcttttatcttcttttatccaattttctacgagggcacattctgccgggcctggtcatactgggcctgggtgacggcgccggtggcaatgagtttgctcaccaaagtcacatcggagtttttcaaagtggcggacaggctgcgccacagcacaaaggcggcctgatcccggcggaaaatcccccgctggatggtctccatctcgctttgggtcagaatcccggtctgcaccatcatcacccgatcggtgctgttccacacaaaatcccccagcttgtcgctgtaacccagtgcccggagcacataggtatacatagtggccgcattgcagggctggttgggggcaaactctgtggccgataccccgttggtatagcccatatgcactgcataggccacataccggttggcatcctgccatccggtgatgtcggtaaagggatggctcccctcataagagagggcggcctgttcctcccccagcagccggatgagcataatcaggcattccagccgggtgggctcccgctccagttcaaagcccacatcggtgcccttgaacagccccatcacgctgagggcctgggcgtaagccaggtactggacctgatagccatccactgcatcctgggaggttgtggccccatccagcagctgcacccgggcggtatccgatgtgatacggatgccgctctggtcattctgcgggatcatataatagatgttccgggcgatctcccagcctccagaccgggcgcctcccgcggtgacattcaccacttcggtgccggtgacttccgccgtgccttcccgcatgacgaacccggctcccaaaggccctgtcacggtatctcctttgttcagctccacgatccggcctttttcgcccacctgagccagaaccgcatccagcagcggccctgccgcctgggagagcaaggcgtcttcggtctcctgggtcttttcttccagataggcattgacctcttgctccaggctggcagccttctgccgggccttttccgaaacggtgtccagatactccttccgcaacaccgacagcgtcacaagactctctccgcctccggcggccagcaccgccaccgaaagcaaaaaagccaaaaccagggctgtgccccggcgcatccatttcatcaaaaaaggtcccccttttcccatcaatacttcgattataccggaaaggggggagtaaagtcaaaaaaactttttctttttgaaaaaagccacttccagcgccacaagggctccggccaccacaatcagggccagataaccataacgccattgaagctcgggcattcgggcaaaattcattccataccagccggtgagcagcgtaaggggaagaaacaatgtggtgaccacggtgagcagccccatcacccgattttgccgggcatcctgaagggcctgaaacaattcccgcagctgcagcagatcttcccgcagcaggcccacatgatcctgaagccgctgggcgtgggcgatgaatttttcccacagctcctcctcaccgccctcctggaattgctctcccgcggcggtgagctgggtataataggcccccagctgggacagcttgcgccggtaccgggccagggcccgaagaaaggtattgggatcggccttttccatggagccttccagctcttccagcttttcctccaaccgggacaggcgcagcagatcctctcccatcagcacttccagcaattcccgcagcagatgttccgggctttgcagctggcgcagcgcaggcagacggccttccacccagcctttcacatccccttcttctccaatgagcaccagcctgtccggcaggagacagaaccccatccccagacggaaagcaccggccttctccatctccggcacccgcagcaccccggtcaggcagtcgcctacccactcgactttgcagcagcggctggggccccggccgcccaggggttcctcccctttcaggtagtcccctcgtttttgtttccactcttcccgatccataagcagcagaaaaggggaaggctcacccttcccctcaggccgccggagactccggcggccttcttcttccactttcacataacaatccattttctttgagctcctattccccggccgcttcctggcgtttcacccctcggtttttgcccagcaaagcgcccaacaatccgcaaatggccgcaggcagcacccagccgaagcccagagaggacaacggcagcttcatgacaaaatccagcgaggggatgtacccggacagcacctccagaaggctgatgacaaaggccccggcggtggcaaactggaagacccagtcgttgtgaatcttcttgtcgaaaaagctgaggaccaccagggtgagcacagcgggataaaccaccgtcaggatggggctggagaagctgacaatggtatcgatgccgaaattggacaccacggcgctgaacacacagatgatggtgacaaaagcggtgtaactcaccttgccccgggtcaaaccggagaaatagctggccgccgccgaagtgaggccgatggcggtggtaaggcaggccagagccaccacaatggccagcagaatcaggccgccgtggcccatggtggtttccatgatgcggatgagcagcgcggtctggccgatgctttgctcatagacccccgagccggtggctcccagataggccaggccgccatagacgatggtcaggcccacagcggccacaatgccggaaaacaccgtgacccgcagggcattttttccttcataatgccgctctttcagcgtggccgtgatgagcaccgtaaagatgatggctccaaacatatccatggtctggtatccggctttcaggccctcggcaaagacggccgaagcgccggtgtccaccaccgatcccaccgggtttgtaatgccctggacgatcatcaccagaagggctatgtacaaagcaggggtgaggaatttgccgatgatatcgatgaccttggaaggccggacggtgagcaggaacaccagagcgaaaaataccagggcaaagggcacccgggcctcggtgttcagcagcggggccacgcccagctcaaaggtgctggcggcggtgcgggggatggccatcaagggccccaggcacagaaaaacgctgacccccagcaaggtggaggcccaggagcccacacggcgggtgataccctccaaagaaccggtgccccggatcatagccaggatggtgagaagggccaatccggcatcggcaaaggtaaagctcaaaaagcccacggcccattgggagccggtctggaggcccagtttgggaggaaagatcatgttccccgctccgaaaaacatggcgaagagggcaaaaccaatgaccaaaatgtccttttgctgctttttcacgctaaaactcctctctgtgggggcgctcccccgctccatgaaaaatccggccctggggaaacctcctgggccggatcgggaaagatcctggaagtattttaacactttttcccggcccgccgcaacagcgggaaccgatgttatatcatatttccgtataacttcctgaaagctttgtgcacattgcccggttttcgccatcaaactgcacagaagtcccggaatgtttaagcgggcgacagctgaatacggcccttgcccttctgcttcacctggtagagcacctggtcggcccttttgtaaagctgggcaaaagtcatgggctgatccccgtaaaccccgccggccgaaatggtggaatgggccaaaggccagcattcttccattttgcgcacatagcggcagagcagcttctgcagcttttcccgtgtctcttccacctgggaggatgcacccacaaaaatgatgaattcatccccgcccagacggcagaccacatcgggctcagggaaaagcgcctccatctccccagctgcatattgcagggcccgatccccttgatcgtggccatagctgtcattgacctgcttgaaattgtccagatcgatcatcacaaacagataatccggcttttccttcagcatccggctgatctgttcttctccccctttccggttccgtaccccggtgaggaaatccaaagccagttctttttccaggtgttttttggtgttcacctgctgggagatatcgatgacgacgctgataatggccccccggccttctccgtccaccgtcttccggccaatgtcatggacccagatgtagctgccgtctttccggcgcaagcggtactggatctcgtattgttcaccggtgcggaagctgtcgttcaccgcattgaccacaaactcccggtcctccggatgaaccaccgacagcatcagcccgccggtttcttccatcagctgagggaagctgtcatatcccatcatccgcagcatcttctggtttgccacataaaaagggaacccctcttctgcataagagcccacgatgccgccgggcatcacctgggagacgatccgctgcagctcctgccccacctggcggctgagctgcgccccttcttccgccaaacggaaggggaagatctctccctcttcctgtctgcggctggcctccgacagatgcaccccatcgatcacataccggctggcgtctccctctccttcccggtggagggtcacgctcatgcgcacccggtaagcggcttcctccccctggggggatatggtccacatttccatatgggcaaaacacacatggaatcctggggcgacggtgttctgctcccagccttccaaacggaaataaaccggttccggcaagatcttccgctcctgacggaacatctggcgaaactcttcccggccgatggccacctccgattccctgatgccgatgccgtggaaccgcggggaaagataggaaagggcttcctcctcatcccccatggtcagatagctttggaaaaagccatagacggtttcaaacacatccccttcgtcctgcagctgcatcagcagcaattcttcctctttttccttgtccgacataagggcctccccttcccgttccctgggttctcctcgatctagcgtccccgctttttctgaagctctgccgcctgtatggcaaacacttcctgaaacaatttctcctcggccttgggggacaactccacccactggcatccgtaaaagcgcagatcctcctgggtggggcccttccgggccacccggcacttcagctgatgctccggcccgccggggcggaaacgctggtgggaaaactccagcagatcccccacctcataatcctggcggcaggtgatggccacaccggtggcgctgatgtccaccacggtgcaccgatggccggctttctgaccgttgacccattccaccgacccggcctggcccacattctggcggaaataggcccggctttcatttttcttcacaatattaaccgtatccagcaccaagaattcccggctccactggctcacctggccctccaccactcccagggtatcattgttcagagggacatggagcttgagaggtgtggaagccaccagaaacccttccatctcgtccccatcataccgttccaacaccagttggtcctggtgatcgccgtgggaactgagcttccccaaaaacaaaaattgattgtgatgggaaaatacagtgcatcgtttcccggtgacctccttgagcaaggagcctttttttagccccggatctgcatcaaacatggattgatctcctttcctccggcctacatttccactggctcaggcgccgatttctcctgatttttttgctcctgggccaaaaggccgtaaagggagtccacttccatgggccgatgataataatagccctgaatcatatcgcatccggcctcctggatcaggccgttctgttcttcggtctccactccttccatgcacacctttttgccaaaacggtggcaggcgtacacaatactggagatgaagtcgctttttttctccgactcggtcatttcacccagcagggaccgatccagcttgatgatggccgagggatactggagcagcatccgcagcgaggaatagccgcttccaaaatcgtccagcgccatgcggatgcccattttctcacaggcctccacaaaatgatacagcttttccggctgctcatccatggaactttcggtcatttcggccaccagatgttccccgctcacctggtatttttccagggtgtcccgcatgaagtccaggaaggtatcgtcctccatctgatgaaggctcacattaaaggtgagatagaaatccggccgataggccaccaggcgcatgcaggtgcataccgcctgctcaaagacccagcgtcccaccagatggatcatcttttccttttccagcatgggcacgaaaatggcaggggacacatctttcccctcaaaattccatcgcagcagcacttcgccgccgatggcctccccggtctgggccgataccaccggctgcaccacgatccggaaattcaccattccctgcagcacatcccggctgagggccagggccatgttggacatatggcgcattttctggatgctggcatcggaatattccaccagcatatgggaagtatcctgtttggccacccggatgagggagaccagttgttccagaaaatcagcaggcatcaaggggccctgaggataatccatcagtgcaaaggaactgggcgtgcgcaccgaaatgcccatcagccgatagccttcggtgatcacctggcggatctctccggccagctgccagggactttcctggcactggggatcgatgacggcggcgcagcgcatcccttccaggcggtaaaatgccacccggtcggacaggcgatggttcagctccccggtgatggtgctgatcagatgatcgctgaaactgcggccccgggtgctgttgatctcggcaatgtggttaaaggcaaagccgatggtgcgcagcttctccccttcggccttggcccggtccaatcggctgaaaaaggccgattcccgtggaaaattggtcaccgggtccaccacaaaagcggtatcctggtgagtgatccggccggagaaaaacaaaggccgtgtcttgtcctcgttccatttcaggatgccatagcagcgaatccagatatgccgtccatcccggcccttcacctggtagcgcagatcgtggacttcccgcttttcctgcaaaatggatttcagctctttaaaatagatctcccgggccttttcctgagggatccgatcgccccaggcctggagcaatccgggcaccacattgctttcaaacccgaattcatcccgcatattgtcggaaatataaaacagatccttctgcatatcgccaaaataaaaatagctggcggtattctgctgggagatggagcggaacaaaagctccatatcgtgataagtggtacgcaggaactgataaaacaggctgtccgccgtgcccagggccgagcagatggtggaaaggccctgatcgctctcttctctctgaaaatcgtggcgggaggtgacggcgtgacggccgttttccttataatattcccgtttgttttcatacatgttctcatcggcccgcaggatcagctcttccagattgcagatcccctcggcacaataggcatggcctatggccgcaggccggtgtccttctttggccgcctggcgcagccggtccacctggctctggaattcctcttcggatacatcctccaccacagccacaaattcatcgccgccgctgcgatacacccaaggggtttccagcacaccggcaatcaactgatagcaatagcggatcagctcatctccggcgttgtggcccatggtgtcgttggtctgcttcaagccggtgatgtcgcaatagaccacacccacatggccctttttccccaggctggcgctgtgctcaaacatggcgttgcggttataagcgccggtgaggctatcctggaagctgagggcattgagtttgcgcagcagttcccggcgccgaaaaaatattgtgacaaaataacccagcactttaaacaatgggggaatgagggagacggtttcctcattgggattgtccactcccaggaagcccgctacctttccttcgtcccaaatgggacctgtcaccagactctggatgtcctggggctttagaatggcataggccgccggatggaggccacggatgctctccagatcggaaatggtgacgatctggtcttcttccatcagatcaaacatccactgcatgctttgcacaggcatattctgcaggatatccttctgatggctgacgccctcggcacaccattcataggtgttgctgaccgcagagccattgagctcaaacacataaacccgatcacaggagaaggtcttaccgatataggccagcaccttttccaaggattgttccgggtctgtggtggtaaaaacctgctgaagacactcgctgagaatgctttcgctgcgggcataataatagggcgttttgcacaccacttccccatcaatatcaatggcgatttcgatgcggtattttcttccttcgtgttcgaacatgctgtctttgatcagatagcgtttgttcagaaccgggtttttatgggtccaggagagcacctggccaggctccagggcggcattggtgcaaaaagagcagggggattcgatgccctgaagaacctgatggcatttcttgcccagatattctttttcgtgggtatagcctaaggattcccgcaaaagccggttcatatagatgatctcataagtctccggatcggagatatagaccaattcatccagctcttcaaaaaattccagcaaaaaattcatggtatcccctctcttttcaccccgtcgctcatgggctcaccatttcttttcctttcaaaaaattatatcaccttgtgcccatatcctgcaagtacgcccggagaaaatttcctgtcccccagcggccagatggtatttttttcttttcatattttttgctcttcctcgcaaactatggctgtaaccccaagcgaaaaaaacattttgaaataaaaaaggagagtttgattatgtctagcaattccaacatgaattccgccgccaaggacgctctgtataacttcaagatggaagccgccaaggaagtgggcgtcaacctgaagcagggctacaacggggacctgacttcccgccaggccggcagcgtgggcggccagatggtcaagaagatgatcatgcacgccgaaaacaccctggccagcaacccctcctctgtgatgaacacccaggttcccaccagccagaacccccagcagtactaatccagaacctggatttgtacaccgtttccagacctgagtgaaaaagcaatccccggcgcagtcttgcgccggggattttgcgtgtcgaaaaagtggcaaaatccactttttcgagtttttgcaagggactggcggcgagtcgccgctcccatttttctttgctccgttaggttgtatacgcccaggcaaagaatgtttgctcgcggggtcaccccgcccttgagaggtgcagaaaccgacgcacaggtcgccgttttttgcaaattgattaagggtagagcaaacgatttcttttcgctatagtggtttttcgacagtcctgcgccggggattctttgtttcaatcggaaatatgcagacacctgaccgccccttaaaagccccgggctttcagatctttcaccagctccacataaaattcccgcacatcaaaaccggggatattctgccggttcaaatcgatcatatccccatgggacaggccccggcgggaaggggatctggcctgctgaaaccgctctccccactccatggcctccagcgccaccagcccatcgttgtttttttcaaaaaagcgcaccagcagccagcacaaattcagcgggaagggtgcgctgaaacagttcttcatctgggagcccacgctttggcagaacacttccggcggcggaggagtctgctcccccagctccatacaccgtttgtgggtcagatcggtgacggccgccatgaaatccgggttttcgtcccccagtcggcgcagagccccatcataccgccgggccaggaaacggcaaagggccttgggcatcttttccagcagccagtccacaaaggtacagccttcgtggggggtgttgatggtggtcagggaggccacatacggggccatacccagctggctcaccgcccaccggctctccagcccgcctttggaatgggcgatgatgttcaccttttcgctgcccgtctcctggcagacctccaggatccgctccttcagctgctgggccgactgaggcgtggccgctgccgactgctggtttccataaaagatctccgccccgttccgcttcagctccccagggatgcgtccccaataattgaaatacttccggtcccggaaaaagaccccgtgcaccagcaaaatggggtatttggttttgcacacctcattttggcggcgcaccacattcagttcctgcttggccgtttcaaaatcatattcccggcgcaccaggcggcatatcttccccgccagagccagattcacaaagggcacccaccaaaacagcagaaagagtacccgccatttgatgcccatctgcaccgaggtcagatacatccgcacaaaaccgcccaaagccgcaaggccgcaccacaaaagcagcaccagcacatgaatggtcaccggcagccagccggcctccagcccccgccggggaaaaagagagaacaggcaccagcccccggccagcagccccagcgtcagacaaaaagccgaaagacgggccagcctggcgccgcccagcatgatatgcagccgggaaaacaggggcttttcccagcaaggaacaacattcagccccacaaacgccaaaacggccagggcgtacagcgcgcagaacagcccccacccaaagccccacagggccttgcagatatccagccccgtgagcacggccatcaccagcagccccagcagcatttccatgcacccatccctccctcatttctcccagtatatccccgccccttccctccgtcaacccggcgaatcccacaacgccaccttgcacagaaaagtggggagtgatatgataaagatactatcttatgaaataaaggagcgatgggaatggaagagatcaaatatgtggatcgggtcggcaccgactgcaacaaatgggacaacatggccgaacgcttcggggacaatgacctgatggccctgtgggtggccgacatggactttatggttcctgaatgtgtgcggaaagccgcccgggaatatgccgatttcggcatttacggctactacaaagtgcccgacgcctattatcagaacttcatcgattgggaagaaaaataccatcactgccacattgaaaaacagtggcttcggttttcccctggtgtggtctcccccatcaactggtatgtgaacatgaagaccaagccaggcgacggcgtcatcgtgctcacgccggtatactatcccttcctggacgccatccgggacaacggccgccagctgatctcctgcgaccttgtgcggaaagataaggtttatcacatcgattatgccgattttgaaaagaagatcgtggacaacaaggtaaagctcttcatcctctcttctccccacaacccggtgggccgggtgtggaaaaaggaagagctggagcagctgctggccatctgccgcaagcaccaggtgttcgtggtggccgacgaaatccaccacgatctgattatgcccggctatgaacacaccgaaattctcaacatccccggctacaccgatatgctggtggtgctcaccgccggctccaagaccttcaacctggccggatgcaaaaactcctttgtcatcctcccggatgaaaagctccgtcaggaatacgatgacttccttgccactctgcgcatccgcggcggcaatgcctttggctatgtggcggtggccgcggctttcggcggcggacgcccctggctggaaggcgtcattgacatcatccacaaaaacgcccagtatgtagaagaaaccctggctgaaaagctgccggaagcggtggtctctcccctggaaggcacctatctccagtgggtcgacctgggagcctatgtcaagcccaatgaaacccaggagctgatccagaacaaatgccgtctggccgtggattacggcgaatggttcggcggcgagcgtttcggctccttcatccgtctgaacctggccacctctcctgaaaacatcaaggaggccgtcagccggatcgtcaaaaacatcggctgatcctttcttctccccaatacacacagcccccaggcggtacaaaccgcctggggctcagactgtcgaaaaaccactatagcgaaaagaaaccattcgccctacccttaatcaatttgcaaaaaaccgcgacctgtgcgtggctttttgctccgatcaaggggcaagtgtgcgccaaaggcgtgcatgcggccccttgcaaaaactcgaaaaagtggcctaagccactttttcgacacaaatagcccccaggcggcgtatgccgtctgggggctatttgcttgatcgggccatgcactttccggtgaaagacacataggatggggtatccatcacaaaaaaggagccgattctatgaatcctcaccactttcacccaggacgcggcggcccatgcagtgcagatcacgggccaggggcctttgccgccaacatcacagcggcggccggacaaaaccggaatttccgtactaccttctggacaggggactctttgcagatgaccctgatgcacattcccccgcaaagcgaagtgggactggaaactcacccggacaccgaccaattcatccgtgtggagcagggacgggctctggtctgtctgggagaccggccggaaaatctgagcgtgcgccggtatctgaccccaggctgcggcattttcataccggccggcctttggcacaacatcctcaatgcgggcccctgtcctctgaagctgtcctccatctatgcgccgccccatcatccccggggcaccgtccatcccaccaaagccgacgccgcccgggatcattgatcctgggcggccgggatcagtccagggcaatgtcctcctgggccggtccggaaatcagccgcccataccggtcaaaccgggaaccatgacaggggcaatcccagctttgctcatccgggttccactccagctggcatcccagatggggacagcggatgtctaccttgtgcacagaaccatctttgtccttgtagacccccaccttctccccttcccacaggacgatcccaccttctcccggtgggatttcctcggccgcctgggtgggcatctggaaaaagcgtttgaccaggccttttaccgccttgcctccatcggctgccatccccgggatggcagctgtttccagccgctccggggcaaacaccctggc

SEQ ID NO: 2559 - DNA, 8714 bp, Unknown
  16S sequences of unknown bacteria
tcattgggcttactacggcctgtttcgcgcaccgcgcgcggccttcgtgcgccccgtcatttctgattagagcctcgttcttccgaaactttgtcaatgctctggtttggcgtccgcataaaagtcccttcctttccccactgtcccgaaactctccaacccgctagggttggattccatccgcgctgtggcaaatgtgcgcggaaaatttgcccgccaattgcggaaatgctttcgcgtattcgcgcgccacattttgcgcggcgcgctccgccagcgccggatccaccagcgctatgcaacagccgcgaaagcccgcgcccgaaaaacgcccgccatagattccttctgtgcgcgtcataatctcataaagctgaatcagctccggcgaacccgtctgccaattttcaatgctgctgcgcccgctcgcaaagcaaaggcggccaaaggcctcgatatcgcccttgcgccaagcctccacgctctcttccacgcgcgccatttccgaaaaccagtgttccgcccgccgccgccacggttcgggcagccgccacccatgcgcgcggtatatcggatccggcacatcccgcatgttggtttgcgcaaagccggcatactccattcccgcataggccttgagggcatacgccgcgctgcgcagctcgtccacgcgcgtattgtatccgctgcccgccagagagcgctccaggcccgaaaagaacacggcaatcacaaagggcttcatgccatccgggcgcggcgcgcaaaaaaagccgccctcccgaaaatccatgcacaaaagctgtcctttccgcccatacacctcgcaggactggtccagccttccgcacgccacgccgacatatcggttttccgcctcttgcgcaatcgtcacatactcctcgcccgacaaacctatcccattcaccgcgcacagcgcggacagaaacgcgaggatcaccgcggaggaagacgacaagccgccaatgggcagttccccttccaccacggcgcacagcccggcacgcaaggcaaaacggcggcccagcgcgatggtcgcgccgcgcaaatgatccgcccaatcgccctgccgcgttggcggcgtggaggaaacgctccaccgcgcgcaacccgaaaattgcaaagagcgcacctccaccgtgccatcgggctttgcgccataggcaaggtggatccccttatcaatggcgaatcccgtggttctccccaaattgtggtcgacatgcgccccaatggggcacacgcgataaggcgcaaaggccgtcgcctccgcaggacggccataccatctttcaaagcactctgcactgtgcacggcgcttctcccccttattccattccaggcggcaaaagcgcccattttcgctattataccagattctggtacaaaaatccactaccccgtacaagtcaaagggccagcgccgccaggcgtagcagggtgaccattgcgaattgtggatagtttactcccccgtccaccagcttgtagggacagcgtcagacggcggatatagcttttgccaaagcggtcccaggagaccgccttggcgatgttcaggccggtgcgcagcaacagcagcagcaaaaatcccgcaaggcccgccgccagcaccaggcggccgttttcactgctgccaacggcgtcgatgtaaaggcgcagcgcccatggcaggaaaatgtccacccccgccacggcgaacatcgcgcaggccacggccaaaaagcggccccggtagcgcttcacggcgtccaaaaaccccaaaagtgcggatttcatggcggcaacctcctaatctcgcggtttatacgacaaattatacgccaaacgccgggcaaaatcaatcgccccaaccatcctggtcccaaagaagattgcgcggaggatccgctagcgaaaaaaatcgcgcatataaatatgagaaatgttgcataaaaaatttaatatatagttcggatgatatacaaaaaaaaaaaaaaaaaataacccacaattgcgcgatattgtgatataatataagaggatcggtggcggcgatattgcgatacgcttttgcgccaggtgccgctccttgcgcaagaaaccatttcgaagaattcatgcaagtacgagcaatattgcgctgcgaagcggcatcggatgcaaagcatggctcagaaaggggatgcttgattttatgcaaaggatgatgcgctactttcggcagttctatgcgcaatgcggcaaggcggtgctgctctatttgctgctgaccatcgtgcacaagattttggcctttatttccccgccaatcacgcaatggctgatcgacgcggcgatcgcggggaatgcgagcgaattttggcgcatgctaatctttgaggtgctgactacgcttgcgttcatggcggcgctgtatctgcgcaatgtacacggcgacatcacggaaaaccgcgtggtggcattcgcggagaaaaggacattttccgatatgctgcgcatcccctataaggagctgcgcaaaaagcccctgggccattatctacatatgatcgacagggacgcggagaagattacggggctggcgttttacgacatcattgtgtttgtcacgaacatcatcatgaccatcgccatgattgtctatctgctgtattgcgattgggtgctcacgctgatcgttctgttcgtacctccggcctttgtgctcctctccaagcttcagttgccaaggctggaacggtgccaggaggaggtgatcgcgcagcaggaaaacctcaacgataagctcgacgaatgctataacggcaacgaaagcattcgcgcctccaacgcggaaaattactttttgaagcggtttgaaggcgcggttgggcaatggttccgcgccaaaaaagcgtatgtgcgcgccgataaccaatatgacatcctgtcggttacaggcctgatgaacttcgcggacactgccatttactgcctgggctgctggcgcgtgctccagggcgaaatgaccgttggcacgattatgaccttttcgctctatttttccacgctctggaacagcgtggagggatttatggatttctttaaggagtaccgcgtgaagcaggtttccctggctcggctcgacgacatgcacagcatgtgccccgaggaggcggcgccgcagggagaagcgctcccggcgttcgaaaagctcacatgcgagcacatctccttcgcctatgaggataagccggtgttcgcggatttctcgctggaagtcaggaaaggggagcgtgttctgatcacgggcgaaaatggcagcggcaaatcgaccatcgcccgcctgttggtgggattgcttgcgccggatcgggggacgattgcctacaatggccagaacatcgcgtcggtggatgtcgccgccctgcgcgaaaaggtgctgctgattcccgcggagccgttcatcgtggaaggcacggcggaggaaaacctgtggggtcggccgggagaccgggcgctagagcgctttggccgcgaaaggcggatcgaaaaaaatggcggcaacctttccggcggccagaaaaagcaattgcaactgtgccgcagcctggccgccagcgcggaagtgctgattctggatgagcccttcaattttgttgaccgcgaggcaaaggaagcgttttggaacgagattttgcaaacgttctcggatagaaccctgatcgtgatttcgcacgatcccttcccgggtaaagattgcgaccgcagggttgaagtggggcagaaaagttcagggataaaaagcactttctaattttctaaatcaatggcatcgccacttgagcgtgcgttgtaattttacctggcgtctggtataataaaagcaatccctcaatcgtgcccatgcggcccgttttgtgccctggcccgctgccgcgggcaggtataaaaccggtttgtgtgggcatttgggtgaagcaaagccgtaaaggggagttgcaaatggatcgaacggaagcgcgcgcgcttgccaaagcgcttgtggagcaaatgacgctggacgaaaagctttctcagctcaaatatgacgcgcccgccatcgagcggctgggcgtgccggcctataactggtggaacgaggcgttgcacggcgtggcccgcgcgggcacggccacggtgttcccgcaggccattggcctggccgcgatttttgacgaggacttccaccgccaggtggcggaaaccattgccacggaagcgcgcgccaaattcaacgcgcaatcgtattttggcgaccgcgatatctataaggggctgacgttctggtcgcccaacatcaacattttccgcgacccgcgctggggccgcggccaggagacctatggcgaggatccgtaccttacggcccggctgggcgtggcctttgtgaagggcctgcagggcgagggaaaatacttaaaggccgccgcctgcgccaagcatttcgccgtgcattccggcccggaggccacccgccacgaggcggacgtgcatcccagcgtgtacgacctgtgggatacctacctcccggcctttgaaaccgtggtgaaagagggcaaggtggaggccgtgatgggtgcgtacaaccgcgtaaacggcgaacctgcctgcggcagcaagaccttgctgcgcgatattttgcgcgggcaatggggctttgagggccacgtggtgagcgattgcggggccatcgcggatttccatatgttccacaaagtgaccgataccgcgcccgaaagcgcggccatggccatgaacgcgggctgcgacatcaattgcggcaatacctacctgcacctcaagcaggcgctgacggacggactgatcagcgaagaacaggtcaccgaagccgccgtgcgcgcgttcaccacgcgctacctgctgggcttgttcgatgaaatgtgcgaatacaacgccatcaattaccaaaagaacgattcgcaggcaaacgccaaccaggcgctggtcgccgcgcgcaaatccatggtgctgctcaaaaacgacggcatcctgccgctggacaaggataagctgcgcgccatcgcggtcatcggccccaacgcggatagccagattgcgctggaaggcaattacaacggcacttcctcccgctatgtgacgttcctggagggcatccgcgcggcttgcggcgaggacatccgcgtgaactactccaccggcgcgcacctctacaagcgccggagcaccgacctcgcggagcaggacgacgaccggttggccgaggcggtggccatggcgcacatcagcgatgtggtgatcctctgcctgggcctggattcgaccatcgaaggcgaggcgggcgacgccagcaacgagtattcctccggcgacaaggtcgatctggaattgcccaaatcccagcggcaactggtggacgccatcctgatgaccggcaagccggtgatcaccgtggtggcggcgggcagcgcgctgcgcgtggaagagggcaacgccatcctgtgggcctggtatcccggtcaggcgggcggcacggcgctggcggacatcctctttggcaaggtttcgccatccggcaagctgccggtcaccttctaccactcggcggacgagctccccaagtttgaggattacaccatgcgcggccgtacctaccgctatttccagggcgaggcgctgtatcccttcggctatggcctgagctatacggaattctattattcgaacctcgccttcgatccgcaaaagatggaattgagcgtgaacgtgcgcaacggcggcaacgtggagtgcgaagaaattgtggaagcgtacattcgcgatctcgataccaaatcgcacggcctcaactacagcctttgcgcctttggccgcgtgctgctgcgcccgggcgaggaaaagcgcgtgaagctgcccgtgcatgcggaagcgttcaccacggtgagcgaccgcggcgcgcgccagaagcgcggcaagcatttccgcttctgggtgggcggcagccagcccgacgcggtgagcgagcggctgttgggcatcgcgccggtatccatcgatgtggaaatggcgtaggattttggcggttagttgtttcaaaccccttgcggtggggtattcataaaacagagcgccaaaaaggcggattcagcggccgcgcctgcgcgccgcgcaccttttcgacagctcataagttgttggaggtcgatttgttatgaagaaactgtttgcttgcgtgctggctgtgatgttggcggtttccgccgcggcttttgcggaagaggccaagccggaaattcgcgtggcttctctgaaggggcccacgaccatgggcctggtgaagctcatgcaggacgatgaagcgggcgaagcgcaaaacgattacaccttcaccatggaaggcacggcggacgccatcgtccccgccatcgtgcgcggggaactggacatcgcgctggtaccgtgcaacctggcttccgttttgtataacaacacggaaggcgcggtgcaggtgctggccatcaacacgctgggcgtgatttacgtgatcgaatcgggcgattccatccagtccgtggcggatctggcgggcaaaaccctgtattccacgggccagggcaccacgccggaattcgcgctgaattacatcctggagaagaacggcctggatccggccagcgacgtgaccattgaataccgcgcggaggccacggaagtggcggcagccgccatcgcggatcaaacggccatcgccgtgctcccgcagccctatgtcaccaccgtgctcaaccagaacgagaacatgcgcgtggcgctttcgctcacggaagaatgggacaaggtgggcgaaggcagcgccatgatcaccggcgtggtggtcgcgcggcgtgcgttcgtggaagaaaatcccgaggccgtggccgcgttcctggaggaatacgccgcgtccaccgcgtttgtgaatgagaaccccgccgaggccgccgtgtggattggcgagctgggcatcgccacggcggaggtcgccgagcaggcgattccggcctgcaacatcgtgtgcatcacgggcgaggaaatgcaggaaaaggtttccggctatctggaggcgctctacgcgcagaatcccgaagccgtgggaggcaatttgcccgatgcggatttctactacctgccgtaaccgaatcatccgcgtgctggcggtcgcgttctggattgccgtatggcaaggggtttccctggccgtcggcagcgagatcctggtcgcgtccccagcgcgcacctttggcgcgctcctttccctcttgcgggaaggagcgttttatcgcgcggtgctcggctcgctgatgcgcatttgcgcgggctttgcgctggcgctggcgctgggcatcgcgctgggcgcgctttcctttgtcgtgggctgggtgcgcgcgctgctgcatcccgtggtttccgtggtaaaggccacgccggtggcctcgttcgtgatcctggcgctgatctggatttcctcgaagaacctttcgatcttcatttccttcctgatggtcttccccatcatgtacgaaaacatgctggccgggctggaaagcgccgacgccaagctattggaaatggggcaggtattccacctttcgcgcatggcgcgcattcgggccatctatttgcccgcggcctatccatttttgctgtcggcagcgcggctttcgctgggcatgtgctggaaatcgggcatcgcggcggaagtcatcggccagccccggcagtccatcggcgcagaactgaaccaggccaagctgtttttcaacacgccggatttgttcgcctggacggtgaccatcatcgtcgtgagcgtggtgttcgagcggctggtgctgtgcggcatccgcgcgctgatgcggaggtgggaacgtgcttgaagccatttcggtgagcaagagctttgagggcaagccagtgctgcaaaatgtcaatctggcggtatccggtacggtggcgattatggccccctccggttcgggcaaaaccacgctgctgcgcattctgctgggcctgctcgcgcccgacgcgggcgaagtgcgcacgggcggcgcgcgcgtcggcgcggtgttccaggaagaccgactgatcgaacacatgacggcgctgcaaaatctcgcgctggtggcgggcaaggccagtcgcgcacagcttcgggagcatcttatccgcctgggcctaaatgcggaggcggataagcgcgtaagcgccttttccggcggcatgcggcggcgcgtggccattgcgcgggcgatcgtctaccagccggacgtgctgctgctcgacgagccgttcaccggcctggatgaggagatgcgcgaacgcaccgcgcagtacattctagcgcacatgcggggcaaagacatagccatcgtcacgcacgataaagaagaagcccgcctgctgggcgcgcaaaaaattttcactcttacagatacggttttgttggcataaaaaagcgcgctgtgtgcaaaacgggttttgcatacagcgcggcgcttcgaatccctccgtatctcccttttgtcaatccctccgtcacggctgcgccgtgccacctccctttgcacaagggaggctttttgacagtgcaacttcatactggtgtagcactaaccaaaagcctcgtattatataagagtagtatttatagacctctctccagaggtgtgctaca

SEQ ID NO: 2560 - DNA, 32759 bp, Unknown
  16S sequences of unknown bacteria
aaagtgcgccgccccctagggggcaataagtaaataaatcaacaacttaaacttttatatttacaaaaactaacaatatataaaaacatctactgtcagttatgcactggcgttttgaaaataaaatacaaaacaacaataaaaagattgaaaacctttcagcctggatttatttattttgtaaaaaaaatactatgaaaatattacattatatagccgcaatttcttttctcgctacgccaattttcgccgcaaattcactcgaaggcgaatatgtaggcaaagtcgatgcgaaagaaggatattttaaggataaccccctcattgccgcccaagtatatcgcgaaggaaatgaatataaggttgtaatctacccagacctctggcggcgcgcacagccttatgtaaaatttaatgcgaatgcgaatttagataaaatagaattcgaccagggcggatggaacgcttttaaaggcacaatatcaaagaacgaaatcacaggcgtcgcgatttattccactaaggaaggcaaaaaatccgcacctatgaaattgtccaaaataaagagaaaatctccgacactcggcaaacgcccgccaaaaggcgcaattaaacttatcgacggaaaatctttcgacgaatgggtcgccactaacgggcagccaatcaggtgggaaattgtcggagacggctcagtaaaagtttccgacacagtctcaaagtgggtcgatattgcaactaagaaaaaatttaaaaacattcggctgcatgtagagttcatgacgccggacgaacgctccaagccgctcgggcaaggccgagggaactcaggcgtttttgtgggcggatttgaagtacaagtgctcgactcttttgggtcggaagggttgtggaacgaatgcggcgccctctataaatatttgcctccgcaaattaacgcttccctgccccctgaaaaatggcagacctacgatatagaataccactcacccgtatttgaaaacggaaaaatggtaaaattcccgcgcattaccgttttccacaatggaatgaaaatccacggagatgtcgagctgcgcgaagctactgccaatggttctgcctaccgcagcataaccggaatgaaagacgaacccttttccataagacttcaaaaccatatgaatccggtaaaataccgcaacgtttgggttcaggaaatcgactaacacttttccctctaaaaaaaacggagctgagattagctccgttttttttatgaacatcaattttgcgtttctaaataaacttttttaattatctctgcggccattgtttttttaagcacaatatcggtttatataagcgctttactcccgagttcctcttattttaaccgcaaagaactatcgcaattagaaacgttaaaatagatacaatgtgtgctgcaaaatataatatgcgcgaagaaagctttaagggacaataaaaattctatgggatttttcattcaactttatattatctataagataagtctgttttggaaacaatgaggcttctttgcccaattttgaaaataaaagatgaaaaaaaagaggcaacctacggcaacatgtgttggaattttcgaaattttatgcaaaatgaagaaaacagtacgcaaaaaacttttacgcatactgactcccgaagtactgtggctcaaacataaatatcaatataggaaatgatttccctataagccacaattttctaaaaacggccttgccgttttagccttattagggttttagaatatttcacaaccccaacatctaaaaaaggctgccttgccgagcttccctttccccgctctcagggcgcagcttttttaggaaactcttccggtgttcctttgtcggaccaaagagcataagcgactgcaaatgtgccgccgttccgtatcctttatgcttttcaaagccaaatctcggatatttttccgacaactcctccataaatctgtcgcgggtgacttttgcgactatcgacgcagccgctatcgcaaggctctgtgcgtcgcccttgacgacagccatatgcgaatacgggaatttcttcatttcccttccgtctatcagcacttgcgcttttgacgcgtccagcccggactcaccaaagagcgtggcggccgccccggcagcactgagattcaatacgagcctttcatttagcgctcttgcggcgcgcgccatcgccatttgcgtcgcaacaagtatattttgcgactctatttcctcaacactcgcaaaccccgcctcaaaatcaacatagcctgcaagctttaattttttgagctcttcgtacagctcttccctaacctcgcgggttagctgcttggaatcgttcagcgccgaaagcggggaaactaaaacgcccgacaaatatgcatcggttctcaccgcaactgcaccggcgcatacggggccagcaagagccccgcggccggcctcgtctatgccgagcacataactgcggccgcctgtatattctttgtcgaactccgcgagccgcgatattttagaactcggcggcatttttttattttatcttttcaaagtacggaagcctatctatcggaacatctatctttattttttgtccgcccttccaaacttttccaaggtcgtctttccactcgcccgcaggaagcataacttcgcgcgaatcttccttagtcaatactggtgccacaagatattttgggccgagcataaactggtctttgcaattttcaaagccctggttcgggaattcgtactccatatgccttacaatcggctcgccggtcttggcggcgttgtgcgcaagttccaatatatacgggccgaactgcttgtgcaggttcgcaaatttcgcgcaaattccgaggtgttttttgtcgagtattctccacggagccactgagaactgcatcatcggcataagcgcatgcacttggcatgagcgcacaatgagtttctggtctatttttgaaacgtcaatcggggtcatatcggggtttaggaacgacctaaattctccgccgccaatcatgtcggggcacgtgtacgggtgtcccaaaagccccgccgcgagcatatccggtatcaactgctttatgccgtcccatgaatacggcttgtcttgcagcctctggacaaggggttgaagccccattttccagcaggcgcgatattcgttataggggaagtcgagacccatttttgcccaagcttcgcaataatcggacggtgtcgcgccttcatagaagtcgatgtctccggatacagcgcctttgtcgccggcgtcaaatttaaagccgtcaaccccgtagagcttttgcattttaacaagcttattttttagatgttcgcgagctttgggatttgtgaggtcgtagcaagcgcttatgccgttccaccactctaccattgcggggctctttttgcccttttctttaagaagcagtccggctttgttcaattccctaaactcgggtgaagcgggggagacaaacgggcatatccagaacataactttaaatccctcggcatggagcttgtccatcatggcctttggatttgggaatttgtccaccctaaaatcaaaattaccgtagtaattttgccagttgtcgtcaaccatgaaaactccgacggggaaaccgtttttgataacattttccgcgtatttttcaatgtcggcctggttctggttgtacatcaactcaatccacgtattgtactgcggcattgaaaagaaaacctcctggggaattgcgccggagggctcgaaatgtattttcgacgccgcaaggtaggcgtccttcaaagtttttccggcagctacggggtttattttttcgtattcgctcgtaatggatattacgccgtttttaaccgagaatttaaaaggcttgtcgctccagatatacctgcccttcgacgatacgaatagcggcgccgactggttcgaataattgcttttcgacaaatccttttctgcgaaattatcatacggcatatgcgagccgaaaaatgttccagccccccaccatttttcaccttccaacggagttattacggaagtgtaagtttcggcgtacgccgcgcccgcgatggcagcggctcccaaaagcagtaaagatttcatcttcataatcatagacaattttggattatttaattttttcgaagtacgggagtctctctattggagcggacacttttatggttgtcggcccctttaccacgttgccgagatcgtccttccactcgcccgcaggaagcattacttcgcgctcgtcggcttcggttattattggagccacgagatacttggggccgagcataaactggtctttgcaattttcaaagccctggttcgggaattcgtactccatatagcgtacaatcggctctccggtttttgaagcgttgcgcgcaagctctaaaatgtacggcccgaatttttcgtgcaatctggcaaattttctacaaatttccatattctttttagagagcacgcgccacggagcaaccgagaactgcatcataggcatcagcgcatgcgcctggcatgaacggactaccagtttttcgtccaattccgcccctggttggaatgacacatagtcgccgcctcctatcatatcggggcaagtgtacggatatcccattatgccagccgcgagcatatcgggaattatctggcgcagatctttccaagtgtggtgcttgtcctgcaaacgcaagacaacaggctgccctcccattctcgcattcgccctgaattcattgtaggggaagtcgagggcaaattttgaccattcgtgggtgtagtccatgggaatttgatcgggcttgttaaatttgaagtcgccgactacaaacttagtgtcgccggcatcgaatttaaagccgtgcatgccgtattttttctgcatatccctgagcgtgcctttgagcgattccaccgcctcgggtttggtgaggtcgtaggcggcgctgtatccgctccaccaatggaggattccggggctcttgcgcgacttgcgcataatcaaaagccccttgtttttaaggtcgcggtattcagacgagtcgggcgcaacaaagggcccaacccaaagcaatgtcttaaagcccatgccgtttatcttatcgaacatagccttcgggtctgtaaatgcctccgggcgaaattcgtagttgccctggtatttttgccaaccgccgtctatcataaatacccctattgggaatttgttctttatgatgtcgtcggcgtatttctctatgcccttttggttttggtcgcgctggagttcaatccaggtattgtattggggttctgagaagaaaatctctggcgggattttccccgacggcgggaaatgcttttttgccgcagctaagaaagcgtcttttagtgtcttgccggcgcgtacgggctttacttcctcgtaatcggaagttattgtgatttcgccttctttcacggagaatttaaagggtttgtcgctccatatgtacctgccctttgacgatacgaatagaggatcggcctggtttgaaaaattggacttgcctatgtctttttcggcaaagtcccgatacggcatatattgcccaaagaaattggcgccgccccaccaatactcgccgtcgaggggctttattttcgacacatgcgactcgccgaatgcggaaaccgcaagggcgacagacgctatcgcagccgtgatttttatttcggagtttatcatatttattaccgttattttttagcttccgcgaccgcctccgcggccgtcttaaagtgaagttttgcaaattttttaagcgcgtcggcgccgaattttctgacaatttccaccgcctgagccttggcttcgctgccggagccctttaacaatttggcgccgaattcgtcggaaagtttttttaggctatatatataagtggcgcgggcgataatcgaggccgccgcaacgaccgggtcggattccgccttcgtttccatctttagctcaaatcccgggattgaaagctgtttttggacgagcggctgcttggtaaactggtcgagcatcccccaccccacatgccgcacttcaagcgcgctttttatggactgcgcatgcatccacgccaacagtttgttcagattccgcccaaattttatatagagggcgttgtatttttccattcccgcgtacgaaacttttgcgactaccccttttgtctgttttatcatgcgcgccatttgcaatacggcgttgtcgctcgtcacttttttcgactccttcaagcctttgtcaatccatagctttacggcgtcggaatccgccactacgcacgccgaaacgagaggcccgaagaggtcgccctttccgctttcgtcaatccctgcatgcggctcaaaccactctggatgagacaggaactcgtagcccatctcaacgacgcccgttatctcgggttcgagcacgaattgcacaaagctttccgtccctttgccctgcaccacgagctttccagatttgtaggcaacaacattcacgtccggacctttgtatgcgaagcgcgaatagtcaaccctatatggcgcccacaaatgcctgtccagccatttgtcgagcttgtccatctgcgcgtcggtaagagactttgtgtataaagtcttttttaccggttcgtcggagacagtttttttcttggcggccatttgtatggtgttgctaattgtaataatttagtgaagcccttgcggagaagtccgccgggcgcaaaacggtttgtattatcgcaaattattttacccgacttcaagccctattttttaaattacccgataaaaaatgcgcaatcccgaggaaataatagcttttgcttaatccgaaaattcttgaactttcaggaaaattttgcgaatgtggtggtaaatggggattaattttgaggaataatatatgagcaaatccatacttatagttatttgcgattttcttgtactgagcctgataagccttgtaaactttgaagatatgccttccgcaacgcaggaggacaagcagaaagaggaggcgattgtcgtcaaaagtttcgcagacgcgcaaatggtggacctattaaagatgtcgctcgacagcgagcgggaaaagcgcgaagcgttaaagtcggacgtcgaaaagctctcgcaagctgcaaaggagagcctggaacagtcggacaagcagcaaaaaataattgccgcccgcgaaaagcagcttgaagaaatgcgccttacaaaagaatcggtcgagcgtgaaaagcttaccattctgcaaaagagcaaagaacttgaaaaacgcgtctcggcgagcgagacaagaaacgccgccctacaaagggaaattctaagcgcgagcgaaaagctcgaaaaatccgcccaggagagaattgatttgcaaaaaaagctcggagacatgcgcgaaaccgacgtcgccgcgcgaatgaagcttgaaagcgtccaagccgagctgaaacaaaataaggaaaacctcgagcgcctacgcaaggaaagcgaatcgctgaagctcgaaaacaaggcgatagaagccgaaaagagagcccttgcaacgcagcttgaagttgcgtcgacaaaaactcaaatatacgaagaaaatttaaagagagcccaggcgctcgtcgatatcgaaaagacggaaaagacaaaaatacttgtgcacgccgacaagcttgcagccggcgtaaacgagcttgcctcctcccaaaagcagatggcaacctcgcaaaaggagattacaaaacaggtaaaagacctacgtccgcaaacgccttcggaaatattttcaaaaatcaagtcgtcactcgtaaatataactttcacacatacgcgcaaaggccttcttggtgaatcggtgacaaaaactgaattgcgcagcgtgccgattaaaatagacggcaaatattggctcgccttttccgccgactcaactgccctcgccccggttcaaaacaaatatttcccgccggaaaagatgtcggtctcggtatcgggaaattcctacaggttcgagccgttggcggtatattctctcgcgaacgatccgaggcttttggcgattcaagtccccgcagagttcatagagaaagaaaagatagagccgctcgttccggcttcaaatttcttccgtttcccggaatgcattgttgtaaattctaaggatttgtattatgggcaagttccgtttagggccgatttcaagaaccagtcgtacgcgcggcttgatgtcggccttttacaatcaattttcgggacttttgctccggcctccggggacatagtgatttcgagaagcggcgaatttctgggatttatgaccgaaggcgacatcgccgcgcttgtctcgcagctaaaaacggcgtcgagcctatctatgggcgccaaatatacgcctgcggccgcaaatatttttgtaaattcaatttcacacagggtgcgcgccattccgtattccctaaaataattataagcataaaattttgcgaaaaaaaaatgcccggaaaatctccgggctttttttgcatctggatcattccgccattttttactaaaaaacactcaatcctgaaaggcagatttaagcatgctaattggcgcgcacaccaataaaacttttaatataagcaagactgcaaaaaactaaaataaccaagcccttgggtatgccgacgcaaaagcgactacaagcttgcttaaaaaagaagctcctttgctcggctaagtgcacaaagcgacaaaagagagccgatttacactgcaatttcccgtttccgtgaaatgcaaaattttagggaattatccactcgtagtgataccttgaaagcattcgcgcccccgtctttgtcacggcaacagtatcctcgattctgcaaccgccgacacctctataataaagacccggctcaacagttactacattgcctgcgcgcagaatgcatttgcgggcgcccagcgacggagcctcatgcacatcgaggcctacaccgtggccggtcgaatggaaaaatccgcaccaaccatctttcgaggcctttgtttcaaatccgttttcagcaaaaaagtctttcacatgcgaatgtatctgcgccccgtctgccccttccgatatgcacgaaagcgcgattgcctgtgcgtccaatacagtctctacgaggcgcgcctgtttggcggaaggctcgcctttgagaaaagtgcgcgtcatatcgccgtaatatcccgatttttttaagcgcgggaagatgtccatgacgattagcgaatttgcccttactacccccgagccctcgcagtgcgggtcgcacgcgtcgttgcccgcggcgacaatcgtgtgcatggaatcggctccgagcgacagcgccgcgcgctctatctcggagcgcaggaattcgcacgtcagcggttttgactcgaagaacagccgcccgcggtttatttttgaaagcctcaaaatttcctctgctattgcgaaacccgccgatgcggccgaatttgcgcgcgttatttcgccaagctcgtattcgctttttatggcgcgggcgcaaaaaaacggagattcggctacttctacatcaaaccccgcctccaatagatctctgtaaaatttggatggaaaattttccgggacgctgagggcggaaatttttttcgattttaataccgagcagagcgcggaaaattccgaatacggcattttcttgcgcgcgcaaacttcggaaatatcgaatatttcgtcgaactttgagccgcgcgacgcccttcccgcctccaacgggctgagcaaagcgcatcttttcccgccgagtgtgaatgcgaaaaacgggtccggaatttgtattccggaaaagtacaaaatatcggcgtcgtattcagagctgccccgcaatagaatttccctcttttttcgattcattgaaattattgttgcgcatctattttgtttatacaaattaaaaatatgcaaattatcgacttttttaacattcgtaaattggctttgtgcggggcaatatttgcttcaatcctgtgcggttgccgcgatacccctccgaaaccagccgcctttgacaccgaatttgaaatgtccgtcggcgggaagccgttcaaggcggagatagccctgtccgatgcagaaaaggcaaaagggcttatgttcagggaaagtcttgctgaaaacgggggaatgatatttgtttacgataccccccagcgcgtctctttttggatgaaaaacacaaaaatcccgctcgacctggcgctgtttaccgccgacggaacgcttgtagaagtaaaaaagctctatcccaacaatctcgacccggtaaaatcggcgcgcggcgacatattatattgccttgaaatgaacgcgggctggttctctaaaaactcaatatttcccccggcaaaactcgatatggctaagctaaaaagcgccatagacgcaagaaaatgactaaattatcaaaacgctcaaaatttttaataattgtcttttcgctaatagtctccgcttgcgtctatgctgcatgctgcacaagcttctactcaaaaatgacgccgtggcagcttgaacaaaaaatagaccccgacgcaaaaacgggcttaaccaagctaaaagcgcacatagattcggcgaccatcgcgggaatcgccttttgcgcaaccgcaattttatcgtttgccgcgctaaaaaaattcgcaaaaaaatgaatgatacaatagccgcaatatcaacccccacgggagagtccgcaatcgcggccgtaaggctcagcgggcccgactgtctaaaactcgcgcgcgaagtttttttgcttgagcgccagccaaccccgcgaaaaatgtcgtacggcatataccgcgacagattcgggaacaccgtcgacgacgccgcattttgcgcctacgcagccccctcctcctacaccggcgaaaatatgcttgaaatatttccgcacggcaatccgttcatactcagaaaaattctcgacgacctcgctgcccgcggcgccagactcgcccagccgggagaatttacaaggagggcttttctgaacgacaagttcgacctttcgcaagccgaggcggtagcccgcataatagacgcccggtctgacgccgcattgtcggcggcgcgcaaacaatttggcggggatatcggtaggcgcatttctgcaatatcctcagaagtgctcgatatgaaggcgctaattgaggcttacattgacttccccgacgaagacttgcctccggaagattcccggcgcctttgcgaaactgcggacagagtctacggggaaatgtcgagactcgccgaaacttcaaagtacgattccctcttgcacgacggaatcaaagttgtcatagccggagccccaaacgcagggaagtcgtcgctcatgaacgcgctgcttggcagggagcgcgccatagtaagccccactgccggaacgacgagagactttatagacgaccgcatgatgcttggcgaatttgtcttaaacctcaccgacactgcagggctcaggagggacgccgaagacatagaggaggagggaattcgccgcgcttacgaaaaaatcggcgattccgacatttgcctgcttgttctcgattccgccggaggcgtccgcgagtccacgcgccgaactcttgaaagcgcgggagaaagctcggtcatagcagtgcttaacaaatgcgatttgcccgaagcccgtccggaagattttgccaaaatgctaagcggcgttgaaaccgtgaaagtatcctgcaaaaattttgacgggattgaggcgctaagggaaaaaattttggaggtaataagaagcaaattcataaggcccgccgcggacgatgtgacagtcggggcgcgccatgccgaggctttgtcgcgcgctaagcagtccctcaaatgcgcaagggataaaataatagagtccgccccggccgagctaactgcctccgacctctcagatgcgctcgacgcgctcggcgagattgtcggcaagaccgattgcgaggaggtcctcgacagaattttctcaaagttttgcataggcaaataacaatgtggtactataaaaaagacgggaatattatagggcctgccagcgcgcgaaaaattgtctccatgcgcgagcttggcataataacggattccacccccgtatcgcggaagaggaatgcaaaaaattgggaaacctttggcggtttgtcggaaaagataaatcttgaatcatcgcagtgggacaggcaaagccatgtacaatccgggcttgcaaaaaatacaatgattttgagggcgctactggtatcaacaatagccgtaatgtgcgttttaatattttacacgcttcaaaattacaatttgctcggagaatatataaacggagttgaggagaataatgagatttttttcgatatagaagtctcgacctcagtcgatacgcgcaattttgcgaatattatgcttcttgcaatgcttgcggcttcatttctgcaaagcctaaaatgggcaaaaagcgcatttctaagcgcgtacgcattatcgcccaattttcggctatcatttagttcagaaaactcttacaggtggttcatttttaggccattcaaaacattgcgaaaaatttattatgcagccgcagataaattaggcaaaagggtttcggtaggcgataaaatcttcttttttgcgctacaatttctgagcattttgtatttcgtgttaatctcggtaaacagcgcaaactacatatacctaaactcattcaacttatcctctgcaaaaacggcatatttttaccttatctatacccaatttgtagggatatgcgcggcgtttctttggattatctgcattacaaagattgatacctcattgcgcgctgcaaagaggcggcacaggcatcatagccacacctaaaacgagaatcgcaattctgccgtttaagacttagttagaagcggcaaaatccaaatcgacgacaatcggcaggtggtcgctcgcctcccgcgccgactggcaatttattatcttaggctctcctgcacagctacgcatttgttgattcacgagaaaatagtcgtacacataaggtatgtcctttttcttccaatagtatgtgtaagctgcctttgaggagaagtcgccgccgccgagcatcgaaagttcgagctttttaaaattgcgcaagagcgcggaggacggttcattgttgaaatctcccgcaacaatcactggcgagccgccgacagctggagccacgcgggcgtctatcgccctaacctctgcaaatctgaacggataaaattcttcgtccgcctttctcgctcccgacttgctttttagatgtattgcaaaggcgaaccaagtcctgccactggaagtaaattttgctcccagcgccccgcggggcgaaaaaactttttctcctttaaaagcaaaggaaacatcagagcaatcgtagaaattctgcgggcgcaaacgcgacattattgcaacgcgcgtgtatgaatcgcgggacgtagttgcgcaatacggataagacagtccttcgcgggcgagcgcgtcgcgaagctcggcaagaaacacttcatcgcccatttcctgaattagaaccacatcagcatttatctgaataagagtctttctaagagccgccttttccgattcaggctttggatgctggcgccacttgccgttgacatatcggtttgcgacgctgtaattgttgacattccaagagcatatcctaattttgcctccggttattccggattcagcgtgcgcagcgggtattgtgtcgagctccaacggagccgttccaaagtcggcattgcctgcaaagtgcgatgcacctacccatgcaagccatattaagagaaccgcaatgagcttgccgaatgtcaatttgccgcgcagcaacttcttaggaaacttcacggaaaatctcttttacggttgataaggcgatttatcgcggttgcctgtggcgattttctcgacgtacttggcaagcaggtcaaattccagattgacgtatttgcccgcttcgcagtatgagagattagtcacttcaagagtatgcggaatgagccaaaccgccagcgaatccgcattggcttcggcgatagtcaaagaaattccgtctattgcgacacttcccttatagactacatatttggaaaattcttttgggactgccactttcagataaaagttttttcccttctgttcaaagacctccactttgcttcgcacgtcgatgtgcccgcttacaaaatgtccacccagccttgcgtttgcagctaagggcctttcgaggtttatcttagttcccgctttcacgccctcgaaagacgttagtcttatggtttcctccaaaagttcaaacgacaactcgtttgcgtcgcgcccaataagcgtaaggcagcagccattgcacgcgagggaatcgccgtcagagagtgtttcggctataaattccggcgcctgcaatttcaagagccatgcggcttttttttcctcgaaagacactacctttcccactccttcaactattcctgtaaacatataaattcctcttatttattactatcagataaaaaacatttcattttaagactaaattaatagagatttttgtcaaggcaaaacaagtatttttgcccgcaaatcccgaacaaatctgcactatcagccgcgcgaaaattgcgcgattatgaatgcgaatctccgccaagccaatgccgctaaaacgcccctaaaagcgcaataacgacgcagctatggattcctacctatgagaaaaaacgtcaaagcctttgcaaaaaacatcgcaaacacaatatttgtttttttcaataaggcctaaccctgtacgtagttttaagtattcattcaaatagttttttttgagtggggcggatttttttgcagacagaatttctagccaccccaaatttttttaatttaaataaaaaagcgcgaaacccgcaatcggactttcgcgcctcaattaaagataggtaaagaaacttaatgcgaccgcaagtattctatgctcttgcgcattattgaatccagattcttcttgtcgccgccctcgtattcgaggacaaaataaccgtcgaatccgattttatcgagagtatcgagcattttctggacatcgagcgatccgccgccgaggtacgtgtcggttccttttggaaggataacatccttaaagtgcagcataacgagcttttttccgattatcccatagccttcgcatgcatctacgccagcacgggcccaatggccgttgtccgcgcatactccgatatgttcgtagggcgcgacagcttttgcgatagtcttcggattccagagctcgtttgtttttttgccgtggtggtgcaaggcgatttttaccccgtactttgccgcggcgtcgttccacaacttttgctcctcgggcttgtgctcctcggtaaatacgggtattcccatatccttgcagaatttgaggtgcgcgtcgatatcctttgtatttatgcgataaacgccgaatcccgcaatttcgagattattgtctgcaaacatttttttgacgtattcgcgctgctcgggcgtcattttttcgtccgtttttactttgggatatttcccgccgataaactgacgctttgtcatgactacgccgtcgactttcatttcggcagccttcttaacagtgtcagcgagagatatgtcgctataaacgtatccgtgaagcgcaattttcctcggctttttcgccgatgcggaagaaacgtccgccccggcgcatccgacgagaatcgctgtcagcgcaattgcaatataagaaaaaaactttttcattttttactccaactaagattagaaccagccctcgcgcattgcgggctttacaagagcatttgccgcagggttgtccgcacaagccaatttttcggcgtcccaaacaattttggagtttgtgcgcaaggacatattgccaagcaatacagactcggtgagaaccgccgcgacatcgaaacttgagcaggaagattcgacattgccgcgaaccgcgtcgaggaaattcagcctatggtcgttgtggcggacgcgcggcagttttttagcgattgccttagcgtctgccgccttgctttttggaagcacgactggcgcccctatgaggtgcattttcggcgagaatataacgccttccgtgcctacaataaactgtccgtcgtacggcaactgttcgtatccccttcccgtcttcaaatattcgtcgggaagcggaggcaggaaagacttgtcgtagtctttttcatactttccattcttcggctggacaaagccactaaaccaccttatagttacgggctttcccgacgcggatgtatcaaagtagtagtttacgttgtcttgaagcggaacagatatttccgtgcctcccctttgtctggactcaacgcgactcggcgagccaagcccaaggcactcaatcggtacgtcgagcatatggcagcctatatcgcccaaagagcctgttccaaatttccaaaaacgcctccaattcaagggaacgaccctctttgtgaaagttgttgttggggtagcaatgttttgccatttgtcccaatcaaaattcggcggaattggatccggcttaggccagctcttatagctgccggggcgttcgtttacgccgacaagcggacggcaagtccacattatgacttcctttacagtcccgataagacctgcgtcaatccactctttcgcagtgcggataccgtcgcccgaatgcacaaaatttcccatctgggttttgacgcccgcagccttcgctgccttggcaagttctcggcattgccatattgagtagcatagaggtttttcaagatagatatcgtagccgtgttttattgcgcacattgccactgcgaaatggttgtggtcgggggtacttattacgacggcgtccatcttccccttcattttatcgaacatctcgcggtagtccacaaaagaggcggcgtcgggatcggcgaatttttttgcgtttccgaagccgtagtcgccactgtcaacatcgcagtatgcaacgagcttttgttttagagatttaaacgacttcatatttccgccgcccataagcccggttcccacaaagccgagtcttaccggagtttcgtcaaatttctggcgctcttgcgcgtttaaagaatttgaaatatacggaaaggcgactgctgctcccccgactattcccatcttttttataaagcttctcctattttccataattatcctatttttaaacatgccatacgccaaacaggcaccacccgacaataacaggcatcgtaaaattcctcccgtagcccgaaaatcgaaatggacttttccattcccgtttgagaacaaaaaaagtttctccgcaaaaaggctgcttgtcaaaccgcaaaaacaagaaatttattagacagttaaaatccgcttcccaaaagcattcagggcttttcaaatgggcggctgaaagccccggcagggcgcaaaaaaaaccggcgcggccccgaaaagcgaaagcgcgccggaagcgaaaggcggcgtatgctatttgaagtcgagggttttcagcctcttgaagtcgcagcgcagcctgtacgcgtggtcggagcacacgcggttcgcgccgatctttgcggcgtaagcgaggtcgtcgaggttctgaacctgccacaccccgactttaaaacccgcgtcctggattttgcggacaaattccctgtctatcttgcggtaattgccgatcgccacctgcgagacccccgcgcgcttcgcagtggaaataatactttccggagaatgtttttcgggattataactaaatatcagcatggtttcatagtccggatatttggatttgaaatcctttacgacatctgcggaaaagcttgttatgagaatattttcgcgtttcagccccgccttttcgcgggcggcgtccaccttgtcggcaaacccctttccataccactttacttcgagctcgaattttttgtccttgggaattacggccaatatgtcgtccaacatgggcaaccggcagtcggcgtatttcttatcgaacctctcgggatgcgcgaggcgcgcggactttatctcttccgctgtaaggtcgcgcggatccttgtctattccccagaggtttttgagctcatgccgctcgtgcacgcagactatggagccgtccttagtctgccaaaagtcggtttcaatcataaggcttcccatatcgtacgcaagctttatggcctcggcggtattttgcggggcgaaatcagtctcgcccctgtgcgaatggacgcggatttttccgccggcaaccgccgaaaacgcggctgcgcaaactgccataacgaatattgtttttttcatctttctcctattttaatcgcgttaatttaaaatttttctataaggcaaactgcatgcgcgccaatgccttccctacgcccttcccagcccattttttcgttggtggtagccttaattccaacatcgtcgggagaaactccaagagattccgccaaaacttttttcattgcctttacatgcggcaaaatttttggagtctccgctattattgatgcgtccacattggaaaccctgtacccgagctttccgacctccgcaacggcccgctttacaatctcctgcgagtttatatctttgcaagagtcgtctgagggcggaaagtaaaagccaatgtcaggcagcgctgccgcgccgagaattgcgtcggcaatggcatggcttagcacgtcggcgtccgaatgcccgagcagccccagtttgctctctatctcaacgccgcctattacgcacctgcggccctccacgagcttgtgcacgtcgtatccgtgccctattctaaattgtccagccatattttaccccactgttttatttgccgcgcgcccgagcatgaactccacgcgcgctatgtcttccggaaccgttattttcggattcggatatatgttttcaactattgtcacgcctattccaaaagcgtttgccgcggcggtgtcgtccgtcactttcataccgagccccaaaactttttcgtatgcggccttgatttgaccgatatggaaaacctgcggagtttgcatcgcccatagagagggcctgtcgaggtcttcaagcattcgcgaacgcaggctaaaagtgtcgttaggcactttctttatggtatctgtcaccctcgccgcaagcactgcggcgccgtcggcgcgcgccgcgtcggataggcgcactatgttttccgcgccaacgagcgggcgggcgccgtcgtgtataaaaactatttcgccgtcgccgcccagagcggtaagaccgttaaaaacgctgtccccgcgctccgccccgccgcggcagaaaatcgtctcgacaccgcagccgggaaagtatttttctacggcggattctatcgccgcctgctgggacgaatccctgcatgcaaataccacctttccgacgcgcccgctctcgacaaacgccccgaaagaatgcataataacaggcttgccgagcaacggcacaagaaccttgtcggatacgcttcccctcattcgcgagccgcttccgccggccaaaatcaccgcaaactcacgcatttgcaatctcttcaagaattttggaaacggcgaaagccggattttcagcctttaaaatcgggcggccgacaacgatgaagtcggagcccgcccttgccgcgtcggcaggagtcataatgcgcttttgctcgtctgccgacgagccggagggtcgaatcccgggcgtcacaagcacggtgtcctccggcagaatcgagcgcaagccctctatttcgagcggagagcatacgagccctttcaagccgctgtccaccgcgagctttgcgagcttctcgacctgccattcaggctcgagctcgacacctgtttcagcgaggctgtccgcgtcgaacgaagttaggaccgtcaccccaagtatcaaaagttccggattgcgctctgcggcggactccactgccctgcgcatcatttcccttcctccgctcgcatggattgtaagcattgaaaccggaagagccgacacgctttcaacggcggatgccaccgtattcggtatatcgaagagttttaaatccagaaaaattttaaaccccatgcccgagacttcgcggacaaaattggcgccgtacttcaagtacatctgcaagccaatttttacccattcgagttttcccctaagtccgtcgaggatttttagcgccgattccctgtcgggcaaatccagcgcaagtattaatttgcaatcgcgttttgacatattttttttttttgccataatggtttaaaattttcaatccaaaatcaaataatgcccacagtagaaaaattttccccctgtaaagtaaacttaatgctcgccatactcggcccgcgcccggacggcttccacgaacttctgagccttgtagcccccacaaaattcggtgacactttgatagccgaaaccgccgccggaaagacttgcgactcgctcgaatgcaatatggaaggcgtcccgacagactcgtcaaacctcgtgataaaagccgccgagctttttaggcaaaaaaccggattgaaaactttttttaatttcaggctcgaaaagcgcgtgcctgccggcgcagggctcggaggcggaagctccaacggggcgagcgcattgctcgctgtaaacgaactctgcggaacccctcttaaaataaacgaccttgaatcaatcgcggcgcaaatgggttccgactgccctcttttcctgacgcagacgcccgttgtcatgcgcggtaggggcgagaaagtctatccccttaggggagccgcccgcgaatgcatttcgcgcctaaaactcttaatcttcaaacccgacttctccataaacactggctgggcgtacgcacaaatgcgtgcaaacccggaagactacatcgacgaaactttcgcggaatccgcgctttcagagtggcttgaaaacccgagcatatcggggcttccgcttataaacaatatgcagatagaagccttcaaaaagttccccgcccttcaaataactcttgaagaaatatgcggggaattcagagtgcctgccatgatgagcggctcgggcagcgcatgcttcgcggtcgtaaacagcctcgaagactcggaaatcaaaaagctcgcagatttcataaaatcaaggctaggtcaatcctgcacaatcgcgctttcctgatatttttttgtttttttgacgcgtttaaaaagtagcgcgtctgcctaaaagttgctgccccaaaaatattttgagtacttaaaaaaaatccgcctttggggtggatttagagtttattcgcgcataaaaaacgggcgcgcaataagtctcccaactttttagcgccaacaaatcacaaaatatctacgcgcgctaagaaaacgcgcacatttaaaggcgacaaaaaattgaaaactgcaaaccgcccaaatccgccggctaccactttttgaatatgaaaaatgcggcgagaatcatcagcgcaaagcccacgagataattccatttaaattcctcgtgcaggtacaatacggaaaatattgaaaacaccgtaagcgttataatttcctgaattgtttttaactccgccgccgtgaatgtcccatacccaatcctgtttgccggaacttgcaggcagtattcaaaaaaagctatgccccaacttgcaattataactatccacagcggggacgatttaaactttaagtgcccataccaagcgaacgtcataaaaacgttcgacgccgtcaataagagcacgggaagaacgtatttcatatctacttccttttgattgccatcgcgcggtattttatgcgcgtgactgtcgtatcagtctgaatcggcacgtacgaatagtcgagcactattgcgccggggcgctgctcgagcgacatctggctgttcattataataatgccgtcggcgcccatttccgcagccttctgccgcaatatgtcgtaggctgccggttcgtcagacatcgaaggagatgtctcgtagattatgactccgagctcttcataggggaaatccggctttttagttatgaaaatctggacttcggaaggatttttcggagccccaaattccgtactcccgccgcttttcaatggatagaactccacgcttccgccgccgcaagaagttagaagcgcaaccgccaacagcccgaacgctgccagcgaaacactaaacgcccctcttttcataattctatttttcaaatattgacacaaccgtttttccgccgagcctgtcgcggccgtgcaagaacgaaagctccatgaaaaacgcgcagcatgcgacattcgccccggctatctcgcacattttgcacatcgcctccgcagtaccccctgttgcgagtatgtcgtccacaaccgcaaccctgtctgtggtcgatacggcatcgtcgtgtatgcaaagggcgtccgtgccgtattcaagcgcgtactccacgcaaattgtcttacgcggaagcttgttttttttgcgcacgggaacaaacggcagctttaacctcagcgcaatcattgggccgaagaaaaaccccctcgattcggccgcgagaattttcgtcggattagtctccgatattttcgccgccatctcgtctatcgcctggctgtacgcctcgctgttcaacattagaggcgtaatgtcgtaaaacagtatccccttcttcggaaagtcgggaacgccgcggataaattttgagatgtccattaaaacgattcctttttaagaatggtatcgcgggcttcggagagttttaggggataatcgagagtgtagtgcaaccccctgctctcatgccgcgacagcgccgaacggattatcaacaaagccacttggatttcgtttctaagctctatcaaattcggctcgattttgaaattccagtaatactcgtcgatttcgcggtggaggttttcaaccctgttgagtgcgcgctcgaggcgtttcgtggtgcgcactatgcctacatagtcccacatcgtgcgctttaattcctccatattgtggtgcagaaccaccctttcgtcgggatcgcgcatatctccgtccttccaaaggggaacttcgccttcgtcagccgggcgggcatctttcaaatatttgtccacggcaacggcggcgttgtcggctattacgactgcctccaagagcgaattgctcgcaagcctgtttgccccgtgcaatcccgtgcaggcgacttccccgcaagcgtaaaggccctttatggttgtcgagccgtcaagcctcgtccgcactccgccgcacatgtagtgggcagcaggaactaccggcatgtaatcctttgaaatgtcaatgcccttctccatgcagtgctcgtaaatttgcgggaatctctccttcaactcctttgcggaacgctttgtaatgtccagccaaacgtgggcagatccgaggcgcttcatttcgctgtcgattgcgcgcgcgactatatcgcggggagcgagatctttgcgcggatcgtagcgctccataaatgcctcgcctttggcgttgcgcagtatggcgccttcacccctcaccgcttcggatattaaaaacctctcgccgtcgcgggaatacatggctgtcgggtggaattgtataaattcgaggttagcaacttccgcgcctgcgcggtacgccatggcgatgccgtcgcccgtcgcaatttccggatttgtagtgtacaagtacacacagccagtgccgccggtcgcgagcattacaatcggcgtcttcatcgttttcaccacgttgtttttggtgtcatagacgtatatgccgattatgctgtcgtcttgattttcaaggagtgtcttggccttggctttcgttattaagtcaatcgcgaaatggtgctcaagtatttcaatgttcgggtcggcggcgaccgccttcaagagcgcctcctctatggcgcgccccgtatagtccttgacatgcagaattctgcgctgcgaatgtccgccctctcttccgagagacggagagccgtcttccaggctcgtaaactctacgccctcctctatcaagtcctttatttgccgtgggccggcgctaactatcgcgcgcactgcggcctcgttgcaaaggccgtctccggctatgagggtgtcttttacatgcgaatcgaaatcgtcagcgcaacttgtcacacttgcgattccgccctgagcgtggttcgtgttagtgtccgatctctccttttttgttattatcgcgaccttgtgcccgagcttcgacgacttcaacgcgaaactcaatccggcaatgccgcttcctacaactactgcgtcgaatttcatagtaaattttaaatacagagcctttacgtgcgagctttgcgctcaaattctaatgttgtcaataagccttgtctgcccgtaccaaattgcggcggaaattctcgactttcccggaactgcctccagcatggggagtgaggtttcagcgtccactatttccacatagattacgcgggtttttgcgtttgtgaccttgttgatgacgtgcgcctttatgcggtctacatttgagcacccttcgatgcaaagcctgcggccgtcttcaagagccgcgtgcagcctcgatgcgccgagccgctccatcttgtcgagatacttgtttcgcgagctcagagctagcccattttcgtcgcggacaatttcccccgtgacaatttccactcccataaagaggtcgcgcaccatgcgctttataatcgagacttgctgggcgtctttctcaccgaatacggcgatgtccgggcgcactatattaaagagaattgtgactatcgtcgtcactcccctgaaatgttttgggcgggtcttcccgcacaggtatctgctgatatcttcctcgtttacgtatgtggaggcgtccggccgatagatgtcagaaacggacggggcgaatactgcgtccgcgcccgccgcctcgcattttgctgcgtcttcttcaagttggcgcgggtatttgtcgaaatcttcgtttggcccaaactgggtcgggttcacgaatattgaaaccaccaccgtgtcggcaagctcttttgccttgcgtacgaggcttaaatgcccctcatgcagcgcgcccatagtgggcacgagcgcgattttcccgccatttgagcgggccgacttagaaaaagccgtcatttctgccggagaagatattattttcattgattttactcctacactcttattttttttatacttgttatattttttgaaaaaatcaacccattaaaaaaaacaataataacaaacgcaaatgagcgattcatacatacaaaacctatttgccgaaagaatcggcggagtcaactacgggaaaagcacggccatatacaagtttgagaagattaagagggccaaacgcgcggccaaagccgccaagcccgacgttgaactcatagacatgggagtgggcgagcccgacgacatggcgtttcccgaagtggtagaggcgctgtacgcggctgcgaagaatccggcaaaccgcggatacgcagataacggcggccccgatttcaaaaaagctgcggcgggatacatgaaggccgtattcggagtaaagctcgaccccgagacggaaattctgcactcgataggctcgaaagccgccctaagcattttgccgaattgctttataaaccccggagacgtcgtaatcatgacggttcccggctacccgatattcgggacccacgcaaaatatctcggcggcgaagtttacaatttgcagcttaaacccgaaaacgattttctccccaatctcgacgaaattcccgccgacatattaaagcgcgcgaaagtcatagttgtaaactatccgaacaatcccaccggcgcgaacgcaacgccagaattttttgaaaagctcgtaaaatttgcgaaggcaaacaatctaatagttgtttccgacgccgcgtacgcctccttgacgttcgacacccccgccctctcgatactccaagtcgaaggcgccaaagacgttgcggtggagcttcattcgctctcgaaaagccacaatatgaccggctggagaatcggctgggtttgcggtaatccgctgatagtaaaagcgtacggagacgttaaagacaatacggactctggccaattcctcggcatacagctcgcggccgcaaagggtctggaaaatccccaaatcacgcgcgcaatagcaaaaaaatactcccgcagaatggatttgctcgtcgatgtcctcaaaaaatccggcttctccccgaaaaagcccaaggcgggattcttcctctatatggcggccccgaaggcggcaattctgaaagacggcacccgcaaagaattcaaaagcggtgaggatttctcgcagtggatgataaccgagcacctcataagcacggttccgtgggacgacgccggcccatttgtcagattctcagtgacgttcgaagcgcacggagaagatgccgaaaaagcggtcgttgccgaaatcgagcgcaggctcggcgaatccagattcgagttctaacaacttaccgccccgcacagcgcgcatttttgcgcgcgcagggcggacaaaaaaatggagattttaatgcaggaagaaagaatcatagcgttgttgcacggtccggacagagccggaatagtcgcgagggtttccggttggatatacgcgcgcggaggaaacattcttcacgccgaccagcacagagacaggcaggagggcatatttttccagcgcgtggaatggattccggtaggcgatattgatgaggaaatacgccttttcgaggagttggcccacaaagatttggatatgcggacaaccgcaatgaggtcgtccagaaagccgaaaatcgcgctgatggtctccaaattcgagcattgttttagcgacatcgtgctgcgctgccgctcgggcgagctcaactgcgaaatcgcatgcgtaatctccaaccacgaagatttgcgggaaatgtccgagatgtttgggctaaaattttattacactccaatatcgaaggaaacaaagccgcagacggaagccgaacagcttaaaataatccgcgaaagcggcgccgagctcgtcgtaatggcgcgctacatgcagattttaagcgaaaactttatcgacgcctgccccgctcctataataaatatccaccacagctttctccctgcatttgccggcgccaagccctaccacaaggcatacgaacgcggcgtaaaaatcataggagccacagcccactacgcgacaaaagacctcgacgaaggcccgattatcgcgcaggtagtcacgacagtgagccaccgcgacaatgtcgaggatttgatgcgcaaaggcagggagcttgagcgagaggcgctcgcagaggccgtgaggtggcacatcgaaggccgcattctcacctacaaaaataaaaccgtaatattcgactaatccaggcgtatgtcagagcgtcctctgccgtttaaaataagcgtattggtgttcgtacgcaacaccgaaggaaagcttttgctaatacgcaggaacaagtcgcccaatatgggaatgtggagcccgataggcggcaagcttgaaatgtcagagggggagtcgccttacgaatgtgcgataagggaaacgcgcgaggaaatcggaatggagcttaccgaatccgacctcagaatgttttctatgattagcgagaaatcctacgagggcggaacccactggctgatgtttctctttgacgtaagaaagcgcataagcgagcttccccaaaatatttccgaaggctcgttcgggctgttcgagcccgctaagatagattcgctatcaatccccgaaacagacagggttttgctctgggacgtatggaagaaatactcgggaaacggctttgcggtaatgcgcgcggaatgcgccgacggcgtaaaggccgtattcgaacaaacagatatttataattaacaataaaaatgaattccgaaaacgaaaaaatactcgatatttttagggaaacaggcgccttgatggaggggcacttcatactaagaagcggtttgcacagcgggcactttttccaatgcgcccgcgtttgcgagcacctcgacagagtgacggagcttgttgaaatgctcgtaaaaaagcttggcgacatagaatgcgacacggtgatagcgcctgcgctcggcgggcttgtcctcggacaggaagttgcccgccagctaaaaaagcgcttcatatttgccgagaaggaaaacggggctctcgttctacgcagaaactttaaaatttccgaaggagaaaagattttaatagttgaagacgtcataacgcgcggaggccgcgtgcaggagtgcatagacatcgtaaaggcccacgggggaattccagcaggggttgcagtgcttgttgataggagcgacggcaaggcaaaatttgaagtgccgtgcaggagccttcttgaattttctttcccgacgtacgaagccgataaaatcccgcctgagcttgcggcaattccggcgacccaccccggctcgtaattctgcgccgcggccgcgcttagaatctggcgcggccctactgctattgttttgaaagcaaaaatccttttggctttcggcgcataaagtgtatttttttgaatttgcggcggtgtttttttgcaaatgcgcgccgcaaattttatattcggaaagatattttcgctcggacttctatgctgcgagaattttttaattggctataatttttccatgcaggtatgcgcaatttcgccaagcgcgcataaaatttttactaattcgtatatttgccgttctttatttttacataaaaaaatgttctgaactgagttttttccaaagtatttttttaataccggcatcccgccctactctttttcataaaaaaattcaggtgcttctaatttttccaaaagcgtatcattataagagtaaaaagatgaggccttttttgcatacaactctcatcaataaaaaaacaatttgcctagcattattttaatcgggcaaaagtttaaatgcgcggcttatataatgaaaaaagctccacttatgcctgaaacgtaattttcactaagcactggggaaaatttccatcctaccccacagcgcaatccggaaaaaactccattcgttttggaacacgccaatttataaagcgcccacacaccccacagcgcaatcgaaacctgtatttgttttccgcaaaataaaacagaaaaaaagccgttttttaatatcgcaattttaaaaaaaattccccggcatttaaataaaaatagcccttcaacaaagccacacaaagctgcaactgaatattttttcacccgagtctgcaattggcggtcgccgcatttgagttaggcggcgtctcattaaagaaaatgtccaacttgcaggcaggctcggaacctgctgttattcgcagacaagctcaaaaaacaccgccggaatttttatttttgaagtgtcaatagacgcccttagaatctctccgtcaacccgcgtgttaagctcctggactctctcgccgtccatgccgagagcgtacaatttgaaattgtcggcatttttgttttttagcctgaacgacagctttgcggtttgatatagaatcggaatttttccgtttgaaatgagcccgcgcatagtatcgtcctcaaaaaccattccgctgttcagagcgtttgtggcataaaccaaaaccgcgcgcttcgattccgaaaggggcaacccgtcgacactgactatcgcaacgcacccgcgcgcgcccattctcgttacggcaaaatctgagagctcgcatttgctctttgcctcggcgcatagcccttggagcctcggagtgtcaacagtcatgtaatttttatacgaatccaaaaacaattcgcccgttgcgctttcaaaaatcccgtcttttgcgtttgtgcggttagactccgggataagcccgcgctttttaaactgctcgacaatagaatcagtatcaaaattgtctttgtagtctgccactacggaatatccaggatacgttattatcgccgcccctttcgttgactttattgctatctcgtccttgcctaccggggcgtcggagtctgggagcagcgagagttttgcgatgagcgacaatttcgactggccgcctgtcagcccaccgtttatattcattttttcaagggcgtcgcgcgtggaaaaatctatgcgcacagagggctttgcctccgaaacgtcccgcctcaaaagcatgtgtgtagccaaaaattcgcatgccttgtttatggggtcgggcccgcgcccgaacgggtatatgacgctctcattaaaggtcaccgactgcgcgtgcaccgtaagagcgcaatggccttgcagagcggcgtatgccgccatagagaaagcctgttcgtagcggtatttgttccagaacacatgcccatactcggttataaggagaggttttttccacagagcagtcccggccactcccctaaaaacgctgtttgcgtccgatagcgacgatgattgggagattcttgaaactccgccgacagttggcgacgggtgggcatggtaagagtgcattgtcactatcggcatattttttctgaccgatgcgtatcttagggattttaccatgtcaaagttgacgcaaagccctttgtatccgatttccctgaggcttttctcaaaccacttccacatttcgttctcgcgctccagcttaaaagcggcaatatccctcgcgcgggcgtctgtccctaaagacagggctctattgaagacttttattttttcccagtcggcgaccgactctccccacgcggcattatattttgcgatatccccgccgtacctgtttttcaagaactcaatccagtacggcttcatgcgctcggggtttttgggttctctcagcatgccgaactcctgttcgtttttgccgtttacaatcgcaagaacaggatcatctgcgagcttagtattggtatatggatttacatgcgtcaaaagtttctttacgccttcgtaccaatttttgcgcgcggcgggcttaaagaaaaggtcgtagttgtagtccctgtccgagttgtcgggcgcccatgtgttgccgagctcgaatccgtagcggctgcacattgcgtcgagatttaaatatattccgtttttctttaagcaatatatgtaatagtctattcgttttaagaggtcttcgttgaactgcaaaggctcctttgccccgcccattagcgcgaaatcgaaatagtggaagcggaccatattgtacccttgcacgcgcaactgttttacgtatttttcggtgctttccttcgtagctgtgtggatattgtacgtagtgccctggtcggcgacagtctggaacgccaccggaactcccgggttgtcctcaagctccaaatgtccgtcttttgatgcaaccacgcgcgattttacttctttgactggccataaatcggagcaatcgagagccgagccttcctttaccgcataatcctccaaatgcggcattgcccgccagtgtttgctttcggacgtgacgaagcgattttctgatgggaacgggaatttttcgtccgacaaacttgccgcgacaaccatccaccctacacttgcctttccaaactctatggactctattttgccgaagtcttttgggattttcagcctggtagaataaagcccgttcgagcgcctccagcctttgtcggcgagccatgccgccccgattgcggcgtttttaaggtcttttttcacattttgccacggcgccacatcgacgcctccctgaagtttgaaggcgtgggatttcccgttttctccaaaaatagttatttccccgacctgcccgctcgcggacgtttcaagggcatttaatacataaagatactttgcattttgcggtgcggcaaatctgattttcgcagacactgccccaacctttttactatccgcaggcttcagaagcagcgccgacttccctttgtttgaatccggatatattatggaatacggcacatttccgaataatgatgattgcttgtaattaaatttagacgcgtcctcgcccggctcagcgccgaaccacccgctatctccgccgtcttttgagccgcatacaaacccgacattcgcagacgcgcgcaagtctacaggagtgattgtcttttccaactttatattttttatccatatagagcccctcgactcttcaaaaccgaggttcaagcgtccgcctgtcgcgtcgtacggaacccttataaatagtttaacttttttccacccgaagtttcctgtcggcatctggctgccgccgtagatatttcccgacggagaatttattaccaacataaattttgcgccgttatagtattttgggccgggcgcaattttctcgcccttcatctcgccagacagctccaacacgctaccgcgcaatttacgggcgtcaaccggcagggacaacccgccaaagtgtacattttcagacgcctcca

SEQ ID NO: 2561 - DNA, 27220 bp, Unknown
  16S sequences of unknown bacteria
tgatgaaggtggagggcatgagctgtgctcactgctctgcccgggtggagaaggcactctccgccgtggatggcgtggaaagcgcccatgtggatctggaagccaaaactgccgccatcaccctgacgcacccggtggaggattcggtgctggaagccgccgtcaccgaggcgggctatgagcctgccgggttcctgtccggcgaaacatccaagcccatcgtccgtgtgatgaaggtggagggcatgagctgtgctcactgctctgcccgggtggagaaggctctctccgccgtggagggcgtggaaagcgcccatgtggatctggaggccaaaactgccgccatcaccctggcgcacccggtggaggattcggcgctggaatccgctgtgatcgaggcgggctatacgccggtttcgatttctgatacaatagactcaaacaacaaaggagaatttgctatgaacaagaagattgtcattgatggtatgatgtgcatgcactgcgccggttcggtggagaaggctctgaacgctctggacggcgtaaccgccaaggtggatctggagcagaagtgcgccaatgtggaactgactgctccggtggcagacgatgtacttgccaaggctgtgaccgatgccggttacaccgtagtatccattggctgaggagggctctgccatgaaagccgaccgtgacaaggtagtccctctcatcaaaaccgcccggggacagctggacggaatcctcaagatgatcgatgaggaccggtactgcattgacatctccaatcaggtgctggcagtgatctcgatcctcggcaaggccaacaaggagatcatccgggcccatctggctggatgcgtcaaggattccctcaccggcggcactcccgaggaagtggaaaccaagctggatgaagtcatgtccgttctggataagatgtcccgctgaccaccccgattcaaacaacaaagccgaacggctcaccgggtatttccgatgagccgtccggcttttgttattcaaagggggaatttctttcctttcgggaaaacacaattattcagcctgcttgccagcttcggcaatgaccttttcctccagctgcttgggaagcagttcataccgggcaaagtccagtgtgaagctgccgcggccctgggtaatcgaacgcagcacggtggtgaagtcgcccatttcactcatgggcacatcgctttcgatggtggtcagacccttgccggcgggctccatgcccagcacacggccacggcgcttgttgagatcgcccatgatgtcgccggtgtagctgtccggaacggtgaccttcaggttgccgatgggctccaggattgccggagatgcctgcggcagcgcagtcttgtaagcgatggaagcagcagtcttgaacgccatttcagacgagtctaccgggtggtaggaaccgtccaccagagtggccttgaggcctacaaccggatagccagccagtacgcccttctgaacgcactcctgcaggcccttttccacagccgggaagtagttcttgggcacagcgccgccgaacacattctcttcaaagaccagagtctcgctgtcgcagggctcgaattcgatccatacatcgccgaactgaccatgtccgcccgactgcttcttgtggcgtccctgtaccttgaccttcttctggatggtctcacggtagggtaccttggccttttccaggctgatctccacaccgaacttgttcgccagcttggatacgatcacatccaggtgctggtcgcccaggccggtgagtacctgctgccgggtttccttgttctgctcaaagcggatggtgggatcttcttccatcaggcgctgcatgctctgggctaccttgccctcatctgccttgttcttggctaccacagccatggacagagtgggcttcgggaataccagttccgcgaactttaccttgtaggcgggatcgcagagggtatcgccggttacagcttcggggagcttggtgatggcgccgatgtcaccggcggagatcacagtggtctcctcctgcttcttgccgcgggtgtgcagcatcttgcccagccgctccacattgccggtgcgcatattatagagttcggtatcggcagtgatcttgccggatacaaccttgacataggagagcttgcccacaaacgggtcagctacggtcttgaataccagaactgccaggggcgcttcatcggtgcagggaacatccaccggatcaccggcttcgttttcagcaaccagaccggcgctctcataggcggacggcaggtggtccaccatagcgtccagcagcatatcgatgccgtccatggtcacagccgagccgcagaataccggcgcaatggaaccgctcttcacaccctgatggatgccgtgcagaatctcgtcccgggtaaactgttcgcccgagaagaacttctcaaagaggccttcatcggtttcagcaatcgcttcggacatcgctgcgatcaggccttccagacggtgaccggtatcgggcatttcagcctcagcgatcacgccgttttcatagcggtaagccttgttgtcgatcaggttgatgtagcagtccaccttgccgtccttcatgaacggaactaccagcgggcagacactcgggccgaattcggatttgagctgttcgagcaccttatagaaatccgcatggtccatatccatctgagtgacaaagaacatcttggcacggcccagacggtctgccagttcgtaggccttttcggtgcccacttccacgccgtcccgggcagatacggtgatcagtgcgctttcggctgcgatcatgccttcgtacataccgccctcaaagtcaaagagtccgggggtgtcgatgagattgatcttggtactgccccatgcaaacggtgccacggtggaagataccgataccttgcgcttgatctcctccgggtcaaagtcgcagacagtattgccgtccgctaccttgccgagccggtcggaatagccggtcttgtagagcagagcctcagccagtgtggtcttaccactggaactgtggcctgccagcgcaacattccttattttacctgccagatattgtttcatggcgtcatcgcccctttccattttttattaaaagagcccgcctgcagtccatcggggactgtttcggcttggtattcgtcaaattaaataagttgcgaacttctctttcaataattatagttttattatacaatcccggcgaagcaagtacaagagaggaagcgcaaaaaaatacaccacccatatacaatttacgggtggtgtattgtgcattctgcttgttttatcagtagcgccgcaggttgggcagcagcatggtgatgagtccccagaacagctggtaggcaatgagcagagtaaagctcagagtaccgaagccattgccgttactgttggtgaaggccagcaggcagaccgcaaagtaacccagtgtcatacccacgccctggaggatcacacccagcaggatggaggtcttggcggtgatgatgccgctcagggtgcgcaccttggaagccagcgaaccattgtagacgatctcggctctcgcgcggtccttgtgggccatcaggcggtcacactgaccatggagcttgtagggcacgatctccaccatatcctccgggaagtcgaagagttccgaaatcttctggggggtgatgttggaatcggtggtgtagaccgagataccgatatcccgatccaccagcacgcccagctcgtccacaatatccggatcagcggcatagctcagcacaaagatggcggtgagctcgccggaatttgccaggtagagcacttcccgtccgtccttgacgaacttcttctcatagtccttggacgggatctcgatgttgtggttcatcatcaattcccggttgccgatcagcacccgtttgccgtccacccaggcggaaatccccatggagtcctcatagacgatgctgtccgccttcttgaggatcttctcattgccgccgatcatctgggtaaagatgtagctgagtacacagtcgctcttgcagacaatgctggcggcatccaccatggcctcatcaatgcgcttctgatcgaaggtcttgatgccgtggagggtgatggactgaggcccgaacagctcgctgtcccggatgacaaagcagttgatgtcatcgaaccggtccagggcagtataacccgctaccatcgaaccatcctgggagagcgccttattcatgcggcgcaggggaaggttgccgacgatggtgctggtgaggggcgcgctgagcagggtcgccgctgaaaagacggtgagcgccaggaagggatccccgtagatgaccatcacaatgatggagcaaaccagatccgccaccaggaagatgggggtggtgatgcgggacacattctcgccgaagtcctcggtgaaggagaggtgcatgaagttggtgaggaagtcagccggctggctgtatcccaccaccggctgctccagatccaggttctgggtgagctcccgggcgaggttgcggtcattgatgatattgaaggcatggcgctgatagccgccttccgccagcagacggaagttctggtccacccggttgatcatgaagagtttgccgatgaggttgaagatcagcaccaggatcaccacggcgaagtagtagcccacattgtcactggtgacctgatccgggaacacgatcagcacaatgccctggatcaccgccgccagagcagccacagccaccgggccgtcgccgctgggacggagggtaaagagcgccttgaggccgcccaggatggtggagatattgagcagcactgccagcaccagcacaccgaggttgacgcccataaagacgcgcatattcttctcggggagcatgaaggtgagcagcggcagattgatattcttgagagatacggtgaggtagcacatcagggcaaacagcaccaccgaaagtcccagccggatcatcaggcccttcttggtcttgcggatgcgggcatagaccttgttggcgtccttgggggtgttgaagtcgtccacctcatcggtgaggtcgtcaagctcctcctccaccaccggttcgcccttctcctccttctgacggcggcggcggtcccggcgttcggtttccgccttggagttgccctgctcgtccatggagtagagatcgatattcatctgggtggcggtgtagtcgtccggcaccggaggctcctcctctccggagacctccttctggatggcagcgatgtcctgccggcgctcagccttggctgcatcaaaattccgggtgaaggactgggtgcggccccgtccgaagttcttgaggatatcctcccggctggtgatgatggtctcacccgatacaccctgaggtgcggcaggtgctgccgccggtgcggaggattcttcctcctccaggtcggcaaaccggctgcgccggggagtgttgtcgctgatgcggtcccggagaatgctcagatcatcgtccggctcgcggctgcgctcgggttcccgggtgcgctccggctccgccttgcggggcggctcctcatactcgtcccgacggcggcggagcggttcctcgtaccgctcggtacgggctgccggcatctcgtcttcggcctccccacggaaccggaatccgctccggggttcttcgtcccggcgggattcccggcgctctgccggatagtcctcatactcccggcggggctccggacggcggcggggacggtcgtcatagtcatcgtagtcatcatagtcccggctccgggcaggacgggccgcgtaacggtcgtcgtaccggtcatcgtcataccggtcctcccggcggcgtgccggacggcggggctcctcatagtcctcgtcataccggctgtcgtaccggcgggattcccggcgctcggacgcatagtcctcatactcccggcggggctccggacggcggcggggacggtcatcatagtcatcgtaatcgtcatagtcccggctccgggcaggacgggccgcatagcggtcctcataccggtcgtcctcataacggctctcccgacggcggcggggcggctcctcatagtcgtccaccgaccggctccgggtatagcgggtctcataggaagcctcgtccggctcctggtcataacggctgtaaaccggcgcttcgtcctcgtcctgcgcccgccgtgaggagatcatactgcctgacccgctcttcttgcgcttgatctcctcgagaatatcatcgacattgtatcggtctgccattgtctatcctcctgccgcagcaaaatttccttatctggccttgatacctgcccgctgccgggcgatctcatacatcacaattcccgctgccaccgaagcattcagcgagttgatctctccatacatgggaagagaggcgataaaatcacacttatcggtgagcagacggctcatgcccttgccctccgaaccgacaatcagtgccaccggaccggtgtaatcgatctcacaccagcactggccctccatgtcagtgccatagacccacacgccgtcctttttgagctgatccactgtggcagccaggttggatacccgcaccaccggcagatgttccaccgcgccggcagaggtctttgccacggtcacggtgaggcccacactgccccgcttggggataatcacgccatgggcgccggcgatctcggcagtccggatgatggcgccaaggttgtggggatcggtgatctcatcggcaatgatgacgaacagcggctgatccccggccttcttatagatgtcctccatggtggagtagttggcggcgccggtgacagcgatcacaccctgatggttctggtgtccgcacatgttgtccagcttggcggggctggtctctttgacgggaatgccctgttcctttgccatggcaaggatcttcacaatgctgccctgggtttcgccgccggtgaccaggatgctctccacagcccgaccgctcttgagcagctcaatgacgccattgcggccaatgacaatatcctcccgctgcataccccggacagattcttcctcctggggacgggactggggccgcgcggggcggcgggacgcttccggacgggtcttgtcacgaccagccgggcgataatttcgattgtttttcatactctctcgctccaatgagccgtccgtccagtccggagtcctgtgtcccggggcggcggcgcttttcgatatacatatttatcttaacacattttctgacgattgacactataaatcttcatcttttatagcctctccaaacaaaaaccacccgcagatccatgatccacaggtggtttgatcaaaatttgaaagattctggaaacggcgggcagtcccgagccggactgcctcagagcagcaccagcgccgctgccagcagcagcagccctgccgccgccccggcccggaacagcagctttctgagcccgacccgctccttgagcagagtggcggacggcgcggctgtccgggtgcggcccatctcctcactggcggcacgcaggtactgttctgcctgttcgtcgatctccttgggcgcccagtccccctggcgcacaaacaggatcgcccgctcaaaatagcggctgtccgggtcccgcacttcgatgatcttccgattgactcccttgagcatctttttcccctctttcccctttttccggtttcatgtcatttcgctgatagtatcaccggtccggcggcgctttatgcgctgtctgcgcatttttcacaacggattcccggggcctggcgcagtgtaaagaaatttcgctttacagatagctccggagatattactgcttgtataagccgggatttccacagtttcaactggtgcttccacaagccgtgttgaaaactcagttgaaagtgtggaaaactcccatggaatcgtgaacgaattgaaaacaaaacatctgttccctgttaaaaacccggattttgccagtttctgggctgtaatccggcggtcacacggctacaatccgtattttacacagacgggccaggggtatggcattttgccgaacccctccccctccgacccattccggcacgcttttcaaggcggggatttaatggtataatagccgcaaagcgactattatactttttttgtgccggacgatccgcaggctttgcccgctcccgtcccattggccgattataccattccgctgatgctccatggtataatagccgcaaagcgactattatacttttttgtgccggacgatccgcagactatgcgtgctcccgtcctgttggcctattatacttttcccacccttttaagaaacccagcgccggaaccggcaggaggacaagctatgacacaatataccgcccggctcaccggtgctgttcccttcaatcttcaggagaccttcgaatgcgggcagtgcttccgctggctgcccggtgatgacggcagctataccggcgtggtggggcggaatgtcatcaccctgcgggcagacggcgatgacctgctggttgccggtctggatcaggccgaagccgaacagcggctgatcccctatctggcactggatgaggactatgccgccatccaggagcagttccgcagaaacacgcagctggcccaggctgtcgactatgcccggggcatccgggtgctgcgccaggaccgctgggaggcgctctgctccttcatcatcagccagaacaacaacatcaagcgcatccggggcattgtggaaaccctctgcaatacctggggagaaccgctgcccggcgggcgcagttccttccccggaccggaggtgctggcgtccctcaccgaggaggatctccagccgctgcgcagcgggttccgggccaagtatatcctggacgccgcccgcaaaaccgcctcaggcgaagtggatctggaccatgtggcctccctgcccaccgaggaagcggctgccgagctctgccgcatccggggggtgggcatcaaggtggcccactgtgcgctgctctacgggttccaccgcatcgaatgcctgccggtggatgtgtggatgaagcgggtgatgtccaccatgtatccccagggactcccggaggaactgctgccctatgcgggcattgcccagcagtatctgttccactattcccgcagccatccggaactgtttgaagcctgactctcttatatagaaaggaactgccatgtctgtatctcccctgccggaatcccggccgatcctcagccagatgccctctgacccggagctggaacggctcagcgaagtgttcaagatcttctcggacaacagccgtctgcgcatcattgccgccctgctggaaaaggaactgtgcgtctatgacctcacccaggccctgggcatgacccagtcggcggtgtcccatcagctccggctgctgcgcaatgcccacctggtcaagacccgccgggagggcaaaagcattttttacagcctggatgatgaccatgtcgtcaccattatgagccagggtctggcccatatccgtcacaccggacgctgacaaaatccccgatttttccatatattccggcagctctgctatactttccgtattgcagagcatttttctactataagtaaaaactttccgggagttctgcgctgtttttcggaaattcgacacagcctacccgctataataaaggcaccggggacacagaagtctgccccggagccccttgtaaccggaaaggatgatcaaacatgactaccaaaaccatagccgcggaagaatatctgtgccagctgcagctggaaattctccggctgcgtgaagtcgtatccggactgtaccgtgccggcgaggaccggcagaatgatgtattctatcgctatgagaacctgctcaaccacaagtgtgcggaatacctggagcttgtggaggctttggagcaggcggaaaatcagtaaaccagcatctgcgcattttcccacatatttctctggtaatccggcgctgttttgtgtataatggggctaagaatcgaagccccgggaaacaggactgtttccctgacaaaatacacagaggtgccaaatgaacatgaaacaaatcatatccaccctgacagccggactgctttccgcagtattgctggctggctgtactgtctttgtggacggcgatgcagtcacttccatggatctggtggatgaagaaggggtgaccctcagttcggtgagcgactggactccgggggaaagccgtaccttccatctcgatgagctgccggagggctgtgaagtcaatgtggtttcctccgaccgggagctgatgaccgctgactatgccgacaatgccatcaccctcacagctgtggaaagcggacatgccattgtgacggtggagctttcgatgaacggctccagcctctccaagagctatgagatccagatcacagcccggcacatgcaggccggcatgaccctgatcgactcccgggctatccagccggaaaacgccctggaaagtgctttccaccccgagcgggaaaacttcggctctgccacctttgcctcgggctatctggaactgcaggccggcaatcaggccacaatcctgttcaccggctttgatgtcaccgacggcgaacccaagcccctggaaactccggtgactgtgcgttcctccgaaaatgaggtcacctttgacggaacctactacctctcggaggaccgggtgatcctccagtgccccaaagccggacagtataccctggatctggtgctgagctgtgaaggctatgccgatctgccggtacagatccagatcagcgtatccgaaccctcccagagcattgccctctccgccaagggatttgacgcctacgctcccacggtggaagtgggcagcagcatcattctcgatgcggagaccgtttcggaggacactgttctcaccgtcaccgcggacaacagcattgtcactgccacagtgggcgaggacaagcgcatcaccatcaccgctgtggaggagggcaccggcagtgtgaccatccatgcctccactcccggataccaggatgccgagctgaccctgcaggttcactcggtgccggaactgatctcgatgaccattctcggagaccgtctggagcgcaacaatgtagttcatctggctgagggggagatcgtggaactgacagtcctcaacccctcggaaggcgacctgtcccatgagatcgatgaccccgccattgtatcggctgtacagaagtcgaacaagctggaactggagggccttgccgccggggaaaccaccatcacactcacctgccagcgcaacgggtacagcaccaacaccaaaaccctgaccattatcgtcaccgaagcggaacccgaagagtaatcccgcactgaaaaagacggagccagctggccccgtcttttttgttcacaaaattgcccttgtatcgtccacaggatcatgctatgatctctgtatcaagcatataatacaggagggatcgtatgcagcaaagccgcttttttcaatggggtctgagactgggttccgccggcgtcctgcttctattgggcgtaatcatttcgggcatcgccgccccgaatccgttgttttctgtcctcaccctgtccggaatagttctctgcggcacaggggttctgctgtttggcatcagctggctccaaacaatgatccaggcgctccgcagccgggactacaaacgggcgctgctgctcctgctgggagcggccctgatcctgctgcctgaccttctccggcgatgaatgccgcccgcatccaaaaaagccctcctcccgcaaatgggagaagggcttttatcgtttctactgaatccgggagagcacttcgccgatctttccccggatcacaaggtctgccttctggtccatgggggtgggcgacaggttcaccagcgccagacagtccccctcaaagtaccggatcagcccggcggcaggatagaccgccagcgaagtcccggcaatgagcagggtatccgcctgggagatagcatccacagccgctgtcagggtgcgggggtccagttcctcctcatagagcacaacctccggcttgataatgccgccgcattcacaccggggcacgccgtcggtggtgagaatggcctccaggccatacttccgtccgcagcgcatgcagcggttgcggtggatgctcccatgcagttccagcacatttttgctgcccgccatctggtgcaggccatcgatgttctgggtgaccaccgcggtcacacggccctcggcttccagttccgccagacggatatgggccgcgttgggctttgccctgggccagaccatctcccggcggtagaactcatagaactcgtccgggtgcgccataaagaagctgtggctcaccatcacctcgggcggataggcatactgccgcccatagatgccgccggcgctccggaaatccgggatgcccgattcggtgctcactccggcgccgccgaaaaagactgtcttacgccccggcgccattgcctgggccagcgcttccatctgcttgtccatcttggttcctccacttctgttccgccagcgccagcagcgccgccggagtattctccgcttctcccgctatgaccgcttccagcagttcccggagaagctgtcccagtgccgggccagccgggattccccgggcagtcagctcccgcccggacaccgccagctcccgcaggctgcggcagtaaccgccgctctccacccgggaaagccagtccagctccttttttcgggccgggtccgctgccgcagcggtttccagcgcagcccggtaagctgagatggaatcatctgccgaccgccgccacacctcccggaacgactccgccggaggcagggccagacagcctgccgcctcccggaagagacgctcccggtttccgggcagccgcagcggggcgcacagttcccggacggctccgtcccagtcctccgccccaccgggggctgccccatgccacacctcccagaggccgcctgccagcagcagggcccggctctccggggaaggtgcccggcaaagggccgctttccattctgccgggagccgccccaggccgtggaagacgccctcccacaggggcagcagttccagcgccccggcaaagtggtgtccggcgaggtatttttcccactcagcggtgatccgctcccgggacacagctgccgcctccccggcgagttcctcgcccgcccggaaggtggcctcctccacccggaaccccagctccgaggcgaaccgggcacaccgcaggatgcgcagggcgtcctcccggaaccgccggcaggggtctcccacacagcgcagcagacgggcggcaagatccgcctgtccgccgaaggggtcccggagttcgccccggcagctcagggccatggcgttcactgtgaaatcccgccgggccagatcctcccggaggtcgggcacaaattgcaccgattcggggtgacggtgatcccggtactcgccatcagtgcggaaggtggtcatctccaggacaccgccctcggtcaccactccgatggtaccgtgtttacgcccgtcctccaccagccggtgatcccggaacagccaggcggtgcggtcaggcagacaggataccgtcaggtcatagtcatgcaccggacggcccagcagccggtcccggacacagccgcccaccagccaggcctcttcaccgttctgttccagccgcagcatcgcttcggtcacccagtggggcaggggttctctcatagctgtttcactccttggggattcacccgttcatacagtgtcctgcgtccgtccttgcctgccgggcgcaccgctcccagcttcatcagtgccgaaagaccgccgctcatgccccgcaccgaaagccgggtgagcttccgcagttcctcccgtgtaaacgggtcgggcagtccgggcgggagcagtattccaagctcctccgggaaggccaggtccagttcctcaccaaaggcggtgggcacccggtccagccgccggcagagggggcgtcccacccatttggaaggggtttcggtgcggtattcatcggcgtccaccaggatcagccgcagccgcacacccggacgctctgccagcggcagcagccggggcagctggtaataggcctcccaccagccgccctttttcggggagcggcggcgggagagcagttccccctcttccgacagggtgaccagggtcttttcccggacaatgggcagtacaatggtcacaggatattcctccggcagacgcagcagctttttcaccagcggggtcacactgccggtctgcacttccaggagctgtccgtcccggaatatatccgccacaaaccctgccaccggtacctcctgatactggcggtccggttccagatagtccttcaccgcccggtgcaaggtgcgttcactcaatgtgctgaaccggaactcacagtccccgctcacgcagcagttcctccatcaggtcacaggcacggcgcatcaggtccttgcagccatcgggctgaccctttacccagccctccttgagctcccggcagaactcgctgccgaactcctgacagaaccgctcatgatactgggcagccagttcccgcagctcgggacagctgtcgccgatgggggtgctcccctcgggcagacggctcaccatgtaccggcccagggcactctcggcgccgatgagtgctccgcatacgctgccgcagcccataccgccgccgaatgccgccatataccgggcatcttccaggccgccgccgatccccagggcatcggtcagcgccatggaggtgttttccgcacagttgatgtgtgcgttcggcatggtcagatacttttccagttccttacgatactcgctcatatgttacagatcctttccattcagtatatcaataaactcgctgagtccggacacagtataggtgggggcgggcatgtcctccggcagtgccttccccttggggttgaaccagcaggtgtcgatgccgaactgctgtccgcctttaatatccgaggtgagggaatccccgatgatgatgcattcgctcttattcccggcgccgctcaccgcaaaggcacgctcaaaataccggggatcgggcttctctgccccggcatcgtccgataccacgactttatccagccagggttccagacccgaggccgcaatgcgccggtgctgggtggccgatacgccgttggtggcgatgatgagcacgccgttctcatggataaaccggcagagctcctcggcgccgtcaatggtacgggtacagagcgccaggttgttcaggtagtcggcattgtactgggccgggtcgatgccggtgatgcccagctcctcaaacagctcccggaaccggcgcaccaccagggcctccttggtgatctcccggcgttccatcatcttccacagcggggcattgatggcctgatagcgctccagttccgcttccccgaaagaaagcccccggctctgggcagtataataaaaggagtactcctctgccgcttcaaaatccagcagggtattgtccagatccacaaatatatatcggtatttcacttgccattctccttttggaaatatcagaatcagatcctgttccagtatatcaccctttcacccggagcgccagtgcatgcgcggggatttcactgtttgttcattgacttgcccagtcctttcgtcctataatagtacacaatgaaaccggacagtccgggacaaacttctgctgtgaaccacagctgtgatacttcggcaaatggaaaggagattattctcatgcgacctgtgattggaattacccctctgatggatacaaaactggacagctactggatgctgccggactatatgcaggcagtgcagcaggcgggcggtctgccgctgatgctcccgttccagtatgacgacgagtcgatcgaccagatggtggagctctgtgacggcctgatcttcaccggcggcgaggatatcgacccctcccgctaccatgaggagcgcctgccggtctgcggcgagagcattccgatccgggacgagttggagatccgtctgctgcgtgccgcgctggctgccaaaaagccggtgctgtgcatctgccgcggcctgcagcttttcaatgtggtgatgggcggtaccctgtggcaggatctgcccagccagcgcccctctgagatcaagcattcccagggcaagccctatggcgccgccgcccactctgtggaactggttccgggcagtccgctccatgccctgctgggacagtccaccatcggcgtcaatacccgtcaccatcaggccatccgggaactggctcccagtctggcagtcatggcaacttcgccggacggcctgattgaaagcatctgcctgccgggcagccgctttgcctggggcgtacagtggcatccggaacacatggctccggaggatgccaacagcgtcaagatcttcgaggcttttgtcgaggcctgcatcgactgaaccagcggcttttctgccgcagaaaaggaatgatgattcatctatgtccaccaaggaactcaagccctactttctgctgattacctatgccggtgcggtctttttaactgtgacccatctggaccgtatcctcagtcagatcagctggatcacttcggtgatcatgccctttaccatcgcactggtcatcgcctttgtgctcaaccgcccctataagctgatccgctaccggttctataccccgcttctgcaaaaagccggactctctgaaaagaaagtcggttccagctccggtgtgctctccattctgagcgtctatttcctgctcttcttcattgtgggaaagctggtcagctcggtaatcccggaactgatcgtttccattgaaaccttcagcagcaatatggacgactacctcagtgacatgaccacactgatttccagaatatccacccagctccagctggacagcgaaattgccagactgctcaatacctactggcaggatctgctcgccggcatctaccagaccctcaacaccctgctcccggctctggtggacttctccatgggcgctgccaccagcatctacaatgtgttcagcggcctgattatctccatctatctgctcaccggcaaggataaactgatccgcaccttcaagaagatgctctatgccttcctgccggaccgctgggctgactatatcatgcatgtgggccatgtggcaaaccgctccttcggcggcttcctcaccggacagatcatcgactcggctatcgtgggactgctctgcttcctgggtatgagcgtgatgaatatgccctatgccatgctctcgtcggtgatcgtcggcgtcaccaacatcattccctacttcggccccatcatcggtgccattcccggcgtggtgctcctgctcctctccaatcccatcaaggcggtgctgttcattatcctgatcgtctgcatccagcagttggacggcaatatcatggcaccccggatcgtgggcagcagcatcggcgtatccggcgtgtgggtgctgttctccatcatcgtcggcggcagcctgttcggggtccccggcatggtggcaggtctcccgaccttcagcgtgatctatgtgctggtgcgggaacaggcgcaccgccgtctgctcgccaagaaccgccagatcaacaatcccgaggaacacctctgcgaaggggacagctgtgtgctggatgactcggtgaccgagatcttcggaaaggagccggaacagccccagtgatccagtttcgtaccaaggtttccggctgcctgctgtgtgctgttctctgtctgggactgcttgccggctgcaccggaacagaagaaccctctgtatccgaacccggttccgagacagtttcccagctgccggaggaatcctcccagcctatagaaaccgaagcggaatccggttctgactctgagccggacaccccggaaacggtttcggtaaccggctatctcttcgatcagcgtatgatccttgatgagatgaaccgttcgctggaacagtacagccagctctcgcccgaggcggagctctttccccagcgctcggtggaagtgatgcggatgatgcaggagcagtttgaaaagatggctgccctgaccccgcccgagggctatgaggagattgtcccgctggcggaaggggctgccttcaccatggaggaagtcgccagcctggtggaacaggcctttgccgccggactggacacccaggagggcgtcgggctgctcacccaggcccaggggaaattctccggggcggtggatgccctggaggagatcacggctctgctcagccggaaccccgatgagctcctctccggcaatgcagccgaataacgcaaaaaaacagggactgtccccatggggacagtccctgttctgtttcaggtcatttggtgcgggacactcagtccttgacagcggcagttaccgacatctccaccttgatgctgggagcagccagagcggcttccacacaggcacgggccggctcattgcccttggcaacccacggatcccagacgctgttcataccggcgaaatcgctgatgtccttgaggtagatggtggtggaaaggatatgctccttatccgagccatgctgctccagcagctcctcgatgcgggccaggacagccttggtctgctcctccacgctctcaccggcctgaccggcagtcacaccgctcaggaacagcatatcgccatactttaccacacggctcatccggccggtgcagtcaaaacgctcaattttcataggggttccttctcctttcgcttctgcgggttttggtatctccagtttaccacagccgcccgggttattcaacctgctttccccaaaacgcaaaaacaggaacggtacaataccgctcctgttttctgtatccggaatggattattcgcacatcatttccagcacacgggcaaccaggtccaccatgcgcttgtaggagttgagatccagctgctcctgaggggtgtgggcaccggtggcatcacagccgatggctgcaatgtccagccccggcatcttggacaggaaggcaccgccctccagaccgccgtgggtagcctccactttcatctccttgccggtgagctccttgtaagcctttgccagcatatcccgcagttcgctcttggcggtgtactcccaggtggggaaaccgggacggaagatggcttccgcaccgaatacatggcagagcaggtcgatcttctcgcccatgtcgtccaggaaggagttcaccgagctgcgcagcgagtagaggatatacagccgtccgtcctcctgggtcttgacagctgccaggttctgggaagcaacagtcagtccttccagtgccattcttggcaaccagaccagccggcatcaggtagagcatcttcaggaaggcatcgctgtcctcatcgcagatcatctctgcgggggctgcagcaggctccagtgtgatggtcaggccgggatcgctgaattccagctcactctttaccttcttttccacctcagcagcgatctcagctgccttggcggcatcggctacggctgccactgcgtcgcactctctggggatggcgttcatcatcatgccgccgtccatggataccaggttcaccttcatctccttggcgatggcatacagaacacgggccgcgatcttgttggcattgccgcgctccttgtcgatgtcgctgcccgaatgaccgcccttgaggccgcgcaccttgagggataccgcttctccggcaaagggcacacgcttgacagtcttatagatgtcgatggtggtgccgccggcagaaccagccacgcagacaccctccgggccgcagtccatattgatcatgcgggtacccttgaggtcatagggatcgaagccgatggcgccgatgaggcccacttcctcctgggaggtgaatacgcactccagcggcggatgcttcatatccttccgggccaggaaggccatcatgcaggccacagcctgaccgttgtccgcacccagggtagtgccgtctgcccgcagaatatcgccgtccacaaccagcttgatgccgtccttggtgaagtcatgctccacattcttattcttctcgcagaccatatcggtatggccctggaggatcaccgggtcgagatgttcgcagcccggagaagccggcttcttgatcaccacgttatagaggtcatccatcctggcttccagccccagcttggcagcaaagtccagcagatattcaccgatcgccttctcattgcccgaaccacggggaatggcgctgatctcctcaaaataccggagcacatctgccggttcacggtttttgattacatattccatcttgatacgacctcctgtatggttataattgtaaaatcctgcccagtaccgggaacccgctctggaactgggacagccgccgcgggagctgacagacctgtcttatggcggttatcagccaattaaagcccaaaagcggcttgctaaaatcattataccataacccggctgtttttcaatggaattttcgaaaacgcaaaggatttttatatcagcccgggctcaaattcaccatataaaaacagcgccctgccatatgacagagcgccgtttgcatattcagcagatcaggcccgggtgtgttcttcccgcaggatggaacccagcagcagcacaaagcccagggcagcggggatcgacccgaaggtacccaacagcgcgcaggcccagatgcccagcacagctcccagcgcaaaggaaaagaccatcacgaaatagagcccggcagtgcgcagggattcccggtcatgcaccgcaatggcgggatagaggtactgacccaggttgcgcaggtttccggtgcagatggtggtggagtggcccttgccctcccacttgccgaacaccgagagctgtgcctcggtgacaaaggagaagacacaggcgatgagcatatcatgccagcccgaagcgatgaaagccgctcccaccagcaccaggatctcaaaggcgagcatattcttctgccagctgccgaaggcgatgcccgaaaacctgtgccgcaccagctcactgaacatcacgcccaggatcgcagccaggatcggcgccaggtactgccagcttccggcgaagtttccgcctgccaggctgatgcccagcttggacatattgccggtgtgcatattggcaaagatcccgccccgggtggcataggtataggcattgagatagccgctgagcaatgtgagcatcaccatgaaggctgtactctctgaaatggtcttataacgttttgcagtctgttccacttgttccatccttttttccgccgcaaaaaagttcggcagaaccaaaattctgccgaacccttttatcaaattgttgtatccccagcgggatacgcttttcagtccgtactgcttaccaggaagctacatgaccatcgcatctgggctccgaagcgccaaccagcacttcatcgtcccaacgccagatgatctcaccacggcccatggagtaggtatcgttcatgatctctacctcatgacccatagcagccagcttcagggcaatatcggtgggaacggcacgctccagctgtaccttcttgtagcctacccactggaatctgggagcatccagggcttcctgaggattcatgccgaagtcgatggtgttcagcagcacctgcaggtgaccctgaggctgcatgaagccgcccattacgccgaacgggccaactgccttgccatccttgcacaggaagccggggataatggtgtggtaagccttcttgccgggctccaggaagttgtccttggtggggtccagagagaagttggcaccacggttgttgaaggagataccagtgccgggaaccacgataccggaaccgaagcccatgtagttggactggatccaggataccatgttgccttccttatcagcggtgcacagatatacagtaccgccggagaagggagtgccgggctcaggcattacagcagtgtcggtgatgagctttctgcgctcagcagcatactcttccgacagcatgtcagctaccttggtcttcatggccttgggatcggctacatattccttaccatctacaaaggccagcttcatggcttcgatggtcttgtggtatacgtctacgctctcacggttgttgcccaggtcaaagcccttgaggatattcagggccatcagtacagtgatgccgtgtccattcggaggcagttcgtatacatcatagccatgatagttggtggtgatgggctccacgaactcagcacggtagtcctcgaggtcgtcaagacgcatccagccgccggtcttttccgagtaggcagcgatcttctttgccagctcgccgcggtagaagctctcagcgttggtagcgccgatctcccgcagggtatcagccatagcctggcagcggaatacatcgccgtcgctgagcatcttgccatcgggagcaaaggtctcgaaccagccctcgaacttctcagggccgccggccttcatgaagcgcttgtagcccagcacccactgcttgccgatgttgggagccagcgggtagccttcctctgcgtacttggcagcaggctcgagcacttcagacaggggcagattgccgaacttctttacagcttctgcccaggcggaaggtgtaccgggaaccatgaccgggtcccagccatcactgggaacagccttgaggcccttctccagcagcttttcgccgctgatcagacgggggctgcggccgcttccgttgaggccatacagcttgcccttgtaccagatcagtgcaaaggaatctgcaccgataccattggaggtgggctcgatgaccgacagtgcagctgcggtagcaactgcggcgtcaatggcattgccgcccttcttgagcacatccagacctacctgtgcaggcagggggctggaggtagcaaccataccgttcttggcgaacgacacggtacggcgggaggcataggaatacttttgagtatcgaatttcacgcgttacccttcctttcaaaatacttggactaaatcaattaccgattctgtcagcggatcaaagcaggttctggaagaaaccagcaatgagaatggagaaggatgtaacagtggcgaaaccagccagtacataggcaggctcgatgcgggctgtaatggcatccacttcttcttcagtttcaccaacagtacgggcgatctcctgggtgatcaggtatgtagcaggataacccagcagctgtgccatggcaatacccacagccagattcttggaaccaacaatcttccagccgggcagaatatacaggaaaataaaggtaccaaccagtacagcgccgaagatgatgatcaaatccaggctcagatccatcaggtcagcgaaggtaatggtagccagagaagtgatgatgctgacataaaccagtaccatgaagaaaccactggccttggccttgtccagaattcgcggaggtacgatgcccagctcggaacatacaacacccagaatcaggcaccagatagaagcagtgataaagccaccggtcagaccagccagcaggataccgatttcattggcaacgtaaatcacaaacatgcacacatatgtagtccagatcttctcgtgcttcttccagaacggaaccttggcaggcttgtcaccatcattcttgtgtgcctctgcgtcacgctcagcataccaggaatagctgggatcagcagccttcttgcggcgaatgtcttcaactaccagcttggcttcagccagacccatcttggaagcaggaatggtaccaacaaacttctgtacgccataagccagggtacccagggcagcagccatggtagcgccctttgccagagctgcgtcaaccatgatgttggttgccataataccaccgttgacaatcgggatgctaaccactgcagcatcccagcctaccagcggaaccactgcaaacaccgacaccatcgcaactgccattgaaataattgccagaaccagagttttccactccttgagcagctggcggatgttgatgttggtacccatgtggaatactagaccctgacccgaaatagcagcagcacctgtcaagccagagatggtcatgatatctccagggaaaatgccggtcataaacagaatcaggaatccaagcaatgcaacaaatacagacgaaatgcgagctcctgttgcggaactgataatgtcaccaattgcaaacaatgcaaggacatatatcattgccatccattgattcataaaataaccctcctctttttactctctttgcaaattttgtgttgattgctgaagttgaattccaacagccataaaatcctactccagacagttgagctacgcctctcaactatatccatattctaaagcgatgaagtgtatgatttcagtagtccttgttacattttgtattaaaatgaatgtttttttgaatttattgcgaaaaaatgtctattttgcaagctttactcgccaaaattgcaatatagatcattatatcatttccaacgcaatggcgtaaagttcctcgacttctttaatccagtaatttccatctttcttttccatcagtttcttttttataaatccggagataattcgcgccactgtaacgcggtctgaatgaaccaggtcagcaatttgctgatgagttatgcgcagtggaaccaccacattatcttcagcatcatatccaatatcatagcacaaagagagcagtaatgttgcaactctgcactttattttaggtaaagcaagcatttcgattcgctgcacaaaaataccgcccttcctgcattcatactgcagcaatttctgctgattcacgcagtctctttccatccattcccgaattgtatgtcttgggatatgccagacctggcattctgtcattgcaataagcgaagttctggccgttgggtttggagaaagcatgcttggaattccccaaaccgttccaggtccattaagctgtgtaataacctccttaccactagccaaaacactgctcacaagtgctactccactttgtaggatcgttactcttccgctagtatccccacccgggcgaatcgtttcacctctacgataactttgcaatttcaaattctgtaccaaatcgatccatatggttggatcagtttgtaccatcactgaatgccggcgaaactgtgatatgatttcccattgttttccctgatacacttcatttactcctctctgattttggaaacacactgtaatactaatataatataatatccaactatttttttgtagtaattgttacattaaattttatatttggtgattaactcacagaagtccatgcatcaaaatgacataatggtgaaagaataccgcatgtatcgattttacacaacacgatttcaaaggaggctgcagcaaatggatctggaacagatcatgcagatgaatacattcgccgtggtgggagataccctcaacccggaaaaatacgcctacaagatcaaggagggactgctggaacagggctatacggtccacagcgtgggcaaggaactccagtcgctcaacgaaatccccggtgacctggacatcatcgacctgtgcatcaaccctgccaagggcatccagctgctccgggagtgccgcaaacccttccggtgcatcgtgatccagcccggcgccgaaagcccggagatcctcagttatctccaggagcggaacctgccctatatcgagggctgtctgctggtgggcatgcggctctatccccggaaaaagcaataaaccccggttccggcctggtaccggaagttccataaaaatacagcatggtacagtgccatgctgtattttttatgccgccgcgggaatttgtacaaagttttttgccaaaagcatgacaatcctgccggttcgtgctatactcatagctgaatttcacgccggaggtccggcacaaggagggctctgccatgcagcagaattttcatcgggaaagcgtcaactacttctggatcaccattggttccctactgttctgtgccgggctcaacctgttcattgtcccggtggggctctacaacggcggtacagtgggcatctcccagatcatccgcaccttgctccagtcccggctggcactgcccgccggctttgacatcgccggtatcctcaacctgatcctcaatatcccgctgctggctctggcttttctccagttcggacgccctctcttcctcaagacagtgtacagcgtcctcacccagaccgccttcttctcgctcattgcgatcccctcagtgcccatcctctcggaccggctcaccgcctgcatcatcggcggcctgctggctggcgccggagtgggactgaccctgcgggcaggcggcagcggcggcggcaatgacatcatcggcctctatatggcgaaaaaatatgagtcgttcagtgtgggacgcatgaccctcatcatcaacggcatcatctatctcatctgcgccatgctctttgagctgcccactgccctctattccatcatctattcggcagtctgcgctctggtcaccgaccatgtccacctccagaacatcaacatgaatgtgcagatcttcaccaaggacccggagctctaccatgtgatcctccagaagctgggccggggtgtgacctactggaaggccgtgggcggctacaccgaaaccgacacctatgtcatcatcaccatcatctccaaatatgagatcgccccgctgcgccagatgctgctggaaaaagatccccacgcctttgtgatcatgagcgagggcccggagatcttcggcaacttcgaaaagcgcctgtgaccccgctgtccctgccggccggactcagccccgccggaactgggaaacagtgtacaccacagaacaccgcccatgcagccggcgctcccccattgcagcaataaaaatcccccggcggagccgggggtat

SEQ ID NO: 2562 - DNA, 32759 bp, Unknown
  16S sequences of unknown bacteria
gaaggtgctcacctttttgacgcccttttgcaagacttttttattgacaaacacacataaaatagaatatatttctacttagtttcttttttatcagccttgcaataatcaaaatgtattattttaaaatgaaatttcattcattttgtgggttaaaaccattaaaatgttgttcgacttaaaagctggatggaagcatcggccgtatataacaagatgtatctacgagaatttcacatattaatttttaaaagaaacagctttttatccaatgtttccatgaatgcttttatattcgatcagtcctcatgcgcagcgtacatgtatgagtgctccggaaaggagggaaatatacctgaggtggcaatgcatgtctgcgtatcattaaatagttttaaattttaaatgcggaaggagaacgttatgaaaaggatcctgaccttagtattagccttggtcttggctgtgagtacttgtggaagtgctttcgccctcaattttaccggagaattgggcaatgagtccacttttgaaacccttgcggaagctcacgccaactcacctgccattgttaagggtatcatcgaaaacgaagaaaagacttttgttggccatcctgcccttgatggttatcctaaggacactacgtatgtttaccgctccgctaatcagtatgctggtcgtgcggctgcccgcctgaataccaacatattcctttatgccgagcaacattttgccgacaaggatgaggcttttgcctatcttcaatctaccggattgatcgacctcattgaggaagctgtcggcagcatcgttctcgtcactcctgtaggcgaaaatttcgcccgtgaagacgctgacttctactacgccctgcaaaccgctatgctcgcccaaaaagatagcggggtagactctgaaggaaacgccatctattattccgatgctgagtatttcggcggttatggctatctctacttcatcggtattgacggcggcgcgactttcttcaacaattatattgcgcctgagattgacttcgcgggtcgccttgccggcgcactgcttatcggcggtgaaatgcaggagattcgggaaccttccatctttattcccatgtatatggtaaatgcggatgaagatgttcttgacaagtatatcgaagtgaacggcgccgatgccatgcgcaaagagggagatattactacctactacaatcaggcatggccgttgcgtaaagttattgcggagaatgtgaatgaagttgaggctgcatccatcatcaaggatgcttactacaacatgtttgttaaggccatgcgcgtacccgtactcacgcaggctgtgtacagtgccggcactccctacagcggttacaattttgacgaggcaccgtactccctgtgcgatcgtaacattgttattgacggcaagaccgcagatggcatctgcctcatcaaacaccagagtgacgatacattcgctgagtacaagaccagcgagggcgaatatattgatacgtggtatgaataccttcctgaagaagtgctcaacggcacagctgaggaaggctccataccgttgattcttgcgaaccatggcggtggcgacgatgcgcgtgtgtttgtggaagagtttggcctgcttgagctggccggtcaggaacgcatcgctgtggttgctcctgatcatcagctgattgcggaagtgcgtggcccggcactggcggccgtggtaaaatacatgttggaaacctatccggctctggatgcttcccgcgtttatgctaccgggtattccatgggtggtggcgccagctatacagtcggttactatgaacccacgttgtttgccgctattgccccgattgctggaagtccgactgccatccccgaagatcagattgccaacttcgacaactgtgagttgcctgtcttcttcgctgtttctgcttttgacggtgttcggcgccttgttggacctgagggtcatctgaatgaggagtctatggaaatggtgactctttggtccggtttcaatggtattacgcagactgaatatgacttcgaaacctatccgatcattggctttgaaggcgatgcctttgtacaggatacggtcaacgatgagtatgagaaactaacgtggtatctaaataacgaagcgggtgagccgcgcgtagcattcgcttacgttaagggcatgatccatgcgctatatcctgagtatgcaagcatgttctgggactttgtgagcaatttttcccgtaacccagaaactggagagatcatctataacccctactactaagtaagtcggagaaaaagtggagaagcgaaccgcaaagtttggctcccaaaacccgcaaaagaagccacttgcaatacgcaaagcggcttctttaacaacatgaagaacgctacaggcagactttttcgacaagctggggactgccgtgcttgaaaagcgcggcagcccccttttttgttaaggttagggcttacttgacggcctggaagaagtagcggctcacatagccggtcacaccgtcgatttcagccttgcaccacacgtcgcccacctgctgaacggtgatctccgtgcctacgggatacgccttgatgatcggcgagctcaggccaggagccgtgcggaagttgacgatgtagttgccattgggattcaccagcttggcggtgaagggcgtcgcgggcagcgtagagctgccgctgccggaggaagaagtggtcaccttgatgaatttcttcatcatgtagccgttcttgccacccaccgtcaccttgtagaagctgccgctttcacccagcagctgcacgctggtgccgttgcggtagtagcccaggacgcgggcgtccgtgctggcggtttcacgcagcaggagcacctggttggcgccggggttgttgaccacaccggtcttgggatagccgctggtggaagtgctgccgccgctgctttgggaagcgctgaggtactggctggccatgtagccggtcatgccctgcacgctcaccttgtaccagccgttgccgcgcagcaggacggttaccgccgtgccgggcttaaagctggtgatgatgttgccttccaggctgggcaggtcacgcaggttcaggccgcgtccggtattggtgcgaacgtacagcgtgctgtcgctggacgtgtcggaaaggtatttgctcatcacatagccttccagaccgttcacccgcaccttgctccattcgcccatgtcctcaaggaccgtcatccacgtgccggtggggtactgtctgagcacctgcgccgacagggaaggctccgcgcgcatattcagcgcgccgcccttgacgaccttgctgacctcggccagcgaaaccagcggcagcatcagcgccagaatcagcgccagcgccgggaggcatcttttgtagagaggggtcttttgcataatcgggatacctcctttttgttttggccaaggggttaccccttgccgttctctcatttgacgaaccagcgcgcgccttcccttccgatgcggggggcctcatccaaccaatatcaggaaattcaagccgaaaacggcacctttttggatgaggctggaaggacaaaaagcgccatcctgcgcagccagtgcactgcatgcgcttccggccggttgaatttaccagaactgcggtcgaaaaaatggcatgcctttgtttcgaattccggttttggcaggcattgtttgcagcgtgcttgccccgatcgggcaacatagcggtacgcctgtggaaaggagacgaaggcatgctgacgagcctgaaccgcatggtaggactgcccgtggtatggcaggaccggcagctgggatacgtggagcgcgccgtccctgacgcacgtgcacgcagactgagcggcgtggtggtgcgcaagggcatcggtgcggcgaaatgggtttccagcgatggcatagccgtggtcggcagccggtgcgtgctcatcaggcagaagccgggggcggttccggacagccagccgggcagcctgggacgcgcttttctgacgacgggagagtgcgtaggggaggtcaccgacatgatcctccatggcgactcgcttcgtctggaggcgctggagctgagccccggtccggtgtaccggctgctgggaaagcgcgcctacgcggcgcagtaccgcgtaggcggcggctcgcgtgagggcgaggtcgtggtgccaaggctcctgacatgggcgcagctcaagcggacattgggagaggaggacgacggatgagcatgctcaaaacggcggcggcaggcgccatcggctttgcggtaggcgcgggcgcgatgctgatgcccggcaaccagaaactcaagaaacaggcgcagaagcagatggacaagctggtcagaatggctaagatgtggtaagtctttcgggcggcgcctgatcagtcgggcgccgcccgcacaggctgtgcggaaaggagcggccctatgcagcaaaaaggcgcgcgctacgtgcgcgtgcgcgccctgtggctggcggcggcgctggcagcggccttctgggcgcgcgatctcatctggcaggctgtggttcagctgttcttcggcatgctggtagcgcttgcggcgctgccggtgatgaaacggttggaaaaacgcttctcgcccggggcatccgccacgctgtccataaccagtttgagtgcgctgctgattgcctcgctgctgttgcttgcgccggcattgattacacagggcagacaactgatagcgatgctgccggccatgtataatgcagccgaggaatggctggtccgggcgcagggctggctggcggaaaacggcatcgcgctggacggggagctgcggggatcgctgctgagccggggcgaagaggcgctcagcgccgccgcgcccgctgccatggcctgggtgggcggcgtggcggggagccttggcaaatggatgctcgcgcctgtattcggcttttactttctgcgcgaccgcaggcagatcggacagtggctcctgtcgctgacgccggtggagaagcgggatatgattgttcacatcctgcgcgagatgcgcagggaaacggcgggatacctgcgggggcagctgatggtttcggccgtcgtgggcgggctgacggctctggggctcatgttttgcggggtgccggcctggctcctgctgggcgtaatcatgggcgtactggaactgattccctatgtcggtccctttttgggcggggtcctggtggcgctgttttccctgcccggaggactggcgcgcacgctgtgggcgctgggcgtggtcattgtggtgcagcagctggagggcggcatgctgtcgccccagctgatgagcgacgccacccgtctgcaccctgtggcggtggtcctgtgtgtgatgctgggcggcacagcgggcggcatcggaggaatcctgctgtcggtaccgctgcttttgtgcgctcgggctgcactgcgggtgatcggtttgcggcaggcgggagacaaggcccggccttagcttagaaacggattaaaaaccaagaaatgctttgcaaagacaggaagatggtgtataattacttttgtatcacctctgaaggaggaggagccggcttatgaacgaaatgaatggaacgacgaagttttcgcccgtcgtggaggggggcaacgacgccagcaccatcctttcgcatgtataccgcgccctgcaggccaagggctatgatccggtaacccagctcgtgggctacctgatttcgggcgaccccacctatatcaccagctatggccaggcccgcagcatgatctgccgcctggagcgcgacgagatcatggaagagctggtcagggtttacctgcaggggctggatggctgacatggcgggacggattctggcgttggatgtgggcgacgtgcgcatcggggtggccgtgagcgatcccacagggaccatcgcccagccgctggaggtttaccgccgcgtgggttatggccccgacagccgctatgtggctgcgctgtgccagcgtatggactgcgaaagcgtgcttctgggcctgccgctgaatatggacggcagcacggggccgcaggcgcaaaaggtcatggattttggtgcggtgctggaaaaggcgggcctgacggttcattatcaggatgagcggctgaccaccgtaacggccgaggcagtgctcatcggctccggtgtgcgccgtgaggaccgaaggcgccatgtggataagctggccgccacggtcatactggaacaatggctggcctcgcagggccggcggaaagaggaataatcatgcaggagaacgacaacctggttcagcttcaggatgaaaacggcaaggacgtaaactttgagcacctgatgaccatcgagcacgagggcaattattacgtggtgctggaggccacggaggataccgacgactgcaaggaaggcgaagccatcattttgaaaatcgtccgcgatgaggaaagcgacgaggatgtgtacgccaccatcgaggatgaggcggagttcaacgccgtatttgacaaatgcatggccgccatggaggaagaggacgaggctgccgcgctggagatggaaacagtcgatcttgacggcgaagacgaggagtaacgcatgccgaggctactgggtgagcgcgtgatgctgcgcgaatacaagaccgacgacatcggagatatccgtaaatgggtcaacgatgctgaaacgacccgctacctgtccacacgcttctggcccccgcagaccatggtggacagtgaggagtttctctcccgcatgctgcaaagcagccatagcgcctataacttcgtcatcgcggaccgcggggacgagcgctatatcgggcagctggacatgttccaggtggactggcggctgcgatgcggcgaactgggtatggttatcggcagcgcgtcggaccggggccagggcctgggccgggaggcactggagctgatgaagcactttgctttccgcacgctgggcctggagcggctggagatggaggtccatatggaaaaccacgccgcgcgcaagtgctaccagaaagccggcttcgtgatggaaggcgtgaagcgccatgcgttttttacagacggacgcttttgcgatgtgggcattctcagcatactcagggacgaatacgaggcccgcgcatgacaccgcgcgccgctgatccgcatatcgtgaaccatcccggaccaaagggccctgggatggttttttgtcatgcagccggaaacgggaccagggattgactttgatacccgctttcggatagaatatatctttgtgaggactttgagcctcctaacggccgggagggaacatcgaccatgggaaagatcgtggccaaattcggcggcagctcgctttcggatgcgggccagtttgtaaaggtcaggcagatcattgaaatggatacacggcgctgctacgtggtgcccagcgcccccggaaagcgctttgacggcgacgaaaaggtgacggacctgctctatcgcacctatcgcctccatcaggagggaaaggattttactaccgccttttcgcaggttcgggagcgttttgtgtccatcgcaaccgaattggggctgaaggtggacatcatttctcaactgaacaaaattgagagcgatctcctcgccggggccagcgaggactattgtgcaagccggggagaatacctcaacggcctgcttctggcggattatttgggctatcattttctggaccccaaggactacatcttcttttccgaggatggggcctttgacagcgaacggaccaatgacgcgctgtccgcagcgcttgcgcatacggaccgggcagtgattccgggcttttacggcagcggcgcggacgggcgcatccgtacgttctcccgcgggggcagcgacgtgtccggcgccatcgtggcgcgcgcggcgtatgccgatctgtatgaaaactggaccgatgtgagcggctttttgatggctgatccccatgtggtgcccgaggcgcgcaccatccgcagcattacctaccgggagttgcgtgagctgtcttatatgggtgcgaccgtgctgcatgaggacagcgtgttcccggtgcaccgcgcaggcatccccaccaatatccgcaataccaacgccccctccgagcgcggcaccatgattacccatggtgcggtggaagagaagaacccctatgtcatcacgggcatcgcgggcaagctgggcttcagcgtgatctccgtggaaaaggccatgatgaacagcgagcacggcttcggccgccgcgtgctgcaggctgtggaggagaacggcctttctttcgagcacctgcccacgggcatcgacaccatgtgcgtggtgctttccacggctgagctcgcgcctgtgcgcgaacgtgtggtcaagcgcattatggagctgaccgagcccgattccgtgacaatccatgataatatgggcattattgccacggtgggcaggggcatgatccataaccccggcaccgctgcaaggctgttcacggcgctcagccgcgagcatgtcaacgtgcgtatgatcgaccagggcagcagcgagctgagcattctggtgggcgtggacagcatcgacttccagcccgccatccgcgccatttatcacgaatttgtgggcggcgcggagcagcggtaggcgcgggcctgcgcaaaagacgaagaggatggccgcatgaaaaaacgcgaaaccgtctggcaatcccgtgcacaccgtcgttgtttcggcatttgcacggtgtgcctttccctgtatatcgcctatactacctatctcagccagagcggctttctgtccggcggcgttaagacggtggcgtcgctgtgcgtgtttgccgtactcagcgcgtccctgtgccgcctgctgtcagagggatgcgagcggctggcccggctgtcgcccgcgccgcatcccggcggcgggcggcgcgtcttttgggcggcgctggctatttcggcggtcatctttggctgcgcgtttgcggcgtgctggcccggaggcgtcagctatgatgcatccaaccagtggcgtcaggcgcattccggtgagttgaataactggcatcccgtttttcatacgctgctgatctggctggtcacgagggtatgggacagctacccctttgcggtgtgtatgcagatcgccgcgttttccgtggccatggcctacttgacttccacgctgcggcggaggggcgtgcctgcctggctggcgctgaccgcgcatacactggtgtgcgcttcgctgcctgtgcgcaacaccctgatgttcctgggcaaggacagcgccatgaccaccgtcgtgctggtgcttacggcacagacgatcaacctgttgcatacgcgcggcgcatggctcaggcgcccgcgcaacgccgtcgcctttggcctggcactggccgcagccacgctgctgcgccacaatgccattctatggacgctgcctctgctggtatgcgcgcttttgtgcttcccgtggggacgcaggggcgctgcgttggcggccggcgccgctgcgctggcgctggtgctggtgagggggccgctctatggcgcgctggacgtgatctatcccgacaacaccacggaagagagcgtggggattcccatgaccatcctctgggatatccgcatgcaggcgcccgaggcgctggacgaggaaacatcggcattcctctcggacctggctgcggacggggcatgggaggacgtctatcagcttcaccgctacaacagcattaaattcacctatgaccgcgaactgatcgccgaacgcccggtgacagagattctatccatggcgggccgtgccgcgctggccaggccacgtctggcgtttgagacgttcaatagcgtaaccggcctggtatgggacgtgaccggccagggccgcggctatgaaaccgtaagcaactccggcgatttgccccaggcgctgtatggccgggagacgctgaaccggctgggaaaagcggcgctggctgtcattgacgcgccgctggaatgggcgccggtgcgctggattgcggaaaacatcggggtgcagctgcttttgatgctgctggtagcgctgtgggcgctgcgccgccggggggtggatgtgctggcgctggcgctgcccgtgctgtgttacgatcttggaaccatgctgcttctgtgcggtgacgatgcgcgttttttccagtgctcgatggccgtttgcattccatgcgtgcttgcgctgctctatctgccaaagactgaggaggcctgaccgaggtgcctttgaccgccgacatgtttctgatcgtatgcccgctggcgctgctggcgggctttgtggatgccgtggccgggggcgggggactgatctcgctgccggcttactatctggccgggctgcctgccagcacggccgccggcaccaacaagctgtctgccaccatgggcacgatgctggcggtgtatcaatatggaaagtcgggaaaaatagaaaggcgaatcggactgttctccggcattgcggcagcagcggccagcgcgctgggcgtgcttctgatgaagcagctgccggaccacacggtgcgtgtgctggtgatgtgctgtattccagtggcggcgctctttacccttcggggacatggcaggggacatggggataagcgctttaccgcacgcgtcaccatgctgctggcggtgggcataggctgcgccgtggggttctatgacgggctggttgggcctggcacgggcacctttctgattttactttttgttcacatttttggcctggaggatgtcaccgccagcgggacagccaaggtaaccaacctgtgcagcaatctggcggcccttaccagcctgcttttgaccggggatgtattgtggctgctgggcttgccagccgggctgtgcgccatgatcggggcccagctggggagccgtcttacgctgaagaagggcagccggtttgtgcgcgggatgatgctgtgcgtgcttttcctgcttcttgccaaaatgattacggatatgttacaataaaggttgccatgaacttggaggtgggcccggatgattcaacccgatctttcacgcgaggtacggcttaccattcccgcacgtcaggattatgccctcgttgccagcatgacgctttgcgggctgggcatggcggcagggctggacatggacctgctgggcgatctgcgcacagtgacctgtgagtccatggactgcctgctccatcaggccggccgccccgaatggatcgaggtacgcgcatgcgtgaaggatggacggttgtgcgttgggttccatgcactctcgcgcctgagaacacaggaagaggatgcattggatctggatattaccctggggattttggaaacgctgatgccgcaggtgcggctggaagaggatggcgacggcgtgtacggcattgaatgctcgatgcccgtctaggagcggaggcagccatgaatgacgagcacttgattcctctgctggagaggtacgccgccagtcgcgatcccgcccttcgggacgagctgttcgagcactacctgcccctggcgcgggccgtggcgcgcaagttttccggccgcggcgtggaaacggaggacctggagcaggtggccggcatggcgctgctcaaggcgctggagcgctttgatccggcgcggggctttcgttttgtcacctacgcggtgcccaccatcacgggcgacgtgcgcaactacctgcgcgacaagagcggcctgatgcgcatgccgcgcgacatgcgccagcgcctttaccagatgacacaggaacaggagcgtttcgagcgcgagcatctgcgaacgcctaccgctgtggaactgtccgagcgcatgggaatcgcgcccgaggagttcctggctttgctcgccctgcgcacgcaaaatgaggcggtgtcgctggatacgcccgtgggcgaggagggggatacccagctgtccgacctgctgggcagcacggacgaccgctttgaacgcatggagcgcagcgaatgggcccagtggcttttgtccaaggtgggcgatacggagcgcgaattgctcaccctgcgctatcgtgacggcctgggtcagcgcgaaacggccagacgcctgggcatctctcagatgcaggtgtcccggctggaacggcgcgcgctcagccgcctgcgggccatggaggcccaggcataacgaagcttggaatgtgaaaggaggctggcgggtttgcaatcggaccccaatcaaccgcagaatccttatccgcagggaccgtccggtcccgtgaactggcagcagcccgccggcacgccgccgcagacgcctcccggtatggagggacagggctggcagggcgggaccgcctggccgcagggccagccaggtgcgtatccgggatatggctatcagcagccgcagcccatgtatacgctggaacagctgcaacagatgtacacgccggagcagcttcagcagatgtttacgccggagcagcttcagcagatgcaatatgaggcctacatgcagcaggctccggccatgcccaccatgcagcagcccgctcaggagttgcctcacaggcgcaaaaagcgcaaaaaaaagccgtccggcaagggcggcggacaggtgtggaaggtgcttttggcgctggtggtcatcggcggcgcggcgtggtattttctcaaagatatggtgggtaccccgatgcaaagcaccgctgtggtggaggcgggcaccctcggcacctcctatacgggcgatgcgctgatcgttcgcaacgaaaccgcctacgacgaggagggcgtgcagtatatcgattatgtcgctcaggagggcagcgtggtctatcgaggcgacgtgatctgctatgtctactccaccggctacagcaccaaggaaatgactgccctgcaggactgccgcgacgccatcaaggactaccagcagacgctgctcaaaagcgaaaccaactttgatcagaagatgatccggctggaaaccgaagtgatcgagcgggggcttgaggtcaggagtctggtgcagggcgcccgtggcaaccttggcaaccaggaaaccattctggaaaccgccatcaaccagcggcagagctatttccgcagcaagtactccagcgacatgcgcctgaaccgcctttatgacgatgaaaccaaccagcagcgccgcatcgacagctggatcaaccagacggtggccacgcaggaaagcatcgtcagcttttataccgacggattcgagtatgcgctgaccccttcggaatacgaaaaatacaccccctcgcaggtgcgcgccatgatcaatggccaacggcctgaaacttccaccgccgcccgcggacgcaccaacctgtaccggctggtcaaacagaacaactatgccgtgctcatgctggtgcgcaataccaactggaatcctgtggagggtacgacctacaagctggtattggagcagttcaccaataccgtggtggatgcgcaggtgctatccttcacccgttcgggtggggagctgctccttcggctggcggtgattggcgatgtgcgggacgtgctgtatatgcgcacgtgccaggcccagctgggcgagtatgtggactgcctgctggtgcccgaaggcgcgctctatacccagaataacgccacgggtgtggtggtggtatcggaaaccgcgcagaactttgtacccgtgaccgtacaccgccaggaaaacggaaaggcgtatgtatcgcccgtgcaaaccgggttacttaccgccgggcagaccgtgcggctgttcaagtaggaaaggcgtggatgacgaaatatggacgaaaaaatgcaggaaacgcctgaaaagcaagcgtcaactggacttgtggagcatctggagccggaggtgcttcgtcggaacgtgtcgaaggttttggaagaattggacaaaaaccgctttcaaaattctccgccggcccgtctggtagcggttaccaaaaccgtgggcccggatgtgatcaatcagctgaaagccttgaatatcctggatattggtgaaaatcgggctcaggtggcgctgcccaagctgccaaaaatcgcgccggaatttcgtttgcattggattggaaggttgcaaaccaacaaagtcaaaggtataatagaccatgtgtgtatgctgcatacactggaccgcctcgccctggcgcaggaggtgcagcgccgcgcggcggagcacggacgcgttttgcccgcgctgattcagatcaacatcgcgcgggagccacaaaagggcggcatgccgccggaggaggcgcttggtttcctcaggcagatgcgcgattttcccaatatccacgttgaggggctgatgagcatcatgccgctgggggcgccgccggatgtgctgacgaccttgttccggggcatgcggacgctctttgagcacctgcgggacgaagcagtggaaggcgtggaaatgcgggaattgtccatgggcatgtccaacgattatcagatcgccgcgcgcgagggcgcaacgatggtgcgaatcggtacggcgctgtatcgccgggactgaagcattcgccatagggggttcgttgagttgggaatctttcggaggatcggggactggctgacggaaaagagcgaacggtttatccgcggcgagtcggatggtacgggcggatactacgccacgcgcgaagccgagcaggcgtacggcggcatggggatggatcaggagcctgtgcaggatggcatggagggcgaagaagcgccccgcaggcagccgctggacccctttggccatggcgagggagaatatggtggtcgtgtgccctatcgcagccggtatgatctggagcgggaacgggaggcacagcaggccgccgcgcagcggcaggcccccgcgcagcagcccgctcagcctcagatgccgccgcagcaggcgcccgtgcagccgctttatggccagcagcagggctatgcgcagccccagggctatgcccgacagcagagctttccccagcagcaggcgggctatgaccgggcgccccagcagcagggctatagccagcagacgagcaatgtggtgccctttcccggcatgcagcgcgcggcggatggttccgtgtatgctcatgtggagtacatcgtgctgctgcgcagccgcaacgagtgcaaggacgtcatcgcctatatcaagaccaatgcctctgtgtttttgaacatggagttcatcgcaagcgacagcgagcgccagcgttgcgtggacatgctcagcggcgcggcctatacgttgggctgtgcgctgaacaagatttctccgcgcgggatctatctcatttcttcgccgtccgtgcgcgtggtgttggaccccgccatgcagaagttcacctccgcgccggaggcgcaaggctatgcccgccagcactatgagggtgacggctatcgctacggcggctatcagcaggcagccgagccggagccccagcagcctgtggcaggcttttcgtccggttcgcccaccacgcgctttcaggcgcagggtacccaacgaatgcccgccagcttcggcagcatgatggcgggaggtgcgacgggcgcctataccgccgtgggaggcgcgacgggccgctacgccaccatgcagcagtaaggaggacacaccaatgatagccaccttgctgggaatcatcgcctggctgctgcgcctggccagcacagtgcttcttatttactgcatcatgagcttcgtcatgccgggcagcgacctgatgcgcaaggccgcctcctatgtggaaccggtgctgcatcctttccggcagctgctctaccgctattttcccaggcttcggacacttcccgtggacctgtccccgctggcggtatggctggtgatcgatgtggtcacgttgcttttgaacatgctgaggcgcgcggtgatctgatgcgtggcgaggaggatgcggcgctgcttgcacgccgcctggacgagcttgccgcgcgtgcagagaggatcggccagccctgctttaccggctttctcaccccgcccgaagcggatatggcgctggcctcagcgcgccgccagcgaatcgaggcgcgcctggaaggcggctatgaggatgccgagcggcgcatggcctgctttcttcagccggacggacgggaggagccctttcccattgcggcactggagctgacctggccgcaccagagcgcccccggccatcgggatgtgctgggaagcgtgctggggctgggcatccggcgttcgtgcgtgggcgacatcgtggtgctgcccgaccgggcgtatttgttcctggaatcccaactggcggatcacgtggcactgtcgctgacctcggcgggacgcgtgcaaatcaggacgcgcgtattggaagcctggcccgaagtcgagccgccgcagggcgttgaggtgcgcgacacggtgtccagcctccggctggatgcggtggttagcggcggatttggactctctcgcgcggcggcggccgatctgatcgccgctgggcatgtgaagctcaggcatgtacccgcccagcgtcctgatgtgcgggtaggggagggcgatgcgatctccgtgcgcggctatggccgcctggtgatcgagcaggtgggagcgcccactaaaaaaggccgtctgccagtaaggctgatacgatacggcgcgagccggaagcattgaatcggagacgacgaaaggagaatgaccatggcattgacgatcgacgatatctacgacaaagagtttgcactcaagggcggcggatacgaccgcaacgacgtggatcagtttttggacgagatctgcgatgaaatgaccaatatgcaggagcgtattgaccagctggagagcgaattgagcaaggcgcgcgccgaggcggaagccgcccgtgagtccgtcaagcctgcgccccagcccgtcgcgaaggccgagcccgccgtggccaagaccagtcagacgctggagagcattctgctcagcgcccagcgcctggccgacgaagccgtggagaacgccaacgccaaggccgaaaccatcgtcaaggaagcgcaggaaaaggccagccagattgtggacgacgcccagagcgagcgcgagacgctcagcgccgagctggagtccatgcgtaaggccgccgcggaatataaggacagctttttggcaatggtcaacaagtacaagaccatgctggagggcgaggactttctcaagaagtaagcgcctgcatgccgagaagaatgggcgccgccggttttccggcggcgcttttcagcgcatgcggcagcgcagcacccgcacatcgatggtgatcttctccagcacgattttttccagcgcctctgcaggcacggagaaggtcatcggcgtcatgcgcagaaaatcatgcgaatctgccggcgagaggggagcgacggagcgcacgggcgtttccgagatcacctccgcatgcgcgcgcaggtgggcgagcaccgaggcgttgtcataggcgccgccgcgcaggtagcctgcgaccgccgatcggacctcaagcaggtaatccgggccgggcaccactttgagcagctccccgtccggcgtgagcacgcggcgaaattcgccatagtcggcgggggaaaagacgttgagcaccacgtcggcagcggcgttttgcacgggcagtcgcttgagatcggccacgaaccatgcgccccgctttgccgagcgggccgccagagccaccgcatcccggttcaggtccagcccgatcacctgtgcttcgggaaagcgcgcctgtacggcgcgggcatagtacccctctccgcagcccgcatccaccagcgtgaaggggccggaacggtccgcaagcgcggcgcacagcgcatcccgtacgggtgcgtagaatccccctgcaaacacgcggccgcggctttcaaacagggtttcatcgtatttgtcgccgctctggcggtgggagggcgcaaggttgacatagccccggcggctgaggtcgtagcaatggccgttttcacagatcaggctttggtccgtgagcgaaaatgcgccgccgcaccggggacattgcagcgcaggaagaagaggcgaaagccgtccagccagaattgccggtttcatagggcacttcctttggttacaaagatgataatagcattcgacggcaggccgcttgctccctgccatgcacgacggaaggatgggggaaataccaaatgtgggtgatgatggcgctgctctccgccctgtttgcaggtgcgacggccatattgagcaaaatgggtgtgcgggatacggattccaccgtggccacggccattcgtaccacgctggtgctggcgtttgcgtggctgctggtgttcgcgcagggcctgcaggcgcagctttggcagctttcagcacggacgtacctgtttctggcgctgtccgggctgtgcacgggcgcgtcgtggctgtgttacttccatgcgctcaagctgggcacggtaaatcaggtcacgcccgtagacaagagctccacggtgctgacgatgctcctggcctggcttcttttgggcgaaccgatcacctggctcaaggccgcggccatggcggggattatggcgggcacgctcctgatgatcgagcgccgacctgagaccacgcccgccgctccacgcggacatggatggcttctgtacgcggcgctttccgcggtgtttgccgcgctgaccgccattctgggcaaggtgggcatcgaaaacgtgcccagcgacctgggaactgcgcttcgtaccgtggtggtgcttctgatggcgtgggcgatggtgttcgtcaccgggcgtcaggcgcaagtgcgcgccgttgggcggcgggaccttgtctttatcctgctttccggcgtggcgacgggcacgagctggctgtgctactaccgcgccctgcaggaaggccccgccagcgtggtggtgccgctggacaaactcagcgtggtggtgaccattgtgttcagccgcgtgtttctgcacgagcgcctttcgcgccgcgcactggcaggatttgcgctgctggtggccggcacggggctgctgctcctgtgagcatattgcaaatattttcacaaagcatgacttaccccttgcaaaacatagcgcatttttggtaaaatacttgttgggaacaacaatgttttaggaggtacccgccaatggtgaaagtagctattaacggcttcggccgcatcggtcgcctggctttccgtcagatgttcggtgccgagggttatgaagtggtcgcgatcaacgatctgaccagcccgaagatgcttgctcatcttctcaagtatgacaccgctcagggctcctactgcggtcatatcggggaaaacaagcacacggtcgaagccactgaggattccatcatcgtcgatggaaaggaaatcaagatctacgccgagaaggacgccgccaactgcccctggggcaagctggacgtggacgtcgtgctggagtgcaccggcttctattgcagcaaggaaaagagccaggcccacatcaacgccggcgccaagaaggtcgtcatctctgcgcccgctggcaatgatctgcccaccatcgtctactccgtcaacgagaagacgctgaccaaggaagacaagatcatttccgccgcttcctgcaccaccaactgcctcgctcccatggccaaggcgctcaacgacgcctatcccatccagagcggcatcatgaccactgtgcatgcctacaccggcgaccagatgatcctggacggcccgcaccgcaagggcgaccttcgccgtgcccgcgctggcgcgcagaacatcgttcccaactccaccggcgctgccaaggccatcggcctggtcatccccgagctcaacggcaagctgatcggctccgctcagcgcgtgcccgtctgcaccggctccaccaccatcctggtggcggttgtcaagggcaaggacgtgaccaaggattccatcaacgccgccatgaaggccgccgcttccgcctcttacggctacaacgaggaagccatcgtttcctccgacgtaatcggcatgaagtacggctctctgtttgatgccacccagaccatggttgccaagatcgacgacgacacctatcaggtgcaggtcgtgtcctggtacgacaacgagaacagctacaccagccagatggtccgcaccatcaagtacttcgctgagctgggctgagaagcggtctgagccgttcgcgcccgatgggctgaatggctgccaggaaaaaagcgaaaaactttcccccgcctttcccatgggagaggcgggggtttttgctttatttgaagaacagcacgcgcgcgatgcggcccgtcttgtgggcataggccagcgtgcctgcggtgccgccgcgaccgcgtccgtcatagaccgcgatcacgagttgggagcggtccaccatgaagcggttgcgatttcgatagacgccgtcatgatagtgctcgctgacgacgtggacctcggtgcaggcgtcaagcagggcggcggtttcggggtcggaggcaaggcgctcgaagcgttgtcggaaggggatggcggccaacaggtgaaggccgggatgctcgcgccctttttgcgccaccagccgtgcaaacagcaaatcaatcccttcggcaaagccgctgaaaaaggaatcatatccctctgcgatggctcggtcgatctcggcggacagcgcggcggttatttcgggcagcttgccggcggggatgtcgcggtggccggtgacacagcaggttttgggcataacgattcctccaatgttcaataaaaacttatgtgaaatctattttaatagaaatgaccttttatgtcaatcaaaataaagagacattgtttgtgaatgccggcctcctatccgatacaatctattacatggagaggagggagatttccgtgcggtacgaagagtttcttcctcagcggcttacgcagctgagaatgcagaaaaatgtttctgcacgcgacatgtccctctctctgggacaagccaacaattatatcaactccatcgaaaaccgcaaggcgcttccttccatgcagtccttcttctacatctgcgaatatctgggcgtcacgccgcaggagtttttcgacgagggcaacgcctgccccgtgcgcctgcgcgagctgctggatgaagccaaacgccttgacgacaacgctctcggccacctgctggccctgatgcgggagctgaacgccgggcgttgagctccctttttcattgacaaatccgcccgttttcggtacaatacaatcaaacaaagccatattgacctcggatgaagggttcgggagagaccggcatgccggcgccgaaggggcgaaactctcaggcaaaaagaccgcaccctgacgaagctctggaaagcgttgcgcaccaccgaagaagcaatcccgcctcccgcgggagaatctttcaggtcacaggacagaggcggcggaaagccgcgctctgtttttcttggttgacggttttttcacaaattcagaagggggaatgacaatggacctcaaaacgccgctgtacgactgtcatgtggcgctggagggccgcatggtgccctttgcgggctacgtgctgccggtgcagtatcccacgggtgtcatccgcgagcacatggccgtgcgtcaggcctgcggcctgttcgacgtgagccatatgggcgaggtgctctacaagggacccgacgcgctggccaatctccagaagctgctcaccaatgacttttccaccatgcgcgacggcaaggtgcgctatagcgtgatgtgcaatcccaagggcggcgtggtggacgatctgatcgtctaccgcttctcgcaggatgcgtactgggtggtggtcaacgcggccaaccgccacaaggacgtaaactggatgcgtgaaaacctcttcggcgattgccagcttaccgacatgagcgatgatgtggcccagctcgccctgcagggaccaaaggcggaggctgtcttcgccaaggtctgcgatcaggagccgcccgcaggctactacacctttattccggagatgacggtggcgggcgtcaaatgcctcgtttcgcgcacgggctacaccggcgaggacggcttcgagctctactgcgccaatgccgacgcgcccgccctgtggaaagcgctgctggaagcggggaaggacgatgggctcatcccctgcggcctgggcgctcgcgacacgctgcggctggaggccgccatgcccctttacggccatgagatggacgataccgtcagcccgtttgaaaccgggcttggctgggcggtcaagatgcacaaggacgacttcatcggcaaggccgcgctggtgggaaatgagcagcccgcacgccgccgcgtggggatcgagatcaccgggcgcggcattgcgcgcgagcactgcgacgtgtacctgaatggaaagaagatcggcgtcaccacctccggcacgcactgcccctatctgggcaaggccgtggccatggcgctcatcgacggtccggcggaggacggcgcgctcaccgtggacgtgcgtggccgccagatcgaggcaaaattcgttcccctgcccttctatcagcgcaagaaataagcatttcgtaaggaggaacctgtcatgaacattcccgcggatctccgttacaccaaaacccatgagtggatcaaggaagaaaacggcgtcgttaccgttggcctgtcggactttgcgcagcaggagctgggcgatctggtgtttgtgaacctgccccaggtcggagatgcggtcacggcgggtgaggcgtttgccgatgtggagtccgtcaaggccgtgagcgacgtgtacagccccgtcaccggcactgtgtgcgagatcaacgaagccctgcttgacgcgcccgagagaatcaatcaggacccctacggcgcatggttcatccgcgtggagaatgtgaccggtagcgtcgagaccctgtccgccgaggaatacgaggccatgccgaaggagggctgattccatgggcagctatgtacctgtcacgccggaggagcgccgcgcgatgctggagcgcatcggcctgccttcggtggaggcgctttatgccgatgtgccggagggcgtgctcctcaaggagccgcccgtgttcaccggcggcttttcggaactggaggttcgccgccatatggagcggctcgcggagcagaaccgcgtgttcagcaccattctgcgaggcgcgggggcctatgaccactacatcccggctatcgtgcgcgccatcccgtccaaggaggcctttttgaccgcctacacgccctatcaggctgagatcagccagggcctgctgcagtccatctttgaatatcagaccatgatttgccgcctcaccggcatggacgtggccaacgcctcggtctatgacggcgcaagcgcggcggcggaggcgtgcgccatggtgcgcgagcgccgccgcacggtcacgctggtgtcggcctgcgcgcatccggatgtgatcgccaccatccgcacctactgctggggttccaaccacgagatgcgtctcatccccgaaaaggatggcgtgacggatctggacgccctgcgcggcgcgctggacgatcaggtgagcggcgtgtacctggcttcgcccaatttcctgggcgggatcgaggacgtgagcgccgcggcggaaatctgccatgcggcgggcgctaagctcatcgtgggcgccaatcccatagcgctggccctctttaagacccctggcgaagcgggggcggatgtgtgcgtgggcgatggacagcccctgggcatgccgctgagctacggcgggccgtatgtgggcttcatggcgacacgcaccgcgctgatgcgcaagctccccggccgcatcgtgggccagaccaccgatgtggacggaaagcgcgccttcgtgctgacgcttcaggcgcgcgagcagcacatccgccgcgaaaaggcgggcagcaacatctgctccaatcaggcgctgtgcgcgctcacggcggcgtgctacctgggcgcggtgggcccggagggcctgcgcgaagtggcccgccagtgctatgacaaggcgcattacttcgctgataagctggcctccatcggcctgccccggcgcgagaagggcccgttcttccacgagttcgccacggagtgtccgggcggcgcggagaagatgctggtggcgctggaggaacgcgacattctgggcggccagcctctgggtgacggccgcgtgctgtggtgcgtgacggaaaaggccgagcgcaagcggctggacgaggccgtggccgtaatccgggaggtgacgaacctgtgaagctgatctttgaacagtcccatccgggacacaggagtcaatttttgcccgcgtcggacgtgcccgccgcggcgctgccggaggaacttgcgcgcgagtccgcgcttgatttgccggaactgaccgagggcgagctggcccgccactatgaagcgctggcccagcaggtgcacggcgtaaacaaggggttctatcccctgggcagctgcaccatgaaatacaacccccgcatcgacgaggacgtggcggccctgccgggctttaccggcgtgcatccgctccagtccgaaaccacgtcgcgcggctgccgcgaggtgctgcgtcaggccgaggaacgcctgaccgccatcaccggcatggaccgcatgaccttccagcccgccgcgggcgcgcacggggagtacatgggcctgctgcttatcaaggcgtaccatgagcgccggggcgacaaggctcgcaccaaggtgcttgtgcctgactcggcgcatggcaccaatcccgccagcgcggccatgtgcggctatcaggtggtgagcatccccagcgacgcaaacgggctggtggatctggaaaagctgcgcgaggccgcgggacccgatacggctgcgctgatgctgaccaatcccaataccgtgggcctgttcgatcccaacattctggaaatcacgcgcatcgtgcatcaggcgggcggcctgtgctactacgacggcgccaacctcaacgccgtgatgggctgggcgcgtcccggagacatgggatttgacgtggtgcacctgaacctgcacaagaccttcgccaccccgcatggcggcggcggtccgggttccggtcccgtgggctgcaagaagtttttggcgggcttcctgcccggcagcgcgctggccacgggcggcgaggccccctaccaggtgcgcgccttccatggcaacttcctcgtggtggtcaaggcgctggcctatctggatacgctcggcggcgagggcatccgcgaggcggccgcgcaggctgtgctcaatgccaactatctcatgtgcctgctcagggacggcggctattccatggcgtatgaccatccctgcatgcatgagttcgtcatcacgctggagaagctcaagcacgagaaggatgtgtccgcgctggatgtggccaaggcgctgctggaccatggcatgcatccgcccacgatgtacttcccgctgattgtgcatgaggcgctgatggtggagccgacggagaccgagagcaaggagtcgctggaggctgccgcggagagctatctcgcggttctggccgaggccaacgaaaacccggcggatatgcataaccgtccgctgacgacctatgtgcgccggctggacgaggtgacggctgcgcgcaatcccatcgtcaagtatgaagctccttctgcttgagaccagcagcaccgacccctaccgcaaccttgcgctggaggagcatctgctttcctgcgtgcgggaggatgaggcccttctctacctgtggcagaacgaccacacggtggtgattggccataaccagaacgcgctgcgggaggtgaacctctcgcgcctgcgggcagacggcgggcatctggcccgccgcctttccgggggtggggcggtgtatcacgatcttggaaacctgaattttacctttattttgcctaaagcagcctatgatctcacgcgccagacgcgcgtgattcttgaggcggcgcggcttttgggtgcgccggccgaggcctcgggccggaacgatatccttgccggaggacgaaagttctccggcaacgcctactaccgccggggccaaacctggtatcatcacggcacgctgctggtggattccgaccttgacgcgttggggcgctacctcaacgtgtccccggaaaagctggcggcgcggggcgtggcctcggtgcgaagccgcgtgtgcaacctgcgcgaatgtgcgccgggtgcgaccgtggaggcggcacgccgggcgatggcggcggctttttcgaccgtttatggcgaaaaagtggaactgtttgaccatgaacgtctccaaaatgacaagattgtggagaccgaacggcggatttcttcggaaagttacctgattggggagaatttccccttttctctttcgcttgagcgccggttcgcgtggggtgggctggagctcgcgctgaacgtgcacgcgggccacgtggcgcaatgccgcgcgtattcggacgcgatggaggaaagcgagatcgcctctttgcccggtcgcctgacgggctgcaccgtggacggcgcggcctttgcgaaggcgcttgcgggctggggcggggaggacatgaggcgcgatgtgctggacatgctcatggagctgtgagcgccgcgcggacgggaggaacgcatggatcatgagcttttgattctgggcgcgggccccggcggctatgaggcggccatccgcgccgcacaactaggcctgaatgtgggcctgatcgagcgggacgcggtggggggcacatgcctcaaccgcgggtgcattcccaccaagacgctcctgcatgatgcaggtccaggcgcagactttcttgccctgaatgcgcacaaggagcaggtggtttccacgcttcgtcagggcgtggaagggctgctcaaaaaacgccgcgtgacggtgtacagaggcacgggcgtgctcacggacgaccataccatcgaggtggacgggcaggcggtaacgggtgaaaaactgctgcttgcgcccggctcgcgcccggcgctaccgccggtagagggcatcggtctggccctcacctcggacgacctgctgcgggaaccgcatccattggaaagcctgctcattctgggcggtggcgtgatcggcgtggagatggcggccttctatgcggccacgggcacgaaggtgaccatcgtggaggcgcaggagcggctgcttcctcagatggaccgagagatatcgcagaatttgcagatgattttcaagcggcagggcatgaccgtgcatacgcgggccctggcacgccgcatcgtggaaggcggcgagggcgtcatcatggagctggacggcggagaaacgctcaccgcgtccgccgtgctggccgccgtgggccgcaggcccaacaccgacggcctgtgtgcgccgggcgtggcgccggacatggaacgcggcttcatccgcgtgaacgagcactttgaaaccagcctgccgggcgtctatgccatcggcgatgccgtcggcggaatgatgctggcgcatgcggcctcggcgcaggggctgacggtggtgcatgcaatagcgggggaggaagcgccgctgtgccttgacgcgattcccgcgtgtgtgtacgtttcgcccgagatcgccagcgtggggcttacccaggcggactgccagcagcgaggcatagaggtcaaagtgggaaaggccctcatgggtgcgaatggtcgtacgctgatcgcgggtggccagcgcgggttcatcaaggtggttgtgagcgcggagaatggccgcgtgctgggcgcacagctcatgtgtgagcgtgccaccgacatgatcgactccttcaccgtggccatcgccaatggtttgaccgccacgcagctcatgcgtgccgtgcggccgcatccgaccttcctggaggcggtaggcgaggcactggacgcactggagggccgagccatccattcctgacaagcaaagaaaaacaaggcgctttccgggctgcatgccttcggaaagcgccttttccgctatggcgcgggcttcatgaagcggctcaggccgttgaggggacgtgcgtcctgaggcggccgggcatcttccggggatatggacagcaaattggtcagctcggcatcttcgggacggttgtccggctttgggtccagcatgcgcagcaccacgtcccgcagcttgacgggcagcgtgggggagagggcgatatctcccccatcgagggccgcctcgtaaaggtaggtgtatttggcatgatcgaaaccgggcagatcgcccgtccacacgcgatgaatcagcgcgccgaaggcgaaggtatccagctttgggcccaaaggtgcatcctgtcccgccatgtagagaaatgcttccggcgaaaggtagacggggtctccttccagatcacgctggttctggggcgggtcatccttgagaaagccgctgtccagatcaatcagacggatgcggtaaccggtcggtcgcttgagcagcagcacgtggtcgggcttgaggtccgcgtgcaccacgccttgcgtatgcagacgctgcagacacagcgcaaggtccgaaagcacctgccgcttggcgcgctcatccagtgccgccgcatcgcccgccgtcaggtcggaaggaaacaccgcttcgctggcggcatagtagcgacgctcgaagcggaagaaatccagcacaggcaccagcgtatccccgatcacgcaggacagcgccgcatagagacgctgcttctgcccctcaaaggcctcgcagcgctcgcgctggcgctggcccagcggcgttgaggggtctgccgggtagacaggggagagaaactgcttgagaaagtacttttccagccctcgcgccgcaatgcaccaccgtgcgctcccgctgcccacggtacgcaggggggtaaggggcctatacccgccaatcaaaccgctcatgggtgcctccctccgtccagtcatacgccgtgcggtactcctgccatttgacgcgcgcaaaagccatgtcccgccgctttcggcgtacgggggtgatgaagcgcttttgcagcagtgcacgccggggcgcaagagcttcccgcgcgtcttcgatggtctcgaaccccagcggggccagcagcaccgtcgcatcgtcatgcgcggcctttttcagctggttcagcagccgccgttcccagccgtcccagtcggcgctggcgcgcagggtgttgagcagcagcatttcaaactccatgggcgtgggcagacagccgaaggctccgtcggtcgccacaagcaacacgcagggcttgggtacacgaaggcggcggagactgagtgccacgggcgcgtcggcgctgatgagcgcactcaggggccggtcacggtacaggctttcaaaggggtccgggtcgccgcgcaggtggtcgcgggtgcattgatgcaggccttctgcatccagcacatagccgcggctgtcgcccgcccagaggaagcagagatcgctcgcaaaggagggaccgcccgcgatggccgcgcacagcgtggtgggcaggcttcgctgcatgctgcccacgatgcgtgaaccggcgggacaatgcttttgcgcaaagctgtgaaacaggctttccaactcgccccccagctcgcggcacagctgcataccctccgctttggagccgggcatgggcagctgatcgcccacccaggccgagagcgcatgtgtggccagccgcgcgccggcaaacgcgccggtgtgatcgccgagggtgtcatagcgccggctgccaagtcctccgcatccgtccgccacgcaaagcagagcgccccgaccgacgccgcgcatgcaaaaactgtcctccccggagccgggcagaacagcgtattgggcacgaagcaggcgctgggacacgggcggcgctcccttccgcttcaaatggtgttgcaaacggcgtccagcacctgccggtattccacatccagcagcccctcgctgaccgtttgcacatggatgacctgaccccattcggaagaaatgcggttccaggagggcgcatccggagcaaaaatgagcaggcgcttggcgttttcatccatgctgccgccaagctgctcatcctcccaccagaggctgagctcgtcaaaatccttggccatgccctccggataccagggggcgattttgccatgacccaggtcatgcgtgggcgcatccgaccacatgacgataatgtggcgcttcttcacaccctcgcgggtccagtcgctgcggatggcgtaagccaacgcctccagaccatcctccggaatgtcgccgccgcccttggcggtaatgccgttgacgcagtcatacagcatctgcgcctggtcaggcagcacaaaaaagtcgctgctgagcatggcgtcgtcgccgtcggccacgtaatcgcggaaagcaatcacccgcacgcgcagctggtcgatcaccttatgcttcttttccatttccgccacgatgtcgcggtagaggttaagcgcgttctgcttgaccaggtccagcacgtggcgcatgctgcccgtggcgtcgatgcaaaaaaccatgtcgacatggtaggtgagcttatacccttccaaaccgatcgagcctcccccaaaaatgcgttgttctttcaaaaggattctgcatcagcccgtattttcctgccgaatggggaggaaaagaggcggcggagcacgaaatattttctgttaaatgctttcagatcaatgcttgatgaaacgaaagggtcagggcgatgaaggtacgcaggaccatcggcggggcactgtttggaattgggtgtgcggtaacgtttgtgggaattttggcgacggtgctgcccatggttcaaaacgaccagcttcagctggtgctatcctccttcgaaatgccgtcggggaatctgatcgtcagcgccatcaatggcgcaatgacctacgcgttgcatcactgctacggagtgctgctgtgcggcatcgtgatgatggcggcgggcatggccattcttttgcaccgaacgcgccgccgccccgtccgtcacaatacgccgtcgtcttacagccgcccggcatctgcctccgccccaaagcccgtatggccggaagaggatgccgactggtcggcatggaagccgcgggaaacaaggacaaatccctttgcgggagcaatctatgaggagcttcccgcccgcgcgccgtctccggcagttccgtcggcctataccccgcctcccatcctgccgccctccaacgccgcggatgaaccttcgccctatgcacggccgtttgaggaggcacccacgcctccccccgcagcgaatcccccggtgccgccggttgcggcgcctcccgcaccggaagcatcggaaccgtctgccgcagaaactccctatgcagcaccagccgtgtcagagccggcagcagagacagtaccgccgcctgccccgaaactcagcgcttcttcctcaacgccgcctgtggcccccgctcgcgccgaggccggtacacccagccagagcggctcacgtgtgatgattcgttcgaccattgcttccaaggcagaaaagactgtgccggaatcggcatccccagcgccagcgcagacatcttcccgaaaggtggtgctggacggcattgcttacgagcccaatgaacccccggaggaggaggtcacaccgcccgtatcctcccgaatccgcagtacgatgggaaagcataccgtataacgaacaaccaaaacggggccgcctctgagggcggccctgtttgatgcttcgaccaaaagcggcgtccggttcatccggacgccgcagatttatttacgggttgaacatcatatcgagcatctccatcccgacatcgctcgtgccgtcttcattgaccatcgtttcggaagtggtctcgcccgtttcggtcgtttgcgcttccttgagcttcaggtttacagagcagaagttgttcaggtccgacttcagcgtggctgtcaccgtaagggtggaggcagtttcatccgccgcaacagtcagaaggccgctggtgctgatggtggtgcccttcgcctgcgctccggataccgtccactgaatgggataggtatcgtcctgctcataggcgatggcctgatcgttgatgagagcagtcagctgcagggttttgcccttgacaatggagctcttggacgattgaatggtcagcacggtctcgacgggagcctggggttcaggctccgtctgagactgctgcgcaggttccacgctgggctcctgcaccggttccacgctgggctcctgcaccggttccacgctgggttcctgtaccggttccgcgctgggttcctgcaccggttccacgctgggctcctgcaccggttccacgctgggttcctgcacaggttccacgctggtttcctgcaccggttccacgctcatttgctgtgcaggatcaacataggtttgctgacccgcgtcggtggggatttgctgattggaatccgtggcaggctggagatcggacggcgtcatgccgtcgacaacgtctccggtgaccgcattggcattctggctctccgacaagccggtttgagcggcggccgtcact

SEQ ID NO: 2563 - DNA, 9835 bp, Unknown
  16S sequences of unknown bacteria
tttttgagttgtcttttccattctgtcgttgttacttatctattgtaccataacaattttacttaaatattaccggaatttttcataaagttaacaaaaaaccgtccgtgtaacacttttcgaccagtgccgcacggacggtaaaaattcaattagttatttctctgatatgatgtagggctttgacgaaccatacaataagcagtgtcaatctgccgagggtcttttttgagtattcggcagagcggactttgtgattttatctatgacggcagcgcagagcaaataaagtaaaaatccaatcgacgcgcttatcgttcgcagaatcacactgtcaatgtcgaaagtcatgctctttgtaacaagctgaactgcctcaaggaacaatgcaaacgacgcggatatgccgacaacctttgcgtatttttccttaatgattccgagaagaaagcctaccgggataaacatgatgagattcgcggcaatgttgcgtattacaatgctcgtgttaatcctgttttccgcgattttgcttccgtaatcgaagaaagatttcagcgggataaaatttgcgtttattctgatgtaatccgagagggaaaggtagcttggttcaaatttcatgccgcctttttcataaagcacgattggcagggatttgaacgtcatgaacagcgcgattataataaggaaggcaagcgccgttctgctcgcgatttttttggtctgcatttgctgtcacctccaatgtaaaatcaaaagccccaatttatataatcatgccttctgcttgtcggggacgatgagtccgtatgagccggcgtttctcttgtagactacgcacatctcaccgttttcggcatcttcaaacacgtagaatgtatgtccgaggaggttcatctgaagtattgcttcctcgggagtcatcggtttcataaggaatgtcttttttcttatctcaaattcgccttcctcggggacgggagcgctgtccactgccattgcggcttctgctgctgcgaacgaggtcttcattcttttctcaagtcttgtcttgttcttgcgaatctgtccctcgataagctccacgcatctcgtaagggcgtttttgaattccgatgagctctcctccgcgcggaagagagtgcctccgactgagatggtcgtctccacacgcagctggtctttttcttccctcctgaccgttacaactgcgtccgcgccttcgggaaaatatctgtcgaacttggcgagcttcttttccgcaagcgctttcatatcatcgcgtatcgttacctgtttgccgataatgttgatattcatggtagtaccatcctttttgagtatttgccgctcgggatttttttccttttccctttcggcatttttattatagcagacatcggcgcggaaaaatacatatattttgtaaacaaatacacaataacataaagcaaaccgccgaaaattatgttcaaaagcactatgagaaatcgtcataaaaatttcaccgcagcgtcagattctccgttttaccgtgaaaagagcggaaaactgtgagaaatgtgtagaaaagttgaaattactacgtaatatgacaataatacacatcaatactgtgtttaaaatgagcatattttagtatatattacatttgacacatccgcgggataatgatataatgattattgcaggcttgatttgagtataatacaagatgtatatataaagtaagttaaagaatagtgaggctgaatatgcgtgaaaaactgagatgcgccgtagtcggagctacaggcatggtaggtcagagatttttgacccttcttgacggacatccttattttaaagtaactgcggtcgcggcaagctcaagaaacgccggaaaaacctacgaagaagcggtagagggaagatggaaaatgacctctcccatacccgaggacgtgaaaagcatggttctgctcgacgcggctcaggtagacaaggttgcggacgtgtgcgatatggtgttctgcgcggtcgatatgccgaaggacgagataaaagcccttgaggaagcatacgcaagagcagagctgcccgttatctcaaacaactccgcaaaccgctggacgatagacgtgcctatggtagtaccggagataaaccccgagcacctttccgttatcgaaagccagagaaagcgtctcggaacacagcgcggattcattgccgtaaagccgaactgctccatacaaagctacgttcccgcactgactcccctccgcaagtacggcatcaagcagattctcgtcacgacatatcaggcgatatccggcgcgggaaaaacgtttgagacatggcccgagatgcacgacaacatcattccgtatatcgcgggtgaggaagaaaaaagcgagacggaaccgctcaaaatctggggcgaggtcaacggcggtgcaataatcgcggcaaaagctcccgttatcaccacacagtgcataagagttcccgtgagcgacggacataccgcggcggttttcgtttcctttgaaaatactcccccgaaggagactattattgaagagtggaacagctatgccggacttccgcaaaagctcgctctcccctccgctcccgagaagttcatcacctacttcgacgagaacgacagaccgcagacaagacttgacagagacatctacggcggcatgggcgtgtgtgtaggcagactgagagaggactcaatattcgactacaagttcgtcggactgtcccacaatacgctgagaggcgcggcgggaggagctgtactcattgcggagctgctctaccgtcagggctatttaagctgaatattttccccctgtccttttacttggcgggggatttttttgtcctcggaagcgttttcagtgcgcaggcaaagcaggagaagatgataactcccgaaaagccgccgcacttccagccgatgtagaccgccgccagcataacgaacggagacacgcccatgattcgcccgagaatgcgaggctcaagtatctgccgcattgcccagataagcacgtacagcacaaggagagatattcccataactgtgtggcgcgtgattatcttgtatatcccccacggaacaaggattatgccgcagcctatcagaggaagagcgtccgctgcggctatcagaaacgctgctttagccggagaggaaacacggatgacgagaaaaccgacaaaaagtgctgtgaacgtgataagcgagagaaggagcgttcctctgatatatccgaaaaccgcgtcagagacgtttctgaaagccgagacgactctctctctcttttcttccggtatgagagacgatacagccgcgccaactccgtcaatgtcagccatgaggtagaaaaacgacaccgccgaaaccacagaagagagcatgaaggagggaagcgcctttgcggtactgccgataagagacgcgccctccgagcagatgtattcgagcagctttccggaataggataaaaccgcgtcgcgcactatctctgcgtccccgaaaatatggaacggcaatgagtcgaacatactcacgcagctgtccgttatctccgatatgcattcggacattccgtcaagctcgccaagcccgcgaatcgcaccggaagagaagagcactgccgaatacaccgtgagcagaagcagcaggcaggcaaagaccgagcatcccgccttctcgttcacacggcactttcgcgagaggtacactccggcaggacggaacatcctcgcggcgatatacgagacgagaaagggaagtattatcccgcccactccgtttattaatagatacgcgaggaaaactcccccggcgacaacaaaaacgagcttcaaaagccactctcccgaatgaaatatataactattatgcccgagagcaaaaaatttactacatatgtttgactttcaatgatatatctgataaaatatacgggtgcatccgtatgatatgcggaaaataaaataataaagaaaggttctccgtatgaaaaagaaaattcttatcgcagccgtgcttgcatttttggcggtgctgactttagtttcgtgctcaaaggataagccggcggagagcggagatttgggagacagcgttatggtacagatagaaatgcagaacggcggaattatcaagctcgagctttatccgaaggcggctccgataactgtcgaaaactttgtaaacctcgtgaacgaaggcttctacgacggactcatcttccacagagttataaaggacttcatgattcagggcggcgatcccgaaggaacaggcatgggcggctccgacacaaaaatcaagggtgaattcaagcagaacggctgggacaaccccatttcccacgtaagaggagttatctcaatggcaagaagccgctccatggacagcgcatcctcacagttcttcatctgccacggcgacgcaacctaccttgacggacagtacgcggctttcggtaaggtaacagagggcatggacgtagtggacgagatagcttccgtttccaccgacaagaacgacagacccgtagaggacgttgtgataaagacaatcaaggtaatagacgaagataacaaataatttaagcaaaacaaaaagactgctcacatacaggatttcttcccgtagtgtgaacagccttttttcgaggaagcctctgatttaaggttatttttgcaataaaagcccctatattttagccttttatcgcaaaaatccgatttattcagagtatcctcagcttactttatcagcttcttcgctctttctattgctttcttgaatctttcctcttcgcgaacgccgttgaaccattcccatccgctcgcagccgtcatgcccccgtacggtactgaatctctttggtcgaaggagtagcattcctcaaagggatgtgccttgccgtcgggtgtgtaatatacttccttgcccttcttcagagtgattccgccgaagttgttggggtctccggtctcaagcatttcgtcgcgaggtaccttagcccattcttcaaacagcgtgagggctttgtcgagggtttcgtagccttcctcgtttttgccgcagccgaataatgccgccgccatcgagaggtgaagtcttgcgtagcagcctaagaacgctctcggtactgtgccgtcctctgtcagagcctcgataatacgtattttcagcttgttgttggcaacgcttctctcgggcgcaccgttgttttgagaatttctcgtaaggaagtatgcgagcagaccaaagttgtttatggagttctgctgtctgctttcgtcatgcttgttttcatgccaaaggtcttcttcgacaacttccggatatatcgaggaatacgacattatcttttccggctttttctttgttccgagtcgatcggagaacaataccgttccgtcgtcagtgcccatgaaatagtatcttgcttcgccgcggcatccgtcgtaaaggttcaccgccttgtacactcttgtcatggtctcgccgtttttcagtatgtacggagcatagccttctcccacgccctcgtatgaatcaagctcatatacggcagtgagtgcgccctccgagtatgcgttcagcgtgcggacaatgcctattccctcggcgaaccagtattccttgtgtcccgcgatataggtaagacctccttcaagacccgaggagtctatagtcagcttgatgcagctaaaggttcccgcgtttgtcgttatctctcctgcgtcctcgcatttcacgtttgtcgtaatgccatagctgctccagatgaatgtcgaaaccttatcgctgaagcccgctttccagtcgtcgttccatgcgtagtcaaagttttccgccagcagtccgatcgggttgttgtaaaggagagcttcatcatacgcgtcgcttatgtattttaattcaaagccgaatagatggcggttgtcatcgcacagctttatatgcttgccgtcacgcttcagcatatggatattaaggaagttccacctgccgctttcggtgtagttcgggttgagggtcgggtcggtttcaagaattcttctcgcgactgacgctgctgctttggtgtggagcttttcaagcggagtggaggcaagctcttccattctctttatcgccggagttacgtcacagcacttactgccgtcaaagtactcgtttcgcaccatgagcgccatgtcgagccacgagttttcgtcgtaacctctgcgaaccatgttgaggttccactcgataactgccttttcgccgtcattgtacgctgtggtcagcttgtatgaatagtcgagcttttcggggcagttttcaagtgagtattcccatgtatttcctttatcaagcggtaatatgccgttgcccttaacgctgtaggaggaaagcacgagagcggacttatatccccacgccgagcgctcctgctttacaatgcccacgccgtccttgtagaatgccttgcacgtgtcgaaatttatgttgttcgaccatacggagcagttctcgaattttccggcaggcgtgtcaaccgtgactccctcggcttcgtgtgtgagcactgttccgtcagagcctgttatgctttctccgacgggtatatcagcggtgaactgtccgtcacagcgagcggcggtttccagcatggtgatatacgtgatgtatgtgagaaagcctgttccgtaataatccgtattccagtggcgaatgccgtttttgccgagcttcagctcaacagttccgccgaataaacggaagctcttttcgtttaattcagccggagacgctcttctgtcctttactgttttgatgagtgcgtccgcgcagtagaagtatgcgtcacctacgggaatgattttctttgctttttcataagcctctatcgcatcgtcgtacttgtctcttgccagacgttcatatccgagacagaaccacgcgtatccgagagccttaacaaatccgtttttctcaagtctcggtatctctttttcgaggaggtaagcctcagcatctgtgccgtatatcttcgagatgcttcggttgatgataaagcacatgacctcttcgttgtgtccgtcctcagccgcctttactatgcgtgagaacaactcttcgctcttttccccgggaagccaccaccagccgcgcacgagtacgtcagccattgcgtgggatctgtcctttgactcgggaagctcctctacatcgcggaggacgtcgcggtaagccttctcaaagcctgatttgttttgcagatactgccagtttttcagctcttcgaccttcttcattactcttcgcacgagggtgtcgttcatttcttcgttcattgagcatagctcctttctcagcttttttctgccgtcatgaagctgcgatttaaccgttccctcggatattctcatcctgtcggcgatctccgctatgctcagtccctcaaaatagtgcaggcgtatgacagtgcgtatcttgtccggcaggctgtccacggttgaatgaagctcgtcgcggctttcgctttcaacaatgtcgaggagtgtgttttcgcttgactgatagcagttctcaaattcgtcaatgctcatatacggactgtatcggcgaatcatgctcacggcgcagtttttcgctatcctgcatatccatgaaccgtatttcgacggctcacgcagcagattcagcttcatccatgcggtgacaaaagcatcctgcgcggcgtcctctgccatgtatctgcttctggtgacggacatagccgaggatatcacgcttttctcgtaacgtcttacaagaacttcgtaggcgtcctgttctcccgcgagagtcagaagcacaagggtctcgtcgttttgttcggtgtagtgcaaaatcgcatcttcctttctttaaatatgtcgtgtttccggaatcactttatcgcgcgttgtcattaagacgcagagatgagaaaaaaggttgggtaagaacgaaaaaaatataaaaaaaagaggatggagaagaactatctgccatcctcaagcggattacggggctcggacccgccacctcaaccttggcaaggttgcgctctaccaaatgagctaaatccgcatatatataaacgccttgccgaatctctccgacaaaacgaacgacctgaaggggattcgaacccctgacctctagcgtgacaggctagcgttctaaccaactgaactaccaggccatgcgcaaagctgttgccaagcgcgatggaaacaatagggctcgaacctatgaccctctgcttgtaaggcagatgctctcccaactgagctatgcttccaacttgctgccgcatctgacagctttgacattatatcacgccgtccggtttttgtcaagatgattttcaaaaaaacttcgcgaaaacacaaaaaatccgacacgggagaaaaatcccatgccggaaaaatttaccttaccgcagtctgccgctctcctgccgtctgaaagtccgtttcgatcagcttttggcatcccgcaggggagtacgtccatctctcaatgtgcgtgaccttcttcgtgtcgacaaaatatctgcacggaacaacgggagcgcgtccgcaggtgtcgatgagcacgagctttatcttcatccgctccggaattatgctcttgatgtagacggagcatagttctcccggagagacgccggggcaggcttcggcaagtccggcaagattcggcgtcagctccacgaaaactccgtattcctcaaccgagcggattattcccgtgactgtctgcccgctctcgaactccgacgcgttttcctcccatgttccgagaagctcgcggtgtgtgagatatatccgtccgtcctctgtggatgagataacggcgtctatgtattctcccgcggaaaaacgatccgacggatgagaaatgcgcgacacggatactctgtccacggtgagcagggaaacaagtccgccgcctatatcgcaaaacgccccgaacggttcaagatgcgtcactcttgccggaacgatatctcccggaacgagctttttcacgtagttctcccagcattcacgctgagccgcacgacgtgagagcattgctgtgacctctccgcgttcgttttcgtaaatttcgctgattttgaactgcaccggcttgcctacccttgtgatgacggcgatatccttgacttctccgcctgcgggagtgaatcctgcctcgtccttcggtataatgccgcgcacgcctccgggaagctccacatgaaggcacatcgcgctgcaatcgcacagctggcacatagcctcgattacagcacccgaatgagccgcggattcgagttcctcacgcgtgcgtataggggtgccgaacccatccagagctccgccctcgggtaagtattcgcgatatcttaattttactgcctgagcatacgttttcaatgccatttttgaccccgcatattaatttattttcgttaaactatatgtggaagtcgccggcgttatgcggaaatatgaggtagaaaggacgctgccctttcggatttccgctttagtccaccttgcgggtggggaaagatgaagaaagactacgtctttcagattaattattccacttcgcgtggggcgcccttttcagggggaacacagagatgctcaaacgccgcacctctgtgagttccggctcgcggtggagttcggtttacaccatattcttttggtgtcgcccatttgaacagattagtcgcgcggttacgcataagccttagtagtggcattagcatgttcgcgcgggagagtgagacgcggg

SEQ ID NO: 2564 - DNA, 18697 bp, Unknown
  16S sequences of unknown bacteria
gaccgacagcgacaccgccctggattacgacgcgttcctgcgcggatatggctgccggcggatatgcggttatggcttccggcagatcatcgaagtgccggatgaggacttcctgctgcgcgatccccaggatcagcgcctgctggagtccgcctgcgaccagaaggaacgcggctttcgacggatcatccgcgccgtgctggccgcggcctgcttcctcaccgtcctcatccagtaccgtttcgatttctattcgccgctcaattccctgctctggatgatcagctgcctgtttctgatcacgctgatcaccagcggccgcatgatctggcgccttcgcagcctgcgtacgcgagggatcgcactctgcatcctgcgcgcgttcatcctgatcttgttcgtgctgttcgtctggcgcagcaacgcctggaccacggcggcgctgggcaccttgtccctgctcatcctcttccttttgcagcagccggcgctgaagcggggatggtttacccgcaatacgctgcattacctttccctcgccttgatgctgggcatcggatcgctgatgctcatccgcatcttcccgcttcccgctgcctcctggcaagagcgtgaaacatattatatagagaaccggaacatcgagcctcttcctgtgctctatgaaagcccctttaatgacggcgaggtgctcgttcatcagcacatcgaacgcccattgggcagcggtacggaatacagctatgcacgcaaggacacgcagcagctcttccactatgaagcgtatgaaaacacacagcacctcacgctgccggaagccttctccaaggccgggctgggcgatctgcatgacagcagctttgccgaacagctggacatcgcgccgaaagaggtatggctcttgaaggagaccgtcggcttccgcatggaagacacgatcttccgtacgtataccctggcattcgccgatgaaggaaacatcgtcctcgtctctctgcccggatatgcgtatgatgagcaacaggcaaaagcattcatggacagcctgcagtgagcgtcgtctcctgcaggctttctcctgtttttctcctgcttttttcccagtaagattgacagcgtttgcaaaatggcgtatattttactttagcagataaaagagctgaagtatccttcagcgtaggagggatctgatcatgccgatcacagatattttggaacgcaactgccgactgtatggagacgacatctgtcttgtggaaatcaaccctgaggtgcgcgacacccgccgcgtcacctggaaagaatatgagctgatcgaaccggcgccaagaccatattaccgccgggagatcacctggaacgtattcaatgaaaaagccaaccgctttgccaacctgctgctcagccgcggcgtgggcaaaggggacaaagtggccatcctgctgatgaactgcctggaatggctgccgatctatttcggcatcctgaagaccggcgccatcgccgtaccgttcaatttccgctattccgcggaagagatcgaatactgcgtcaacctgtctgaggccgacgtgctcatcttcggaccggaatttgtcggccgcatcgaagagatcgccgagcgcatcagtgagaaccgcctgctgttttatgtgggcgcttcctgccccagcttcgcggaagactatgtcgcctgcaccgcagactgctccagccagtcgcccgccatcgccatcgatgaccatgacgacgcggccatctatttctcttccggcacgaccggctttcccaaagcgatcctgcacgatcatgagagcctgatgcatgccgccaaagtagagcagcatcatcatgggcagaccaaggacgatgtcttcctgtgcatcccgccgctttaccacactggcgccaagatgcactggatgggctcgctgctcaccggcggaaaggccgtgctgttgaaagggacaaagccgcgctcgatcctgaaagccgtatcggaagaacgctgcaccatcgtctggctgctcgttccttgggcacaggatatcctggatgccatcgacagcggcgaggtcagcctggaggaatatcacctcgatcagtggcggctcatgcacatcggcgcgcagccggtgcccaagagcctgatccagcgctggaagaagctcttcccgcatcatgaatatgacaccaattacggcctcagcgaatccatcggtccaggctgtgtccacctgggcgtggagaacatccgcaaggtcggcgccatcggcatccccggctacggctgggaagtcaagatcgtggatgagcgaggcgatgcggtcgccctgggcgaggtcggcgaactgtgcgtcaaaggccccggcgtcatgacctgctattatcgtgacccgaaagccacggccgaggtgctcaaggacggctggctgtataccggagacatggccaagcaggatgacgaagggttcatctacctggtcgaccgcaagaaagacgtcatcatctctggcggagagaacatctatccggtgcagatcgaagatttcctgcatggacatgaggctgtcaaggatgtcgccgtcatcggactgccggaccgccgtctgggcgagatctccgcggccatcatcgagtgcaagcctggcttcagctgcagcgaagaagagatcaatgattattgccgtcagctgccgcgttacaaacgcccgcacaagatcatctttgcggatgtgccgcgcaatgcgaccggaaagatcgaaaagccaaagctcaggcacatctaccgcagcgaaaacctggtcgccgcacagaccgaagccgatcagtgatcgtgctctgcatgaagcctgcgaagctgagacacacgccgtctcagcttttttcatgccattgaataaaaaaagcagagatcggcggatgacagctctctgcgatagacagaaaaagaaccaggcggtcatcctggttcatcgatcacgcaatgcgttgtccctgatcatccggcacgatatcctctgccatcatcgatcgtctcccagcgtcatgcgctgcggggtctgcaccttcttctcataacaggagaaggcttcttccaccgccgcttcatccttcactttgccaaacaggctgaccagcgggacgatgaggaaccctgccagcatgacgaaggcaccgcagttgatcggcgactgcagaaaagcgggaaacagctgaggtgcgcacatgttgaggaccatggtgccgcagccaaagaggaaacaggctgcgcatgcggccgggctcgtgcgtttcccatataagccatacaggaacggcgccaggaaagcgccggccagcgcgccccagctgatgcccatcagctgcgcgatgaacgtgatgtttcctttatattggatgatggcaatcaaggccgagatgaagatgaacacgacgatcagcacgcggatgctgcgcagctgctttttctcgctcatgtccttcacgatattgtccttgaggaaatcgatcgtcagcgtggaactggaagccatgaccagagaagagagcgtagacatgctcgcggagagcaccaggatgacggccagcgcgatcaccaaatctgacagtccggaaagcatcgtcgggatgatggcgtcatacccatctgcggcgatattgacctgatccgcaaacagacggccgaacccgcccagaaaataacagccgccggagacgaccatggcgaacaccgtggagatgatcatgcccttcttgaccgcggattcacttttgatcgcataaaacttctggaccatctgcggcagtccccaggtgcccagcgatgtcaggatcacgacgccgagcagtccgagcggatccggtccgaacaatgaggtgaatgcgcccggcgatgcgctgacagccggatcgctcacattggccaacgcgttcatcgctgaggtgaagccgccctgcgtattgagcaccgcagcgatgatgacgatgatgccgatgagcatgatgatcccctggatgaagtcattgatggccgtcgccatatatccgccggcgatgacatagatgccggtgaacaaggccatgaggatgatgcagaccgtataatcgaccgagaatgccatcgcgaacagcctggacagcccgttatacagcgaagccgtgtacgggatcagaaagatgaagatgatgagcgacgcgccgatcttcagcgccttgctgccaaagcgcctgccgaagaactccggcatggtcgccgcgttgagatgctgcgtcatgatgcgggtcctgcgtcccagcaccgcccaggcgagcagcgagccgatcagcgcattgcccacgccgatccaggtcgtcgccacgccgtatttccagccgaactgcccggcatagccaacgaagatgacggcggaaaaataagaagtgccataggcaaacgccgtgagccacgggccgacgctgcgcccgcccaaaacgaaccccttcacatctgtcgcatgtctgcggcaatagatgccgatcccgaccatgacggcaaagaacaccaccagcattgcaatcttgatacccatacgtttcgtaacccctttcatttacgttggttttaatttaacacacaaaagcgttaaagtcaacgctttattacataaaatcaataaagtgcatggcgttaaaaaaggaacctgcgacagccgcagattccctttgtcctacaatgtattcagttcctgttcgctcagcgatcttacgccttctttttccagcagcgcctctgctgcttcatcctccttcaccttcaggatcaggcaggcgttgtccgcctggcgcgtgatgaacgcataggcatattccaccgggatgcctgcctgcgccagcagatcgacgaccgcagccatgcttccgggacgatcctccatcaacacggccagcaccgaggattcgcggaagatgatctgattgtccttcagcacttgctctgccttttccggctcctcgacgatgatgcgcaggatgccgaaatcctgcgtttccgcgacggaaagcgcgcgcatgttgatctggtgctgcgcaagcagcgtggtgatctcggccaatgggccgaccttgttctccatgaataccgatatctgtcttacagccatatccggcacctcctaatacagtttgcggcggtcgatgacacgcacggccttgccttcgctgcgcgtgatcgactttggttccaccagatgcacattggcctggatgcccagcatcgatttcagcgcgcccttcagcgccttctcctgctgagagagcgtgcctaccgagtcggcaaacatctccggggtcatctccacgttcacatccagcgtatcgctgttgttcacccggtcgacgatgatctgataattcgaagtcagtccttgattgagcagcacggtctcgatctgtgacgggaacacattgacgccgcggatgatcatcatgtcatcgctcctgcccatcggcttgctcatcttcacgaaggtgcggccgcaggagcattgttcacgcgagagcacgcagatatccctggtgcggtaacgcagcagcgggaacgcctccttggtgatgctggtgaacaccagttcgccctttgacccttccggcagcacctcgcctgtggccggatcgatgatctcggcgatgaaatgatcttcgttgatgtgcatgccgctttgatcctcacactcgaaagcgacgcccgggccgctgatctccgtcagcccgtaaatgtcataagcgcggatgccgagcttcttctcgatgtcccggcgcatttcctccgtccatgcctctgcgccgaagatgccggccttcagcttgatctgatcccgcaggccgcgctcacagatcgtctcagccagataggccgcataagacggcgtgcagcacaggatcgttgaacccagatcgcacatgaactggatctgccggtccgtattgccgctggacatcggcagggtcagcgagcccagcttatgcgatcctccgttgagccccggaccgccggtgaacaatccgtatccataagagacatggacgacatcctctttcgttccgcccgcggcgacgatggcgcgggcacagcattcctcccacagatcgaggtcatgctgcgtataaaaggcgacgacacgcctgccggtcgtcccgctggtcgactggatgcgcacacactcagacagcggcttggcgagcaggccgtaaggataaccctgccgcagatcctccttggtcagaaacggcagcttgtgcagatcctcgaccccatggatatcctgagggctgaccccctgctcatccatcttcttgcgataatattccacatgatcatagacatgctgcacctgtttcacgagccgttcgctctgcagcgccttgatctgttctgccggcatcgtctcgttttccggctgaaaataatgattgtgattttgattctccatatttgctctgatcggcgcgtcatgcctgcgccgcatcctgctcctctctgcccaacgcgaatgcctttctgttcaattcgatgaatttcgacggaacgctttcctccagcgcctgatgccaggcgtccagcgagaagtcaaagtagcgggacacccgtcccatcagcacgatgttcacggccttggcagaaccagcctgctctgccagctgcagggcgtccacaccatccacatcggcgcccgccgcgcgcatcttggcgatgagatcctgcggatagtccatcgcaccggtgatgaccggcatcggatcgatcatctgtgtggagacgacgaccttgccgccttccttcagatagggcagccatctggctgcttccagctgctcgaacgagatgatcatgtctgcctctccctgctcgatgatcggagaatacacatgctctccataacgcacataagtgaccacgctgccgccgcgctggctcatgccatgcacctctgataccttgacgtcatagccctgtgccagcagcagcttgcccagcatcttgctggccagcagcgatccctgtccgccgacaccgacgatcatgatgttctttgtcatattagcacgccccctctgtatgttcaaatgcatctaccggacagagctgttcgcagacgccgcagcctacgcacagcgtgttgtccacgacggccttcttgtccttgatgctgatggccggacagcccagccccatgcaggaacggcagcccacgcacttgttcggatcgaccttcaccggcggcttcgtcttcacatacttgagcagcacgcacggcctgcggctgatgatgacagacgcctccggcgcagccagctcttccttcagcacacggtcacatgcggccagatcataaggatcgaccacgcgcacgcggttgatgcccatcgcccggcacagcgattccagatcgatctttccggccggatcgcccttgatgttgtatccggtggtcggattctgctggtgcccggtcatgccggtgatggagttatccaggatgatcaccgtggaattgctctggttatacgcgatattggccagcccggtcatgccggaatgcatgaaggtggagtcgccgatgatcgctacggccgcgcctgcgttttcctcattgagcgccttgttgtagccatgcagcgccgtgatgctggcgcccatgcacgccgtcacatcgatcgcgctcagcggcgccgccgcgcccagcgtataacagccgatgtctcccatgaccgtcaccttgttcttgtgcagcgtatagaacatgccgcggtgcgggcagcctgcgcacatgaccggaggacgcaccgggatggcatcgtcgatcttctttccttccggcaccgaaacgccgagcttctgcgcgatgagccgctgtgaatactcgccttccagcggtaggatatccttgccgctcacctccaggccgagctgtcggcaatgctcttcgatcacggtgtcgagctcctcgatcacgaccagccgatccacctttgacgcaaagtcaaggatcagctgctcaggcagcggatagatcatgcccagcttcaggatgctcgcctgatcgccgaacacttccttcgcatactgataagaagtcgaggacgtgatgatgcccagcttcgtatcgcccatctccacccggttgaccggcgcgctttccgcatatgcgatcagatcgcgggtacgctgttccacgatcggatgacggcggatcgcattgcccggcatcatgacatttttcgccacatccttttcatatggcttcagctgcggcagcacacgttctcccgtatccacgatgctctgcgaatgagagaccctcgtgcacatcttcaacagcaccggcgtatcgaaacgctcggagatctcataagccagcttggcaaattccagcgcttctgcggaatccgaaggctccagcatcggcaccttcgccgccttggcataatgacggctgtcctgctcattctgcgaagaatgcattcccggatcatccgccacgccgatgatcagaccggcattgacgcccgtgtacgcgatcgtgaacagcggatcggcagccacattgagccccacatgcttcattccgcagaagctgcgtctgcctgccaggcaggcgccgaaagcgacttcgagcgcgaccttttcattcggcgcccattcgcagtagatctcatcatattttgccgcttcttccgtgatctcggtgctcggcgtaccgggataactggaaacgaccgcgcagccggcttcataaagtccgcgtgccacagccgcatttcctaacatcagttgtttcatttctcttcagccctttcctccatacattcaaaaacctctcgcaaggcattctttccatagttaagtactctgttcaccctgctgatggtggcgctgctggcatgtgtctgctcacagatctctgtgtataccttgccctcatgcagcatcttggcgaccatgaaccgttgttccatcgcgttcaattccgtgatggagcacagatcgctgaagaaccgttcgcactgatccaggtccttcaatctcaaaatgcactcatacatctccttgttcttgttgctttcctgcgtttttgccatgccatacccctttccagcaaacctttactatgtctactattttaacacactaaagccgtgaattaaacagtgatttgtttaccgctttcatttctcgtgatatactggaatcagactggaggaatcgatatggcagtaaacagcgatccgatcatgacctggagcttcatccgcaaatgtgagccttccgacgccatcctggacgtcctcgtccccggcgaacgcgtgctgcagtgctatgcgaccgtacgcgacaaggccgcgctcaccgacaagcggatcatcttcaccgatgtccaggggatcaccggcaagaaaaaagaggtctattccatcccctatcgctccatcgacatgtggtcatcggagaataccgggcattttgatctggatgccgaactggacctgtggacaaaggcaggtcatttcacgctgaaggtcgccgccaagtgtgacatccgcgaatttgaccagatcctgggcagcgcgatcctgaatcagtgagtccctatgccgtaaaagagccctcttgcggggctcttttgcatctgcagaaaaaaagccggtcttcaccggtcctcatcgtacgttcatgaacgccacagacaacaggatgagcagcatgcccagcgccgtccgcttcgtgatccgctcatgccagatgcccatgcccagcaatgtgatcacgatcaccgtgagcacgctgtacatcggatagacgatgatcgcatccagcgtctgcagggaatacagcagaaaacacgaggaaaaataattagggatcccgagcaagacgccggccagcgcttcccttttcccgatccgcccattgcccgtcaacagcatgaataagctcagcagcatggcgcagacgaatgcgatcatcagaaactgcccgctatacaccgggctgccggccgtctcatacaccttgttcatcgcatcgcaggtgccgttcgccgccaacagcaggatcaggctccagccgatgcccttctcccctttgcgggaattgagaaagatgatcgagacgatggccagcgcgatgccgagcagctggatcatcgcaggccgctcatcaaacaggacgatggaaaacaggatcggcacgatcacgcccaaacgggtgtacagcgaggagacgatcacgccatggcgatggatattgtattgcaggaggatcaatcctgcgaccagcagcacgcccatgagcgcgccgcaggcaaagctgggcgcatcaaagccgatcgcagaacagcacaacagcgcgaacaaactgcagaccatataattgaccgcgagcatcccggtcttatcttgcacatatccctcgctccagcgcatcaccatagagacacaggcgctgcagccgatcgctgccaacagatcgatcacaatctctctcctcacttcttatcctcatgataacgaagagaagcgataaattcaaggcatttccgctgatccggataaataagcaaaacgcatttgcgccgcgcatcatcagcgcggggaaatggaggcaatgatgaaaagaaacctgaccatcttcatgtcctgcaccggcatcatcctgctgctggccggcgcacgctgggacctcgccatcagcgatgcgctctatgccccagaccatctgttcgccatcctcttgcaggatggctggccgctgatcatgaagctgatgctggccctgtgcttcgcgctgatcgctgacagacgtcctgccgcctatatcggatggggaggtgcaacgctcctctttgcccaggaagcatcacgcatctttccccggccttctgccagcgtgacagttctgctggcgatggcgtgtgcgctgttcctctgcctgttccttcgccgccggctttccccggcccagaaggcgcgcatccgtcctttcctcatcgcttaccttcaactcttgttcaccgtgctgatcatcaccggcgtgctgaagctcctgtggggaaggatccgttatcgccagatggaggatgcggcgcagttctgtgtctggtaccgtccctgtgcgcaggctggaacctctttccccagcggacacaccagcaccctggcctgcacgctgctcttcctgttctccatgctgctgtcccgcttttacccacagcgccatctgcacgccttctgcatatgcgcaggcatcttcctcatgatgttctcccggatcgtgatgggcgcgcattttctcagcgacaccgccgccggcatgctgatcgcactggcctgctggaagtgctgtgaccgccaatgggaacgccgcttcggcagcaagcgcacggcaaaaccttaacctcgttgcgatggctctcgttcaagatcagtacatctatcgtttttccataatatatgaaaaaaggtcttttttcaaagacctacatgaactaatggagcaaatgaggggaatcgaacccccgtatcagccttggcaaggctgtgttctaccattgaactacatttgcatctgacaggagatatattaccatatcttttcgcttttggcaagcacttttttcatcttttttaagatggcggtccagatgggactcgaacccacgatctcctccgtgacagggaggcatgttaaccactacaccactggaccatcgactgcactgaataaaaatggcggagtaggagagatttgaactctcgcgccggtttcccgacctacacccttagcaggggcgcctcttcagccacttgagtactactccatcgactgtttctgccaagtttgccttagcgctcatatataatagcatggtctttttcatttgacaataggtttttctacaatttttatcacaaatcactggacatccctctcccctttgccagcgcaagaaaaaagcagagcatcatgccctgcctatacatgaagactgacgcgaatcgcttctcctacccgttccagcgtctgttcatccagcctgcagatccactgcagcagcctgctcttgtcgatcgtccgcagctgttcgcacaggatcatcgacacatgagagagctgcgccgcgctgaagatgacatgcgtggggatcggcggcttgctcatctgcttggagaccggcgccacgatcaccgttttcgaataccggttgcctttgtcattctgtacgatgaccaccggccgcgtgccgccttgttcgcttccgaccaccggcgaaaggttcgcatagaagacatctcctcgtctcaccatcacttcatcacgaccacctgcatgctttgcagcacggcgctcatctcttcctcgctgaggtcgtcgctgtaaatggtatagcgcaccgaattgatgacgctggtcatgtgattgccgtcatagcgtcccaccatgttcagcccatcgaccaaagagccgctcatgatgatggtctgcgtcgtctcctcgctttccgcgacctcctccacgatggtgaagttcttctctccggtgtattccagcacatactggacctttccgtcattttccaccacagagctgttgctcagcactgcgccgaaggtctccatcggcatcagcggcagatcctcatcggtgatcggctcagctgccgtctccttctccagctgctgcggcacctggaaatcctctgccgtgagccctggttcataatcgaccttggagaagagcatcttcatctgcagcacatgatcatcatcaaagatctgcacgctcttgatcttcagatcatcagagaagaccatctcctgctgtgtgaaattgcggttattgggatagttgaccccggcgctgatctgatagccttcctctgtctgttcgatctgggcgctctcatccgccgcgatctcccgcatggactgtaacagataaggcttcagcgaattggatggccagtttccctggaacttgaagatctgattgagggtaggcgtgaccacgaacaccccttccgcattgcggatgatctcctgttcctgattcatcccgctgtccttcatcgcgaccctgaaataatcctgatcgtcttgcttcaggtattttacgctcacatcataggacttggtgtcttctccctcagcgacctccatcaccccttccagaagatagctgttcaagctgccaagcgtctgttgaagcctgtcttcaaagggcttttccctcaggaacagaaacagaaacgcgatgaccacaacagccgcggcggcaataatcatgattttctttttcatttccgtcttcctttcttcaccctaatgtatgtgaaaccatccggattcattcataacaagccccaactttcataagatgataacgggtgaatctgatgaagaagatcaagatggctgccctgatcctgctggtgctcgtcacgctcgaccatgcctgcttcatcctgtttgggtttccttctctttaccactatgcgacgctgcatcctgccgttgagaaatggtatgcgctggggtgtgcgctgtgtgctttcctgtcgctgttctggctgacggaagacgattaaaaaagctgccgcggcagcttttttcactatttgactgtaaatccgatctcatcgatcacggcgcgtgccttcatcacatcatcctgggtcccatccacgatgactgccttgcgcggcagatccaccgtatagcggatcccggtgtctgaaagggcgtgatcgatcttagcagcgcagtgctcgcactgcatgtcatcgaccaaaatgatcgtctgcattgctcatcacctcgtccttattataccacgcccgcgccgcattttccacgttcatgcgatcagcgtgcctgccgtatcagaaaatgtcccccgcagatggatgcggatatgatgcgcctgcgcatagcggacacagcgcgcatggagcacccggctgtgcagcttgagcatctcctcatagctgagacgctcatggcggcaggcagatggatcgaccctgggatccatgctgtagaccgcatctacatcggtgtagatgtccgcctctttcagcccgagcatatgcgcgaacagcacggcgctgaagtcgcttcctcccctgcccagcgtcgtcacctctccgcggacgctggcagcgatgaagccgcaggcgacgacgaccgcatgctcgtccagcgcggcccgcacgccctgcgcacgcaaggcgcggacatgcgcataatcataatcatcgtccgtcacgatcccgctttgatgaagcggcagcgcataggcgtcgatccctgcctctcgcagctcaccgctcacccgcagcgaagagagcggctcgccgatcgacagcagccgggcccgctcctgcgcagaaagcagaggggacccgatctgcagcagcgtatcggtcgcgtaaggatccggactgcgccccatcgccgaaacgaccacgagcaccctgcccgtttccagctcgcgccgcacatggcggtaagccgcctgccgtgcctgtctgtcgctgagcgaagttcctccaaacttcatcactttcacattcatacagccaccccgcattccttacaggatatgcgaaacaggtacgcggggctaggctttttggggataacggcgcagcgcccgctgagaaagccgcgcatagaccgggatcatatgcgcttcgctgaccagctcgctcaccgcctcgcgatcgacccacatagcgcccttgacctcgcgctcacagtgatgcagcgcttcatgctcatccgcaaagcagagataggtgaaattgagatgaaggtgggcgctgagctgacggccgtccttcatatgcctgggcaccggaagcacatcgacacccagcagccgctcatcgatcttcagccggcgcaggccgctttcttcctttccctcacgcagagcggtgaagcaggggtcctcttccccatcgcagtgcccgccgcaccatccccacgaatcatagatccggtgatagaccagcagcaccttcttcatgtcccggctcatgatccagggagaagcgcataaatgcacgatgggattgctgcggctggcgatgtcatcaaaagcacggaccgcgcgcagggcgctcacgacatcagcggcctcctgcgcatcccatggcgtaaacgcctgcagcagcttcacgatcttctcatttttcatagatatgccccatttctttcatacagcgaagggctgcctgataaaagggccgaaaggcagtcggcagcgcatagcggcgatcgatctcctgcgggctgtgatacgacgcatcagccgtctttgtctcgatcaggaacgcatccatatgccattccacatgggtgaacacatggacatgatggccaagcgcgacgacccgttcatccggatgggcctgcttcaccgcctcttcgctcagccgctcctccgtcatctcaaagccatacagaccgctcagcagtcccttgctcggccggcggatcagccgcagacgctgctggcacgcatagatcagcaccgtatgctcttcgatgcgccgcggtttcttggctgtacgcaccggaagctgcgtctgcatgccgcatgcaaacgccgcacactctgtctgcaccgggcactgcgcacagcgcggctcccctttcggcagacagaccatcgctcccagatccatcagcgcctggttgaacgcactgatctgcgcggcatccggaagatatgccgtcatgctctgctcgatcttcttttttgccgatacggcgctgatgtcctcttcactgcagaggatccgtgaaaagacacgcagcacattgccatccaccgcgcatacccgctcattgcaggcgatggaggcgatcgcaccggccgtatacggaccgatgcctggcagctccagcagcgcatccctggtatggggaagctctccgccatggcgctccacacagacttgcgcgcatttcttcatgttccgcacacggctgtaatagcccaggccttcccacatcttatgtaacagatcatcatcggcctcagccagatcgcgaagcgagggaaaggtggtgatgaaccgctcaaaataagggatcaccgcttccaccctcgtctgctgcagcatgatctcgctcacccatgtccgatacggggtgatgtgctcccgccatggcagacgccgcccttcctgcgcataccatcgcagcagatggctgcggaatcgttcctgcttttcttcttcacgcatcatatcttcctctcttccgtttcccattatagggaattcacgacggaaaggcaaatgaagcgaaggcggggatggccccgcctatttcttcgtcccgcgcagatcagcctgctgcagcacattcgtgtcatagctgctcagccgccttctcctctcccggtatgcctctaatccatcccggatgatcagatcgagcagctgcgggaattccaccccttcccatgcccacagataacaagacaaggaaccggggatggtgttgatctcattcacatacagctgttcctgctgcggatcatagaggaaatcgacacgggccacgccgcgcacgcccagcatcttgccaaagcgcatggtcagctgctggacctgatgcacgagcggctcctccttcagccagacccgcttcgtgctgatgatgcccttgccatcgccgcccatatatttatcctcataatcgaggatatccttgccgcgggtgacttcctctacggcgctgacccgatatccgtaaggcgtatgcaggatggcacagttgaactcgcgcatgtttggcacgcaggtctccgcgatcgcttcatccccataggcgaagatgtgcgggagcgcctgcaggcaagcgtccagatcttcgcatttctcgatgccgatgctggagcccagcagggaaggcttgaggatcactggcatgcgcagcgctgacagcgtcctgcgccatcccccgcttccctcctgctttttcaccacggcatacgggcagatcggcagccccgcctgctgcagcaatcgtttctgcatcgccttgtcctggccgatcgcgccgcacagcacatcgctttcacagaagggcagatgcagcatgcggcagaagccggcagcactgccatcctcgccgttgacgccatgcaggatcggaaagacgatgtcgaagggaatggcccgggaaaagcgccgggcctcatcccggaccagcaccggctgtccccttcgccgctcgatgtgcacgcgtgtcactcgctgcagcaaagcgtccagatcacggtaatgcgccagcttccgcagatgctctccgccatacatgtccccctgcttgctgacatagcaggggatcgcctcatagcgctctgtatccagcccatccatcgcctgcagggcgctgatgatgctgatctcatgctctacactgtctccgccatagagaaacaagactctgatcttcatttcatccctcactgtctcattctatgcgcgaaggcgtcatcggttcagcacatccggcacatcgttctcgatgagcacgaccttatccgcatgcgggctttgttcaaagcaggcaaaggcctcctgcatcgtcatgacctgcccgatgcgatcttcatcaaagccgccctcgagcaatccctggcgcagcggctgcacctgctttccgccgaccaggatcacttcatccgcgcagccggccgcatgcgtgcccagacagtggttgaactgttcctgctgttcgcccagatcgatcatcccgggcgtgaccaggatgcgccagccaggcatctgcgccagcacatcgcaggctgccgcggcgccttcaggattggcgttgaaggcatcgtcgatgagcaccatatcctgatgcagcttcatctccagtcgatgctccacatagcccagctcgctgaccgcatgctggatcgcggacatccctatgcccagctttctggccagcgccactgccgccgcgatgttgtaaatgttgcattcgcccagcagcttcgtgtcaaatgccgtctcttccccatcgatgcacagcgtgaaatgcgccccatgcagatcatagcggacatctttgatgcgcacatcggcctcttgtgatcggccgaaggtgatgatctgacaggggttttcccgcttccattcccggatatacggattgtcgatattcaagatggcacagccatcctcgcgcagatcttccaccatgcgcatcttctcccgcacgatgttgtccatggagccaaatgtctgcagatgctgcggaccgatggccgtcagcaccgtgatgtccggctggacaaaacgcatcagctcatgcagctcgccacgatgatccgctcccatctcacacaggaacacctcatgcaggggatcgagccgggagcggatcgtgcggctgatgcccatgcggttattatacgaatgcggcgtcttgagcgtatagcgctctttgctcagcagcgcatacgcgatctgcttgacgctcgtcttgccataactgccgccgatgcccacgacacagagcccgcggcagcccgcaagcctgagcttggcatccttcatatataccgattggatcagatgctccagcgggaagacgatgcaggccgcggccggcagcaggatccacg

SEQ ID NO: 2565 - DNA, 9264 bp, Unknown
  16S sequences of unknown bacteria
ccgtccgcacagggcgcacaaggtcagactgccgggcaaagcctgtcagccagaaccaagttcgccagcgcgaacagcatattcagttgaccctgtcatgtggagtgttgcgtgctactatgtcgtgaagataggaaataactcagatacaaagaaaaccgccatttcggcggttttctgcgtttagtattctcttgttttgaatttgcgaccatcgctgtattctctgccctcaatcgcaaattccattccgttaatcagaatgaaagagaatgacacaggggtgcggacaataaccttatcgacaatagccttgaagatactatcgtcaaactcggtgagcggattgctattcgtgttgataatctcacggataatggaaacctgacgaagcttttcattatcgtcgatttccttttcgatgtagctgttcttgatttcaatgtatttattcttaatctcacatagagcggaatattcacgcttaaaatcttcttgagatatttccccatcaattttcatctgaacgagcttgctgattctatcttcaagctttctgatttcgttttgggtttgctggaatttgttcttatccttgctctttttgacaactctttcaatcgtcttaataaaagtatcaaaaaaggctgccttatcgtcaaggacagaattataccaagccacaaacgctctcttgatggtcaaatctccaatagctttggtagaacaggaaacaacaccaaaattatgcttgattgtctgcttgacccgcgttacctttgcgccgttttggaaaattgatttccgtgcatgatcgcggacgctggtttttccgattcctatttttctttctttcccttgttgaccatcccgtagacctcgctcttggacattcctctgtccttcgcgcaggctttcatcgcgtccatcctcgactttccctcgtcgatgtaatgctgtatatgctcttccaccgtcatatcgcgccagaaggcgtcttccgcggcttccagctcgctttgaccgtcgactatgagtacatactcccctctcggctcgcgttcgctgtagagtctcacggcgccgctcagagtgatgcgggttatctcctcgttcagcttcgtgagctcgcggcacagcgatatcttccgatcgccgaaagcggcgagcaggtcgtcgagcgttccgcgcagcttgtgcggagcctcgtagaatataagcgtccggtcgtcgcccttcagcttcgcgagccgctccgtccgctccccgcggttcgtcgagagaaatccctcgaacgcgaacctcgccgtaaacaatccggacaacgtcagcgccgtcacagccgcgcagggtccgggaaccgccgtcaccggaatgttccgctccgcgcacagcctgacaatatcctctccgggatcgcttatccccggcattccggcgtcagtgacaagagcgcaggactcgcctcctcgcagtctctcgcagatgacttcgccgcgctcgcgcttgttatgctcgaaatagctgaccatcggcttatgtatcccgaggagcgtcaggagcttcgcgctgtttcgtgtatcctcggcggcgacgaaatccacgccggcgagcgtcttcttcgcccggtcggacaggtcggcgaggttcccgatcggcgtcgtcacgaggtacagagttccgccaacgatgcgattcttgcggtcgtcctccgtatattccgtattacgcgatatctcctccgcgccctcgtttttttcaggaaacactgaataattcgggttttcgcagaaaaaagacttggatttatggttttttttctgcgaaaacaacctcaaatcagtgtttcctgtataatcatggttttctgaaaggctcatcgaactcacccgtttcatatattcttgtgagcgtgtcggtataaacgctcatctcgcggtacattataagcggcggcgtgacatggcacccgggcgccgcgcccttcttcgcctcacagagcacaaggcacggcggaagactgaccctcgaatgcaccatagtcatcctcttcggctcaagcccggcgcagcgcatcgaagagataagatcgaccagcctgtccggtctccacacggcgtaaaacagtcccccgtgccggagcagccgtccggcggcaaggcagaaatccccgatcccgccgtgaacctcatgccgggcgatctgctttctcccgctgacgcagattttcccggaggtcttcatgtacggaggattcgagactactatatcgacttcaccgccaagcgtccccgcgctgacctcgcgcacgtccatttgaacgctcctcagtctgtccgcaaagccgttgatcgccgcgttgcgcgatataagctcagcgaactccggctgcacctcaagcgccgcgcagtccgcgatcttgtttctcgacagaagaaggagaggtatcacgccggttccgctcccgaggtccgccgctctcgacttccggctcgtccggacatacgcggcgagaaggtacgcatcgctcccgaaggtcagaccgtcctttttctcgatcagcctcagattattgtttatctcgttcaggctctcgtcatcggcgagcaggatattttccatccacaccatccttttcaaaaagcgggcggctcagatgaaccgtccgctgatattatgcttccgcgccacgggaattgtcagttcgccttctcgaagctcgcgggggacgggatcatgaccttctttatgtccgctccgaccgctcttagctttccgacgatatcgtcatagccgcgctctatatagtgtatgtcgtcaatctcggtgcgcccgttcgccgcgagacccgcgattatcatcgcgacgccggctctcaggtcgaccgctttgaccggagccgccgaaagctggcttccgccctcgaatatcgccgtcgcgccgtcgacgctaatgttcgcgcccatgcgcttcagctcctcgacatacctgaacctgttgtcccagactccctcggtcagcaccgagacgcccttcgctagacacagcagaacgcctatctgtgggttcatatcggtcgggaagcccggatacggctgggtcttgatatttatccggttgaggtcgcctatgtgtcttacctcgacagaatcgtcgttctcgatgacctcgacgcccatctcctcgagcttcgcggaaatagactcaaggtgcttcggtatgacgttcgttatgagcagatgtccctgcgtcgccgccgccgcgcacatatacgtgcccgcctcgatcatatccggaattatcgcgtaagtgctgccgtacagcctgtcgacgccgcgtatctttatgacgtcggttcccgcgccggaaatcttcgcgccgcaggaattgaggaaattcgcgaggtcgactatatgcggctcgcgcgccgcgttctcgatgacggtgttccccttcgcgagcaccgacgcgattatcacgtttatagtaccgccaacggtcaccgtgtcgaaatatatcgacgcaccgtgaaggttctccgccttcgcgtcgacatacccgctctcaaccgagaccttcgcgccgagagccttgaagcccttgatatgctggtcaatcggtctgacaccgaagtcgcatccgccgggaagaccgacatacgcccgtccccagcgcccgagctccgcgccgatcaggtaatacgacccgcgcatcttcctgacaagctcatacggagacactccgcccttcgccggtctcgagtctatctcgaccgtgttcctcgacagcatacgtatcctgcatcccatcgcggacagaatctcgagcgagagagccacgtcgcttatcgacgggacgttctctattatacatttatcgtttatcagcagcgtcgccagtattatcggcacagccgcgttctttgcgccgctgacctcgaccgttccgcagagcggcctgccgccgtttatgattatcttttccataactaccttaacctgttttatatccgccgtccggcgcggaaaagcaccgcgggacaacgtttgataagtatcgtttgttaagcgttgcgtttacagagcgttcaaatacccacagtaatataactatattataacacctttcagcgcaaaatggaagtacctttaatgatttttttacattcaggataaatatttaccttgtgcttaaatattcactattattgatggcgttatatacaattcgcgtaccatccgaatgatctatttgccatgatagtataaaatacagcgcggtccggtccgcgttccagttcggcgtatagcacgccgtgacagaagtaacgcccgggaacccggcgtccggtctctcctcctccgcggcgcgcgtcgtgagcgccgacagatcggtgaagaggatattcacctgatcgtatatctcctcactgtatgtctcgcccgccgtcccgaagtaccagtacccgcgcgcggacagaaggtcttcgccctcaaaaacgcacacagcgctgttgccgtagaccggaagcccgtcgagcatctgcgtcgcgaaaatatacgtcaacccggcgccctcgtctaaggcgccgccatcgatacgcacgccgaagcggtagtcctcaccctgtccgcggcagagaaaatccgacacgcgcttctcgtatccggacagcttcgatttcgtgagcgagccgaagttttccgtgacaagctcaagatcatccgccgtaatgtcagtatatgccgccccgcggacattgctatttttataatatacgaacctgagatcgtcgtaaaactcggaggaatcgtccccggcggtgattatcatcattccgccgtccggcagcatcatcgcggacgttctcggtgagcccgacagcgcctccgccgcgacggaaaagtaatcagtcggatagaaactctcacagacagaggcgctaatacgtcttagaggtatcgcctcggcgtcaacctcaagcccgcgggacgcgagtatcccgaccgcgtccgcgacctccttctcgtcgaggtagctcttattgcggttctgcaccgatatgttgtaaatcaggaaaatgttcgccgcgacgagcatggcgataagcaggttcttgactgtggaccagttcaactccgtccctcccttcggatttcacaaagacatttccggaaactcataagctctcagcgcacggcgaaaaacatactcttggcggaaagtctgcgcgccgctatgaagccgacactccagaccgcggttccgtcgcggtaaacgaggcgtatctcacccccggtctctccatccgtctttccgctctccgagagctttctgacggcgaactcctgagacgggagaagggtcgggctgtcggtccccttataggataccgtccggagcgaaaagctatacagtctgtcctgctcgatctcggcgcggagagcggcttcctcgcctacccgtacatcctcgtacgcgtagaaatactcgatcacgagtctgccgccgtcagtatagacatctccgagacacagcttcgcctcgccgcccgcgagctccggcgacagcgcctcgatacggccgattatgttgtcgaccgccgtcagcttatcgtagacgctcagcgtatcgttgaccgaataaccgagcagggtgtcgagcctcagtccggacgccgcgtcattcgcctgatatcttatgacgccgttcccgacgcgcagacggctcctcgaatcgacatagttgacggcgctctcgtccggatagctgctcaccttgtccgggttgtagccgaagaggaccagcagactgcttctctgcgcgtcaggcaccaaagtatcctcggcggatatcacgtccggctcaagatcggcgccaatgagcggctgcctctcggcgagcgcgggatcatccgaaaacgtcatcggcgcgagtccggacacccacggtccgtccgcgagcctcgagaaatagaacgcggacgcgataacgctcttatcctgcgaaaacctgaaatacccgccgtcgccgtcgtaaacgtaagcgatgaagcggtgcgcggcgacgtcctgatccggttttatgacaagctcgcttacatacactgctcccgcgtcctcggacgcctgcgcgacgtcctgatcagtgacgacgagctttccggaggcgtatgcgtatatcatcctgtacagcacaggctgatggtagcggatgaaaatatactcgccgtccgctatcgcctcgttcatctgcctctccccctcgtcatcggaaagcttcacacagtaagaagtattcccgaacagctctgtgatacagctcccgatgacgccgtaaagctcctcgatagattcgcggtccgcaatacacccgaccgggtccgcgccggcgagcctgtagcctatcgtctccggaagaagccgcccggaatcaagcccgtccgcgccgatgtcgctccggacgctccacagcttctctatattgatgttcttctcccggttcccggcggtcatgttctgatagatatgcgtccctccgatatagacgatgacgagcatgacgagactcacgacgagaagcaccagtatgacggtgcgtatatgctccgccgcggcggaaagcttcccggcgcgcttttttgccgtctccggctccttcttcatcttcatccgactgaccctccttccggttaaaaatcgtgtcattccactgttctgagctttgtctcaagcggcagggttatcctgaccgccgttccctttccctgtacgctcgcgacgtttatgcttccgccgtgcgcgtcgactatctccttggctatcgcgagaccgagacccgttccgccggtctcggaagtgcgcgacttctcgacgcggtagaaacgctcgaacaggtgcggcacatcctcctccggaatgccgatgccgttgtcacggacgatgacgctgataccgtcaatcgcttttccacgccttgtcggagaggcgatcatctcaatctttccgccgtcaggagtatactttatcgcgttcgagagcacgtttattatgacctgctcaatgcgctccttgtcgccggtgacagccgggagctcctcggtgcgcgtataggtcagcgtatgcgaatgcgccgccgcgtcgaccttcatgacctcggagatatgcctgaggaccgaatccgggtcgaacggctttatattccacttggtacgcttattgtcgagccgcgacaggacaagaagatcagatacaatgcgcgtcatgcggtcgcattcatccacagccatgtggagaaagaaatcctccatgtcccgcgggatctccttgtcgttcagtattgtctcgcacgcgccgcgtatgctctggagcggcgtgcgcatctcgtgcgacacgttcgcgacgaactcacggcgggatttatcgagctcataccgcccggtctcgtcgtgtatgaccgcgagcacgccgtcatgcgtcgaattgtccgccgtatagcgcagccgtccgaagttgacgtcgagcacccgaccgtcgaacatcacgtcgctgacgctgtacccgtccttcggtatatccttagcgtcgccggtcttcgccgggaaatcgacgccgaacagcagaagaagcctgctgaggtcaaacccgtcgtcatacttattcccgagcaggtccataaaactctggtttatgtgcatgaccttcccgtcctcagtaaaagcgacgacaccgtcgtgcaggtaagtgaacagcgtctcgagcttctggtgctcgcccgagacctcctcgagcgtgctcttcagcgtattcttcatgtaattgaaggtatcggtaagcgttccgatctcgtcatgcgaatgaacgtcgatctcatgcgagaactctcccgccgcgatatacttcgctcctcgcgtcaggctctgtatcggtgacgttatagccttggacaggaaaaacgccagcacaatcgcgaatataagcccgagcatcagcgcctgaagaattatcgaaaacagccgccacgtgaactgctgcatctcctccatagtatccttgacgtagataagacagctcctcgttccgttatcaagcggcagcgcgaaatccgcgaaatccgaaccgagcggctgcttattctccggttccccgcgcatagccgccagcatattcgcggtcttcctgagcgtcttcccgctctgcgaatccgaaccctcaaggaaattgccattccggtcaagtatatagaaatcccggtaatcatctatcccgagcacaccgcggtaagaatcaagtatactgtactgctccgccgcgaaatcctccgaccccagagcgtcagtcagctccgacgtcagctgtccccccggcgaaaagctcctgtccatctggtctgaaaactcgtccatatagaaaccgttcacgctgtttataagcaccgtgccgataacgcacataaccgttatcatgaatatcacaagtatcaggattatcttgaaataaagactgttatacataactcacttgatataatagcccattccgcgcttagtgaacagatactccggcttcccggcgtccttctcaagtttcgaacgcagcctgctcaccgtgacgtccacgctcgatgtatccccgtagaacccgtcatatccccagacctcaccgagcagctgctcacgggaatatatagtcccctcattcttggccatgaacgtcaacagctcatactccttcttcgtcagctcaatcgtctgtccgtccctcacaacctgacacttagtagtatcaatctcaagcccccgtatgtgtatcaccgcgctcgcgtccggcaccggcgcctttatcatatcattcgatgaccgcctgatattagcctttatccgcgccagaagctcattcatcggaaacggcttcgtcacataatcatccgccccgatatcaagcccagcaaccttatcgacctcctcaaccctcgccgtagcaattattatcggtgtagacaacttctcccgtatccgtcggcaaacctcgaacccatccatcttcggcagcataagatcaagcaatataagatcaaacgtccccgtgagcgccttcttaagcccctcctcgccgtcatatgccacctcatacgcgtatcccgcctgcatcagattatatgcaagcaacatcgctatattcttctcgtcctcgacaacaagtatccgcttcttctgttccggcattctgttcactccttgtactaaatcgttagcttgcgggggag

SEQ ID NO: 2566 - DNA, 15133 bp, Unknown
  16S sequences of unknown bacteria
gcccccgtgccgcctgcgggcacgattttaaaggaggattttttagccttcaaatcttttgtcatttttataaaagttttaagagcattggtattcgtttcggtttttatatttaaaagttccatgattaaagaaactccgtaataaaaccctgatttgaattgcgtaagaatcaactctgtttttaagctgttttccgcaaattgatagtcgataaataacgaacattgttcttttgttaaagtgttattcaaattttctgccgcgagttcaagtgcattaagtacttcttcttctaccgaaaaaacttcatcgggaacagtacaaagattatttaaaaagtcgtctaatataaaatgtttcatcaatatatcctttaaattatataatgtataagtctatgtgttcaacaatttctgcatatataatgtttccattatatattgcagaggtgagtaatgaagtttcgtatcaaagaaattttagagaaaaaaggaaagacaaaatactggttatatatgcaattgggattaagttatcaaaatttcaataagatagttaataatcaaacttcgggaataaaatttgtcactttgaaagcgttatgtgatattttggactgtacgccaaatgatttgtttgaggaatattatcaacagaaaaaagattaattagataagccactatttttttatgttctctccttcatcggaaagaggactttttcccctactcgtttcattggaaaaattatttattttatgccactggtctttttgagtggtagttttcatatcgcatacttctacaccgagtagcaatccatagcgaaagccttgcttgaaacaagcattttctttctcttcctccacacccgattcggcaaataaatactggtcaaaaagttctttttgctcttcattaaaactgtttgttaatttttccgtcgattcctccaactctttttgggctatttcggaaacaggaatacgttgctccatcgtggcttgcagagagccgtcaagcagctcttgtaaaacagaaatcctcataggtaaaatcctctttaggtatctaatgtatagattatataattttcaggtctatttgtcaagcgttttggtgatatataatgtactcattaaataatttataggtgagatatgcgttttcgtattgataaaatattgagcgaaaaaaggaaaacgagatactggctttttatgcaacttgggtgcagttatcaaaatttaagcaaaatagcggaaaataaaacttcaagcataaaattttccacattacaggcattatgcgacattttagaatgtacccccaatgatttatttgaagaatattgcggcaaataatcggcttggcggcaaaaacggggggaaaaagcgaaaatttttccaaaaaaatcgtttatttcgcttaaaatagcttgccaagggcggtccgatatgctaaaataatatagctaaaaattcacacccgatgccgtgcgcattccgtgtccgtaaaatacaaaatttttattgcggataagatgcggtcaaacgcgagtcggggaggtaaaacggaggaatgaattatggcagtgatcactatgaaacagcttttggaagcgggcgtccatttcggacatcagacgagaaagtggaatccgaagatgaagaagtacatctttgcggcgagaaacgacatccacatcatcgatttgcagctgacggcgtccctcatcgaagaagcgtacaaattcgtatgcgaaagcgcgaaagcgggcaaaaccgtccttttcgtcggcaccaagaagcaggcgcaggacgccattaaggaagaagcggaaagatgcgggcagtattatgtcaattcccgttggctgggcggttgcctcaccaacttcaagaccatgcgttcccgcgtggaaaggcttgaaaaactcgaaaaaatggaagcggacggcgaatttgagctgcttcccaaaaaggaagtcatgctccttaaaaaggaaatgaccaaattgcagaccaatctcggcggcatcaagaagatgagagcgcttcccggcgtcatgttcgtggtggatcctcacaacgaagagatcgccgtaaaagaagcgaagaaaatgggaatccccgtcgtggcgatcacggacaccaactgcgatcccgacgagatcgactacgtgatccccggcaacgacgacgcgatccgcgcgatcaagctcatttcttccgtcatggcgaacgcggtgatcgaggcgaatcagggcgcggaagtgcttgtggcggctcccgaagcggcggcggaaacggcgccttcttccatcgaggaagtcgtggcggcggcggacgaagagcctgcggaagcgaacgcgtaatccgaatttatcccgcgcgggcgttatgcccgccgagtcgggcatttcaaatcattctaattaaagaggagaacagagaaaatggcatttacggcaaaagacgtaatggcgctccgcgagaaaaccggcgcgggcgttatggactgcaaaaaagcgcttaccgacacagacggggatatgaccaaagccgccgaccttttgagagaacgcggcatcgcaaaagcggagaagaaagcttcccgaatcgcggcggaaggcatcgtcgcttcctatatcgaaggcaagacgggcgtgctgatcgaagtcaactgcgagtccgatttcgtggcgaagaatccccgtttcaccgaaatagcgaaagagatcgcacaggtcgtcgccaaagagaatcccgcggacgtagcggctttgctcgcttgcggcatcgaaggcgccgtgaacgtggaggaatatctcaaagcgcagacggcggtcatcggtgagaagatcgcggtgagaagattcaccgtttataagacggaaggtttccttgcaagctatatccacctcggcggcaagctgggcgtgctcctggatatgaagggcgcggatacggacgcggcgaaggaaacggcgcacgagatcaccttgcagatcgccttcaccaagcccgcgtatctcacggaagcggaagtttccgcggaaaccctggaaaaggaaaaggaagtgttgaagcagcaggcgatcaacgaagggaagcccgaagcgattgccgagaagatggtgatgggcagaatcaagaagttctatgaagaaaactgccttttgaaacaggcgttcatcaaggacgacaaacagactgtcgcggatctgcttgcggcggcgtcgaaagccgcgggaagcgaagttgcgatcaatcgtttcgcgttctatgtaatgggcgaaggtcttgaaaagaagagcgaggacttgcaggaagaagtggcaaagcaagtcgccgcgatgaagaaataatcgacaatctcccgagccgtccgaatttttcggacggctttttttgtcgtaaaatcgaaacgacgcttttgtgaaaaagccgcctcggacgttttttgccgaaaattttttgccccgcctctttgtcggtctttaaaaacgctttcaaagagcggcgcggcggtacaaaataaaaatcgggtgaagaagggaaggcgaaggcgggaaaagaaaataaaaactacaaaaatctccaaaaataaggcgactttttttgctttttatatagctttctttcgtgaaatatgctataatagaaaaaatcgaaaaagtaccgtccggaaaggggcttggagagaataggtcgggagcggcacaacggaagacgcgctttatgctctttcggtcgattggcgcggtcctttttgcggtactcaagcggaggaaagtagaaatatgcagcccaagtacaagagagtccttttgaaactttcgggagaggcgctggcgggagaaaagggcttcggcctcaatcaggacgtcatcgcaaccgtcgtcgatcagattgtggaagtccacaacatgggcgtggaagtaggcttggtcatcggcggaggcaatttctggcgtggtcgtcagggcacgaaaatggaacgcaccaccgccgatcatatggggatgctggcgacggtgatgaactccctcgccatgatggacgccatcgaacagcgcggcgtgcccgtgcgcgtacagacggctctcaatatggtgtcccttgccgagccgttcattcttcgcaaggcgatccgtcatttcgaggaaggaagaatcgtcattttcgcctgcggaacgggcaatccctattgctccacggatacggcggcggcgctgcgcgcgtgcgaaatttccgcggatatgcttctgatggcgaagaacgtggacggcatttacgattccgatcccaaaaccaatcctttcgccaagaagtacgacagactcacgtatgcggacattttaaaccgcaatctcaaagtcatcgatttcacggctgccaccatgtgcatggaaaacaacgtccccaccctcgctttcggactggacgaggataaatccatcgtccgcgcggtgtgcggggaggagctgggaacggtcatcaccgtttaaaagtccaagggatccgaggcgaaaggaagggcgcgcattttcggaacgcgcccgaagcaggataaaaataaaccggacaaggagaaaaatcatgattgaaaacgaaaaagtggaagaattgatgctggaacttgaagacaagctggataagacgatttccgtgctcgaagccgaatatacgacgatccgcgcgggcagggcgaatccgcacgtgctcgacagggtggaagtggaggcgtacggtggcatgagcaagctcatcgagctgggcaacatcagcgcactggacgcgagatgcctgcaaatcagcgtttgggataagtcccttttgaaagcggtggagaaagccattctgcaatcgaatttaggacttacgcccaccaatgacggcaacgttatccgcatcgttttccccatcatgacggaggagcgcagaaaagaactcgtcaagcagatcaagaagatgggcgaggaggcgaaaatcgccctgcgcaataaccgccgcgacgcgatggacaccttgaagaaaatgaagacggcgaaggaattgtccgaggacgattttgcggcgtgcgaagcggacgtggaaaagacggtttcgggcgctatgtccaaattagagggcgtaatttcggcaaaagaaaaggatttgatgtctatttgagccatgaagaagaataaaatagagggtgcggagcagtcgggattgctgccgaagcatatcgccgtcatcatggacggaaacggccgctgggcgaaaaagcggctgatgccgcgctctttcgggcatcaacagggcatgaaccgcatgatcgggcttttagaacacgccttcgacgtcggcatcgattacgtcacggtatatgcgctgtccacggaaaatttaaagcgtcccaaagaggagctcgacgggctcttcaatctcctccgcaagcatttcgtggactgtatgcggcggatttgcgcgcgcggcgtgcgtctgaaaattctcggggacgtttctctgctgccgcaggacgtgcagggccttctcaaaaaagcggaggaagattccgttatgtatttgggcagaggggtaaacgtggcgctcggttacggctcgcgcgcggagatcgtgcgcgcggcgaagctcgcggcggagcgcgggaaaacgctgacggaggaaaatttttccgactttctctacaccgcgggacagcccgatcccgatctcgtcatccgcacgggcaaagagcagcggctctccaattttctcctctttcagtccgcgtatgcggaactgtatttttccgacaaaatgttccccgaattttcggataaggacctcgacgaagcgatcgccgaatacggcaggcgcacgaggcgtttcggaaagacggacgaacagtgcgcgaaaggcggggagtgaaaggcgttttcgggcgggagcccgcttgcggcccgcacgcgcgggtaaaaggataaaggacagtttatgaagatccgtttgattacgggtacctgctacatagcggtgctgctcgtgttttttcttttgaaaatatttgtcagcgatctctttttcgacgcgctcatttacgcgttcgcgctcatcggcacgttcgagatgacccgcgctatgaaagagaaaatcaccaaagcggaaaaaatcgccgtattcgcgtttgcggcgctgtgtattcccgcctgtgcgctcttcgaagagtttttgggcgcagggctggaaggggcggcggtctgtttcttcgcgctggcggtggcgctcttgtccctgctcgtggctcgccacgacgaaacttcccccgaaaacctcggcgtcgctttcctgtgcgccgtatatcccaatctgcttttggctcttttgacgctcgccaatcatctcgggggcggggaaacgctttcccggtttgcgctcaattccgatctggcgattttgtttattttcgtcatttcccccttcgcggactccctggcttatgtattcggacgcttcttaaagggcagatttcccaaaaagatggcgcccgtgctcagtcccaataagacggtggtgggcggcatcggcggtctggtgggcggactcgtcggcgcggcgattctctatttttcctataacgccgtcgcgggcagcttcgaaaatatgggagtgtggcttcccgtctatctcctcgtcggacttctcgccgccgccgcgaccgagttcggggatctggtggaaagctgtatcaagagaaaggcggacatcaaggacatgggaaaactcatgcccggccacggcggtattctcgatcgcatagacgggacgcagttcgccgcggtggtggtgtacgtcgcgttcgcggcgatacacctgatagcgtaacgtaccaaagagtgcccgtcttgtaaaaagaagggcgcttttctgattcgccgcgtttccttgccgaaaatcggcggggaggcgcggcagaggtggagtatgaaaaagataagcttgatcggcgcgacgggatccatcgggcggcaggtctgcgccgtcgcaaggcggtatcccgataaattccgcatcgtttccatggcggcggatcgttccgcggaagattttttaaaactggtaaaggaatttcgccccgaatacgcggcgctcgcggacgagaaagccgcggataagatcgcggacgggatccccgaaggggtgcgatttgcgggcggcgcagccgcggcgcgggaggcggtcgcttacggggatacggcgatgatcgcggcgacggggtttgcggggctgggctatacgttgaaagccgcggctctgaaaaaggatatagcgcttgccaataaggaaactttggtctgcggcggcgagctggcgatgaagaaaataaagggggcagggattcgattaatgcccgtggacagcgaacattccgcgctttggcaggcgctcggcttccgcctcgacgcgccctttcgacggctgatcgtcactgccagcggcggtcccttttattcgtatacggcggagcagctgcaacgggtgacgcccgaggacgcgctccgacatcccacgtggacgatgggcgcgaagatcacgatagacagcgccacccttctcaataagggcttcgaagtcatcgaggcgaagtggctgtacggcgcgcccctcgaaaagatccacaccgtcgttcagcccgagagcatcatccattcgatggtggaatttgaggacggcgccgtgctcgctcagatgagctacccgtctatggaactgcccattcagctggcgctcacctatcccgaaagaatggactgcgctttgaagccgctcgattttgaaaagctcggcagcatacgttttctgcccttggagcggaagcggtttccctgttacgatctggctctgtcggcggcggaaacgggggacaatttcccgtgtgcgctcaacggggcgggcgaaatcgccgtacgcgcttttttggaaaaacggatacctttccccgcgattgcggaaactatagagaacgttttgtcgaaaacggagcgcgcggcggcggattcttacgaagcgcttttcgaaacggacgcgcgggcaaggcgcttggcgcgggagtcgattgcaaagcgggcgtaaaaagaacgcttttcggacgggaagtaaaacgggaaaacgaaaggaataaaaataaagacgcaaataaatcaaagaggacaaaagcattgaatctgacacatcttttaagtttttcttcggtgatgaagagcataggcggcgtcgtgctcgccgtggtaattctgctggtcatggtgacgatccacgaattcgggcactatatcgcgggaaaaatcctcaatttcaaaatcaacgaattttcggtgggattcggtcccgctctattcaaaaaacgcagcaaaaagtcgggcgaactcttcgctctgcgcgcgattcccttgggcggatactgcgcgttcgaaggggaggacgatacggaggaggagaacacaaaatccgcttctcccaaagcggacggggaaaacccgcccttttccgactttgcggataagacctcgcaaaaggagggaacggaagccgagccttccgcgctttcgggcaacgtttccccggacgaggcggattctttgaaggcggaagccgatacgcatacgattgcggcgggaaaacggaaagagaaaaaggagcctttgaatttcaacgatcagccgccctggaaacgaatcatcgtcctccttgccggcgcaacgatgaactatcttctcgcgctccttctcatcatggtcatgttcgtgggatacgggcgcccgcagtcctatctctatcccgtggaagcggctccgcaggcacagacggcgacgggagcggacgcgctcagaagcggcgacatcgttttgaccgtcaacggtcgggatctgtatctcaccaccgattactgcgacgccttgaagggcaagaaagcgggcgacgtggtcgcggtggaggtgctcagagtcaacgaggaaacgaaaaagcgggagaaactctccctttccgtggcgttgcaggcggacgcgaactttgccaatatgtcggataccgcgacgatctacgcggttttcggcttggacagcgaacgctgccaaatcgttcccgtcatcatgaaacagggctttttccaaagcgtcggggattctttcgtctattccgccaagatcggcgggacggtgctgcgctccttgggagagctgctgacgggaaaactcggattgagttcgatgggcggacccgtgacgaccatcaaaatcacttcgcaggtggcgtcgagcaacatggtttccttcctcaacatcgcgggattcatcggcgtcaacctcgccgtgttcaacctgctgcccatccccgctctggacggctccaaggtgatcttctgcatcatcgaatggatcagaaaaaagcccatcaaccgcaaggtggaggcgatgattcattttatcggcatcattttccttttcggctttgccattctcgtcgatttattgcaactgttttaagtctgaaaaacaaaggcggacgctttcctcggcgttcgcctgattcgtcgccatgacgcctctctttttttcgcgggtccttttttcctgaaaaacgtcttcccgcacgccgttcgtttctttccgcggggagttacgctggcggctttgctcctgtcgctttgattttttccaatcgcgttcacgatttttcgctattttctccgccgttcgttttaaggcaactcggaaaaaaggcggcccgcaaaaaaaattcacctgtcaagtaaaaacgcttgacaggcaattttttttgaggtataatggggaagccgtccgcaaaaagagcgcggaacttgcgaaggcgaaaacggaggaacgggctatgtcgggcgtcggaacaaaagaacgcttggtatctgcggacgaatgcggaccgaaagatatggtcgtttcgcggctttgggacgtatacgcgcccttgctcacgccgcatcagcgggaaattaccgacctctatttcaattacgatctgtccctgggcgagatcgccgagcagaaaggcgtatcccgtcagagcgtttccgattgccttgccaaatgccgcaggctcttggaatcgtacgaagaaaagctggggatgctgtcgcagcttgaaaagttctctaaggaacgcgcccgtgcgtcgtctttcgtcgcggggtggacagagcggatgcgcgccgagcatcccgaatggagcggggagctttcctctttggaagaagcttttgaaaatccacgggaggactgaatcgctttttataaaaatacgcaacgggaggaaaataggataaaatggcgttgttttcatcgctttcggaaagactcaatcacatattttccaaactgaccaaacgcggcaaactcacggaactggaaatcaaaacggcgatgcgcgaggtgcgcgtggcgctcctggaagcggacgtcaatttgaaggtcgccaaacagttcatcgcggacgtttcggaaaaggcggtggggcaggagatcctcgcctctctcaatcccgctcagcaggtcatcaaaatcgtcaacgacgaactgatagagctgatgggctcgaaaaacgccaagctggaagtttcgtccaagcctcccacggtcgtcatgatgtgcgggcttcaaggcgcgggcaagaccaccctttgcggcaagctggcgacgcttctcaaaaaacagggtaagaaaccccttttggtggcgggggatatctaccgccccgcggcgatcacgcagttgcaggtggtgggcaaaaacgcgggcacggaggtctttgaaaagggcacgcaaagtcccgtcaagaccgcgaagcaggcgatagagtacgcccgttccatgaactacgacacggtgatcctcgatacggcgggcagattgcagatagacgaaacgctgatgcaggaactcgaaaacatcaagaaggaagtggaagtgacggaaacgctgctcgtcgtggacgccatgacggggcaggaagccgtcaacgtcgcggacaccttcaattcgaggctggaaatcacgggcgtcattctcaccaagctcgacggcgacacgcgcggcggcgcctgtctttccattaaggcggtgacgggcaagccgatcaagtttatcggcgtgggcgaaaagctcaccgacttagagcccttctatcccgaacgcatggcgtcgaggattctgggcatgggggatgttctgtccctgatcgaaaaggcgcagcaggcgatcaccgaagaagacgccaaaaaaatgcagcagaagatgaaggaaaattccttcactttgaacgattatctcgaacagttcgccatgctgaaaaagatgggcggcgcgcagtcgctgatgagtatgctccccggcatgggcaaaatgaaggtgaacgaaaaggacatcgacgagaaaaaaatagaacatacgaaggcgatgattctttccatgacgcagtcggaaagggacaatccctccatcatcgacagcaagcgcaagcgccgcatcgcggcgggctcgggaacgagcgttcaggagatcaatcagctcctgaaacagtttgaacagacgaaaatgctgatgaagcagttaaagggcggcaagggcaagttcagaatgcccttttgacagagccggacccgcgcaaagacaataaaacgatttcgcagcgttcaaaaatcgggtcgccgtttttccgatgcgtcggcgtttcgaaagagttttttgaaaagcgccgccgcgactttgccgacaacatactgcctgcattttaaatagagcccgtaaaggacaagaaagcgggaaattccccgccgcggcgttccttgcggggtgacagaatggacaaaattaattttttaacatactttggaggtatttattatggttaaaatgagacttttgagaatgggcgacaagaaaaaccccatctatcgtatcgtcgtcgtggacggcagaaaggcgatgagcggcgagtatatcgaatgcgtcggtcattacagacccacctgcgagcccgcggaattgaccgtcgacgtcgaaaaggcaaaggaatggctctcgaaaggggtgcagcccaccgaaacggtgaaaaatctgctcgtaaagacgggcgcgatggagaaatccgcgaagctcagcccttccaagaccaaggcgaagaaatccaagaaataatcgccgtcggggagtttaaacaggcatcgggaggaaaaatatgctggatttaatcaaatatatcgtcaatcagtttgccgaggataaggagaacatcgattatgaagtcaacgaaaaagacagagtcatcgaagtcgtcgtaaccctgccctcatcggatatgggaaaagtaatcggcaagcagggaaaaatcgccaaggcgatgcgcacgatcgtccgtgcagccactcccagaaacagcaagagatacgtcatcgaaatcaaagaaaagggcggcgacgccgtagacagagaggacgaaacggaagaggactccgcggaataagcggagtttggcatttcgagccgaaaaaagatttgttccaagtcgtctttgccgaaaaaccgccgcttttcggggaaaacccgattcgcccttttcgcgtccggctcggcaaaaattcaacacggatcttttttcggtatcccgcaggacgtgtcggcacgctctgtgaaaaaggggctttcttgcgaaagccttttttgcgatagacggatttttcatttctttttcggacacttagaaaggagggagagtatggaacggcttatcattgccgaagtattaaagccgcaggggattcgcggcgaactcaaaataaagacatacaccgacgcccccgaagacgtcagggcgttcaagacggtgtatatcgacaaaaatgcctataaagtgctttctttccgcgtcggagaaggcagctttgcctatctgggactgcgcgggattcccgaccgcaacgcggcggagcttctgcgcggcaaaaagatagagggggacagggaagaagcccccgcgctggaagaaggaagatattatatcgtcgatattttgggccttaccgccgtaacggaggacggggacgttctcggcaccgtcaaggacatctcgcccctttcctcggaggtatacacgctggaaaaagacggaaagcagattttgtttcccgcggtcaggggcgtggtgaagaaggtggatctcgaaaacaggcgcctgatcgtggacaaaaaacgctttaacgaagtcgccgtttactgagtccctcgcctaggtcctctgtcctacggctaaaagaccccgcctctttttgaaaagaactttgggggagtatctcccgcgcaaaaaaagcgaacgcgacgttctgacaatgccgccgacagagttccgttgccgataagcgtagccccgcgccgcaaaaaacgcagacggttgctttaaagagaggacgaagcagccctcttttcgccgcaacgcggcacaaaggaagcgatcgcgctaaaacggcggctgaaaggagcacgcgaattttcgccgccgctcgtgccgcgaaagcgcgccgaacgcctgccgcggaaacgagggcgggaagtacggcgcccgccgtcaaaacgctgtgtccctttggaaaagttctcccgcgtgtatgttttgcggagaaaagcaggcgggaacaaagccgctctgcgtcaaaaattccccgtgcgggtattccgtcgccgcacggggaattttcagacacactaaaaggatagggaaaagtttatcggacgttttctcccgaggtctgcgccgccatttgggttacggcttgcgcggagtctttggaagcgttgaatttctttaccgctttgacgaagctcttggaggaaaagacgaggacgcccgctgcgatggcgataacgatatcgggaaagacgtaagccgcctgatagccgaggctgtataacgcgacgggcgttccttcgggcgcaaacgcgccgaaggcgaagatgcccgaaagaaagtgcatcaaaaagcgggcgacgcctgcgacgacggcgccgagagcgaactgtaactgcgggagcttttccaaggctttcgttttcgcgaacattcccgcgaggcctatgcccgcaaaagcgagcggataatcgaggacgaactgcgcggggtgaaggatataagtgtcttgaagcgcctgtaaaagcccgtaaatcatgcccgcaaacacgccctttttcgtgccgaacatataggaatagatcatcaggggaagcagggacgcgagtgtgatggagccgccctgcggcattttgacgatgcgcagataggagagcgcaaagctcatggcgatacagatcgcggcgtaggtaatggatttggtgtcgaatccctttttgtcttttctgccgaagaaaaacgcgagggcgacgacggcggcgacgagaagaatcgccgtcagatagagggcgatggagttgacggattcgcggctgattccgttgctttcgagggaatcgcccgacgcgaaacgaacgcccatgcagacgagcgtggcgagcagcgccgcacccaccgcgccgcccgcgccgataaagacggggcgagtccttctcagcgtgacggcgatggcgcttcccgcgacggcgaggagaagaaggagcaggggaacgaacaggagcgtttcgatgccgtcctccgcgaaggagaaggaaagaaataccgcgcagaccgcgcaggcgtaagcgacggcggtaaggagcgcgatcttcaaaaatttcgccctcttttctcccttcaaaagaagggcgcatacgataaacgccgccgcgagcgcgagcgtcagccagatggctaccgagcggacggcgtcgtggacggtgtcgaaacgaatgggataccatacggccgccgacagtgcattgagatacatagagaaaacctcccgttatttttgtccgccgttcgcggtcaaaaaaaaccgcgccctctgccgtccgttttttaaacgtttaagacggcgcgcgggcgcgtaaggatttctttcacctcgttatcgatcatctcgctcaagtattaccttgccgattcaatggtataatctcagc

SEQ ID NO: 2567 - DNA, 7198 bp, Unknown
  16S sequences of unknown bacteria
ctcgctgatgatgccggccttctcccgctcatcgatgcgcccgcagcggatcacctcgcacgtgcgcatcagctgcttcaccgcttttttgcgctgatcgagcttttcgctttcacagaccatgatcagcgtgctgctttccaaagggtctgcggcgtatgccagcagcggatccagatcatagccggtcgtatcctttgcgctgagaaaggaagcgttcttcatgacgaccactttatgcgtttcaaacagcggcagcgacatcgcatcttccaggatgaccttcagcagcgttgcagaagcgtcatagaccgagatctgcgccttgtccacatgcagcctggcggcgatctgcgcgatcttcttttcgatcgtcgcgcgctcctcaccatatatgacatagttcacgttcatcacctgtctctcattatagcaaattccccgcgcgctgtcctgacatatttgaacaacgctgtggtgcggatgaggatggcgccgtcctctgcggtcgaataataggggatcccctctttatccagcgtctgcagcaccgtctcgctgggatggccgtaacgattgtcatgcccgaccgagatcagggccagctgcggtctgagcgcatgcaggaacgctgcagatgaactggtatcgctgccgtgatggccgatcttgaggatatcgcagggcagagcgtcatagcggcgcaagatctctttctctcccttcacgccgagatcacccatgaacagataatgcagcccgtcccagccgaaccaggagacgatgctgttctcattctcatcttcccctgcatactcagggatcagcgcctgcaccagcagcgggtcctccacatcctctttcaccgtgatcacctctgcgatctccacgatctcagagagctcttgcaggccgccgctgtgatcatgatcatcgtgagtcaggatcagcttatcgatgcgatcgatcttcttgtccttcagcagcggtgcgatgatctggcggggaatgctgcgatataagcttcctgccgcatcgatcatcagcgtcccctgacggtgcggaaggctgatcaatgcacagtctccctgcccgacatcgatgatcatgacttcaaagaacgggtccagatacccttcgacctgactgaaggccagcagcagcgccagcattccccacgtgcgagccttgttctccttcagcagcctgagcaagagccatatccagcacaggatccacagcacgctgggataataagtcagcacccacgtctgtgcggcagcggacagctgctccagcaatgcggccgccccaagcagcggcgtgatgcacgcaggcatgaacaggccgagcagcgccggcacatacaacaaggcatacagcgtcctcaacggctgaaagagcagtgtctggacgatcgcgatctcatgaaaaaagcatagctggagcgggatgacgaccagcatggagagcgcacgcgcacgcaggcgcgaacgattgaacaaaaacgccaggcggagcacggtcggaagcacgaaggacatctcgctgaccatgtatggccgaaacagcagcacgagcaagatgctcagccccgccgcatcgcgcgtcgatcccggcagcagcccggccatctgtgtgcagagcacgcggaacaaggaatcgctgaagttggtcagggagccagccagcgccagaaagatgaccgcggccgcctggctctgccgcttagccagccgcttgccggcgagcttcttcagccaatgtgccagcgaggacagatgcaggccgcaggcgctgagcagatagctgccctcttcctgtatcccataaatgaggctgagcagcagctcccggcttttcccctcactctgccaggcttggcgaaacagccgcgctcttaaggtgtttccctggctgagcgtttcgctttcctcgctgctgatgcgatagcgcacaccgcgtttcgccatgtagtcgtcaaagctgaactgtccgaaattatgatcggaatgcagctgcttccatgtcccggatacccgcacgatatccccgaaggaaggctgcttcagcccatagacgacgacccgctggccctttgcctcagcgatcacataagaagacttgatctgctcgacccggatgatctgcgtatctggcgcagaagcgggcaatggcgcgcgaagcaggaacgaacagccaaagagcagcgtgatcagcgcgagagcaagcggctgcctgcgccccaggatgacccacatgatgagcagccacaccttcacgctgaactcctccacgagcaagaaggagcacagcgccagccccgccgccagcaggtcagcacgctcaaagcgtgatctcatctttgatctgttcaaacatcttctccccaatgcctttgacctccatgatctcttccagcgtctcaaacggcttgatgcggcgataatcgatgatccgctgcgcgatggccatgccgaccccattcagttcatccagctcctcaagcgtggcgctgttaagcgagatccgctgtttctcccgtttctctggcacgacgagcacgccctcgtgcgtaagcgtctgtgtcagcgcaacggctgagagatccgcgtcatccgccgctccgccggccagctcgatcagcgcggcattgtccgcatcccagggcagctcatagacgccgggatgcttcaccgcccctttcacctctaccttcttcatctcgcgctcatactgggaaagcagctccgcatcaggcagagaaggcatgcagacaaaggcaaacaacagcagcgcgctgacatacagcaatatcctcttcatcagatccctcccaagccgcctatacgagcggatggccgagcacactaaaaaagcatgtccgcaaaagacatgcctcaatcaaagagcatcaacagatcgcgaaagcagctgatgcgcgcctgccagcgctgtgcctcgccaaagccatatgacgcgtagacaaaggggatcccggctgcttcgcacgccagctgatcctttagcgtgtcgccgacataccaggcatcctggatgccgttgcgcgacatgatcaaggagatgttctctcctttggacagcccggtgcgcccatgtgtctcatgatctacgaaatacttccccagatgatgcgcgctgaacatggcatccacatagccgtccgcggcattggtcacgatcatcagcggatgcttcgcactcagctgcgccaggaccgcttcgacatccggatacagcacgccgccgtggcgggaaagatattcattctcataggacatgcagctcatcgtcagcgccagtccctcctgctcgctcagctgcgggaaaagcgcacgcgcgatctctgcgatctccattccggctaccgcgcgcagatcatcgcccgtgcaatagccgtcccagccccgctgctcatgcaagagcgcattgtatgcggcagcgatgttgtccgacgcatcccacagcgtgccgtccatatcaaagatgatgcaagtattggtcgtgttcattgcttcctcctcgtgaaaaacggccctcaaagagggcctcatctttatttcaattcgacgatgcgcacgtcgtaaggaacctcaacattgccgatatgcacgatatcgttgaccttgtgatccatcagcgccactgccaacggcgagatgttggacagtctgccgttcagcggatctgcttcgatcgagccgacgatcgtatacgtctcttcggtattgtcactgagatcaaggatcttcacggtggatccaagggtgaccgacttagaggaaacggcctctttgtcctcctcgatgatgaccgcattggcgatcatgttctccagttccaggatacgcgcctccacgcgcgcctgatggtcgcgggcagcgtcatagtccgcgttctcgctcaagtcgccctgtgcacgggcttcctgcagctcgacgatgacctgctggcgcaccacatgaatcagattgtcctgctccttgagcagttcatcgagaccttccttggtcacataaaacttatgttcgttttcctgagccattgtatcactcctattcgctcggtattataccatgttttccatggattcgctacaatgattgtcaaatcctcagaacaccagtcccagctcttcctgcagctggcggtgttcttcatatgtggtgctgtaatacacctttccctgctcgcctctgaccccgttgatgtctgcgatgaagtacagataatcgttttcatccgggtgcagcacggcctctatggcctgttcgcccgggttgacgatcggaccgatcggcagcccctcgttcagataagtgttgtagggcgaatcgatatccgtgctggcttcacacgctttccagctttcgctgtcactgcggtgcaggtcatcatagagggcgtagcagaccgtcacggtcgactgcagcggcatcccctcctgcaggcggttgtagaacacgccggcaatggtcttcatgtcctctgcggtagacgcttcatactgcacgatgctggccagcgtgatcagctcatggatgctcatatccgaatcctcaaagtcgtgcgcatatttttcatagatctcctgaaagtgatctaagaacgtgcgcgtgacggcatctgcgtcggcatcctcatcaaaagcgtaagtctccgggaacaggtatccttccagccggacccggtaatccttgttatccagcgtatccgcatcgaggaaagcatagtcctgcgccagcgtgcggatatattccatatcattccatttggcgatcagctcttccacactgatccccagattttcttcgatcagcgctgcgtaatccttggcccagctgccttctggaaaggtgatgagcgtctggttggtcttggcctcgtccgcatcgttgaggcggcgcaggatctcatccgccgacatcgtgtcattgagcgtgaacaccccttcccatgtctgggtcaggccgctgatgcgcgcatgcagagaaaccaagaaactgttcttgatcaggttctcttcctgcagacgctccagcacgctgtccatgttctccccgctctcgacgacgaagacgacgtcctgcctgcgttcattgaccgcagaaagcgcgttgagataccaggtgtacagcgcgccggcaatgacaaggaccaccacggccgcggcgatcagccagcgcttccatttaatcttgcgcttcatcttcatcttccgcaaatgcgccgatcacttcctcgaccattgcccactcttcatcgctctccatcggcagaaggttgccctcatcgtcaaacgcagatgcaaagacttccccgctgtcgtcttggggatcctcgaacaccacatactggcgtccgaactgttcattctcaaacgtgaagaggatggtcatccgcttttcgtttccgttttcgtcgacaacgtaaagactgtttgaatccagcataatcattcctcctaattcatcacaaaggggctgatcagcccctgtttgaataatccaaatagctctgcagtatctgaacagcagccatctggtcaatcactttcttgcgcttctttctggatacatctccctgcagcaggatccggtttgcggcgaccgtcgtcagccgctcatcccataagacgacctcgacgccggagctctccagcttttccttgaacgcgatggagatctccccgcgcacgccgatgtccccgttcatgtggcggggaaggccgaggacgaccttatcggcatgctgctccctgatcagcgcttgcgcctgagccagcgcgctgtcgtaatcatcgctgtcaaagcgcagcgtcgtgagggcgcgggcgatcatgcccagcggatcgctcacgcttacgccaagcgtcttgctgcccagatcaaatccaagcgttctattcattgtcttccagataggctctcacaagctcctcgatgatctcatagcgttccacgctctgaatgatcgtgcgggcattcttgtgtgaagagatatatgccgggtcattggagatcagatatccggcgagctgattgaccgaattataccctctttcctccagcgcctcctgcaccagacgcagcacatgcttgatggtatcgcgccgaaggtcctctgagcgaaaggacatcgtttcagtaatatctttcatcgtattacctcctgttctgcctacgaagctattttaccttaaatcacatcaaattgaaagtagttcagccagcttattttcgacggtcttcatcgcgtcgttcaggctggcgacgtcttttcctccggcctgtgccagatcaggcttgccgccgcccttgccgccgcatacttccgcagctgccttgaccaggtcgccgcagcgcacgccgcgctgcacggctgcctttccagcgccggccacgaagacgaccttgtccccggcgacagaggccaggaagacgaccgcattttccttttggcccttgatgttggatgccacatccttcatcgctttcgcatccatgccatccatccgttcgatgagcacgtccagatcgcccatcgcgcgcagctgatggaccagatcgcgcgccttcagcgcgaagatctgctcattggcacgggcatattccttattgagggaagacagctcctcgctgagctgtgtgaccttgctctccacctgagcgatccccttgagcttcagcgtatgcgcgatgttgagcagggtctgctgattggccgcaaactcctcatatgccgcatatccggtcttggccgtgatgcggcgcacgccggaaccgacgctttcctcggagatgatcttgcacagaccgatctggctggtattgttcacatggcagccgccgcaaaactcacaggagacatcgcccatcgtgacgacacgcacgatgtcgccgtatttctcatcgaacagcgcggtcgcattgcgcttcttcgcctcttcgatcggcagctcttccttgatgaccggatatccctgcgtgatgtaatggttgaccagcgcctcgatctgcatcagctgctgttcgctgatcttctcaaagtgcgtaaagtcaaagcgcagatattccgggcagttatatgatccggcctgagcgatatgcgtgccgacgaccgctttcagcgcgctctgcagcaagtgcgtgcaagagtggttggccgtcgtctgcgc

SEQ ID NO: 2568 - DNA, 12025 bp, Unknown
  16S sequences of unknown bacteria
ccttaccgacaatcagggaaggacggtagacttcaaaaatacgatcgtcatcatgacttccaatctgggaagcgcttatctgaccgaaaatatccgtcaggacggcacgatcgatccggcggtaaaagagcaggtagaagaagagctgaagcgtcatttccgtccggaatttatcaatcgtatcgacgatatcgtggtattctcgcctctgactgaggagcagatccacagcatcatcgatctgtcgctgaaatctttatcggcgagactggcggacagaaatatcactcttcaccttactgacgcggcgaaatcctatatcgccggcgaggcttacgatccgctctacggagcgagacctgtcaagcgttatctccagaaatatgtggagacagcgctggcggagatgctcatccgcggcgactgcaaagacggcgaccttgtgacggcggacgcatcggaggacggacttactttccgcactgaagaggtcgtatctctgtaaaattcctctgcggaagggcactctgcaaagcggaaaaaaattagtgaaattaaaacaaaagctctgtgcgggcggtgtccgcacagagctttttcgtttctgaatggcgggaagaaaacatccttccggacgttttacgatgtttcagacgttttttcgggctcttgtttcgggaaagtgtagcgcaccagtccttcgctgtgttttccgtattcgatcgcttcgctcggacagcggcagatacaggccatacagtgagtgcagtgatctgaccagacgggttttttaccgtcgaggcgaatattgctgaggggacagacctccgcgcattttccgcaggagatgcaccggtctgtcgcataaaacttttttgcgtggacgaacatgggataaaagatgcggtttacgattccgctgctgatcttatcgccgagagtgatcttcggctgagggaaaggatcttcatttctgatgaagcgtgcggcgccgtcgatgacggtttccgcctgccggatgatttccgccgcctccccggctgtcggcgtggtgaacagagcgatataattttcgggcatcgtaatcttcatacatccccggtaattcattttcttttcggcgcacagtttctccagatatttgcctgcatttccgatgcttcctccgcaggtcatcacaaagtaaatctctctgtttccgctgagagaggtgcgtttcagccactgctgaaggatgcgcggaattctccaggcataggtgggagcgacgatgacccagggccgctgcgagtggatttcagagtaatccccgctgcggatcctctcaaacaggccggtcacgtcgtcgtctgtctccttgccgattctctttgcggcatattcgctgtttcctgttgcggaaaagtataagatcatatttctaatcctccttatctacgatgattataccacttgccttttctcagggaaaatggtaatattcctgtgactctaatgaaattctgagtcataaaaaatacagatactccttcctcctctgaggatgagagatttattttccggtttttgcagaaatcaaaaacctgtcacaaaagacggaaagagcgggcgtttgccggcgctgtgctgagaacgttcgcacactgatcaaagccgattatcagagatttgctcagatttgaggcggaaaggagatgcggaaaatgccgcggggttttacagaatccgaaaaggaaaaaatcagagaaaaattgatcagcgcctgtcaaaagcgctggagccggtacggatataaaaaaacgagcgtcgaagaactctgccgaaaggccggaatttcaaaaggagcgttttatcttttctttgagtccaaggaggcgctgttttgcgaagcgctgtgccggatgcaggaagagatccgtgacggcgcgtcccgtataatagacgagcgtccggaccattttggtgtgtcgaaggccgtcaaatttgtatatcgcgcatacgatgaaaacaattttctgcgggattcggacagcgcggattttgccgctttgatggataaactcccggaggcgcagaggcggcggctgatgcggtcggaagaaaaaaacagaaatctgtttctcgaaaaatcctgtctgcgtctgaaagtcgacgaaaatctggcggtatccgtgatttattctctgatcatgaatggaaagaataaggatgcgcttttgcaggatcaccggagcgtcctggatttcatgacggaccatctgatccgcgctatttatgagtaagccgccggacgcggtttcagaagttcaaaaagatactgaaagaggacggtgagtaattatagatggaataaagaaaggggggatcttatggatttatctgtaatcagagagaatgaaaaatccgctgctgtagtgaacagtcagagcgttttgatttatgacgtcgtgtccgcgctggactttgccatgtctgtgaagtgtgagacgggatgtaccggtatcgcgctcaataaggaagctgtgtcagatgagttttttgcgctgagtacacgtctggcaggggaaattcttcagaaattcgtaaattacggtataagactggcggtctacggagatttttcagagtatgccagcagtccgctgagggattttatgtacgagagcaataagggaagcgattttttcttccagccggatgcggacctcgccgctgagaagttactggaaaagcgctgaaaattgcagtgcgggaaacacagactgaaaattgatgaacagcggcgaagctcttcttcgtccggaccgaaaaaccgcgtgttttcagacggctgccgttctgcagagagcggggcggctttttttcgcggcgggtgaaatcaaatgccgttctgtggtatgataaaaatacagagtgtcctgactcttgcagatggtagattttgttccgcattcgttttttcggagagtaactgcagtgatgaaaaggattcgatatattgaagaactgaattactttaatgggatcgcctgtcttctggtgatactcattcacgtgctgtccctgggcgtcgtctctctgaggcccgggacgtggcagggattctgcgtctttctgccctggagaatttcacagtttgtcgttccggcatttttattcagcggagcggtgaagatgtctctgactttttcggatttgccggaagagggggcggcggaagcgcaaaaaaagattcgccgccagcagtctgccgggtactggaattacctgctggaacgctgccggacgattcttctgccttacgcggtcttttttctcgtctattatacggcctattgggcggcagggctgctgcagccgtcctggaatgcgctgattcgcggttttgtgacgggagatctgtcggggcatttttattacattatgatagtagtccagttttacctgttgaagcctgtctgggcaagaatgacagtttctgttccgtggcaggccggaataggagccgcactgctgattcaggcggcgacagccggctgtcttaaaatattttctccgtttccgaaggatttcccgtatgcggatcgtttttttccgctctatcttttcttttggatcggaggtctctacgccggcagatactatgcgcggctcgcatcctttctcagcggccatcgggtctttatctttttctgcggcggcgctgtgattttcagcgcgctgggaatgtatgcccagcacgtacagggcagatatcttccgatgatggatggcctgaaaattctgatcgacagtctttcgatcctgacacttctggcagtctgtatcggaataaaaaaaagacgccgtctgaaaacgcttctcgggaaaatcagcggggcttcttatcaggtatatctgtctcactgtctgtttcttacgctgggaacggtctggcttcagcaggcgggaattttgcggatcggccatcttctgctgtgccgagcggctgtcggatacacgcttccttttgttctgtattttctcaccgcgaaggcatgggaagcgggaaggcagtattgcctgaagcgggtcgccggaaaataggcggtgtgaactcgggcgtctgcggcgcggacaaagcgcaggggatttccgggaggaatcttccattttataaatagcggaaaaacagaaaaagggggaatggattatgaaaaaaatatcggcgggtctgtgcggtgtgctgctgtttgtctgtgttctggccggctgcggcgcgtcggaagacgctgaaggatccggcgccggagcgtcatctgattccggtgcggggatagcggtgcaggaagagtccggtgcgccggacggacaggaggagtctgcgctgatcgaaaatatcggcctcatcatgatcgatggaaaactgtattataatacgggagaagagagcgctgtggacggacgctgcggcgtcatggacggagagatcgcgtcatcggtgggcgccgaacagacgccgatggaaaacgatcagtcgaatttcggtacgggatatggatatcagcgcatgtcggaggatacggtagagcttttgatggatgatcgttggatcgtatttgaatcggtagaaaaggcagacggcagttcatcgctgcagtagaaacaggaaagatatgaaatatagaaatattgtccgcgggcggtttgtcagccgccctaaccgctttatcgcggaagtggaagtcgaaatgaaaaatgcagaggacaaagccgggaggaggcaggaggacgaagacggctgccggcagaaggaacgggtgcacgtgaaaaatacgggacgatgcagagagcttctgctgccgggggcccgggtcgtactggaaaaatcggacaacccgaaccggaagacgcgttatgacctgatcgccgtctataaagagggactggccagggacgaagatggaaatccccggccgggcctggtcaacatcgacagtcaggcgccgaataaagcggccgccgaatggctcaggactctgaatttcgatgtcatatgcccggaatacgtatatggaaattccagaatcgatttctatatggaaaaagacggacagccttatttgatggaggtaaagggctgtacgctggaaatcggcggcatcggatattttcccgacgctcctacacagcgggggatcaaacatctgaaggaactggaacgggcggcgcggcagggatatgtctgctgtgcggcttttgtcgttcagatggagggtgtgaatgaggtgaggcccaatatccggacccatccggaattcggagaagttctgggccgggcggagagagccggagtaaagatcctctttctgggatgccgggtgacagaagatgagatggtggtcgaccgggtgttttcggcaaaatcctctgacagcatcgaagatccgggacggtctgtcgaatctgacggccgcagtttcttcggaatctgatttcctgcggcagccggatattcgggctgcccggagaaaagcgggacatggagcctttcagcagagagaatccggaactcacagagattccgccgcttttcccgagccttgagtgtgagctgtctgcggatagcgggacgggtagaaaagaagatgtctctttgaaaacgggcggaaaaacgcagaaaagacacagagacggaacagaagtgagaggacagaatcatggaacgaagcagagaaaaaagcagtaaaaacaaaatcgtaaaaagagcggtcatcgccgtcattctcatcggtctgatctgcgcgtcgtcagctttcggcatcagtttttacatacagcgagcagcggatgaccggatctttgcggcggacagcgcctggtcggatttcggggcggactgcatcctcgtattgggatgcggtgttcgtgatgacggatctcccagcccgatgctgagagaccggatgacgactgctgtggaactttataagagcggcgcggcgccgaagcttctggtatcgggggaccacgggagaacaggttacgatgaagtcaatgtgatgagagattttgctttgaaagcgggggttccgtcagaggatatctttatggatcacgcaggtttttccacatacgacagcgtttaccgggccggtgaagtttttcaggtggaaaaagcggttatcgtgactcagcgttatcatctgtaccgggcgctgtacagcgccggccgcctggggctggaagcggtcggctgtccggcggacctcagaaaatacagcggccagagcggaagagaaatccgggaaatcctggcgcgggacaaggaattctttaaacttctggtgaaaccgcagccacagtatctgggagaagccattcccgtcagcggcgacggaaatgtgaccctcggatagatccgggtggaagagccaattcacgcaattcccgctttacaatcgctggcaaaggctttaaaattgtgaaagtaatgctattttgacagaaacttttgagaatgaggcggtcagatgatcttcgccggtgtcagaacttcggcagtttgcacagccggcggctttaagatggtgatttatctgtctgtcagtccgattcggccggcggttacgccggtccgggaattaggaggataatacgaatgataacagttacaaatgtcagtgtaaatttcagcggacagccgctgtttaaagatgtagatctcaaattcacaccgggcaactgctacggcatcatcggagccaacggagcgggaaagaccacgtttctgagagttctttccggagacttggatccttccaccggttcggtgagctatccttcggatatgcgcatgtccgtgctgaagcaggatcacttcgcttttgaagaatatactgttctcgatacgattatcatgggaaatcagcgtctctatgatatcatgaaagaaaaagacgctctctacgcgaaagaggacttttccgacgaggacggcatccgcgcttccgaactggagggggaattcgcggagctggacggctgggaggcggaatccaacgccagcagactgattcagggactgggtctctctcaggatatcctctatgataggatgtcttccctgacggcgaaggaaaaggtaaagattctcttggctcaggctctcttcggcgatcccgaaatcatcctgctggatgagccgaccaatcatctggacattcaggccatcgactggctggaggactttctcctggattacaccggtctcgtcatcgtcgtttcccatgacagacatttcctgaacacggtatgcaccaatatcgtggacgtggactacggaaagatcaccatgtatgtcggaaactacgaattctggtatcagtccagtcagctgatgcagaagatggtcaaagatcagaataagcgaaaagaagacaagatcaaagaactgcagtcttttatccagcggttttccgcaaataagtccaaatcgaagcaggccactgcgagaagaaagcttctggataagctctccgtagaagagatgccggcttcttcccgccgttatccttacgtgggcttcaccatggacagagaggcgggcaaggaactgctgaccgtggaaaatctcagcaagaccatcgacggtgtgaagattctcaataatatttccttccgggtaaataaagatgataaaatcgctttcgtcggagaaaacgaactggcgaacacgactctctttaagattatcaccggagagatggaaccggacgaaggtacttataaatggggaacgacgacgagccagtcttacttccctctggacaacaacgctttcttcgacggttgtgatctcaatctggttcagtggctcagccagtatacggaagagacgacagagacgtttatgagaagtttcctgggcagaatgctcttttccggcgacgatgtatataagccggtcaaggtgctgtccggaggcgagaaggtcagatgtatgctctccagaatgatgctcttcggcgcaaacattctgattctcgaccagccgaccaaccatctggatctggagtccatcacggcggtcaacaacggtctgatcgatttcaagggcaatgtgctcttcgcttctcacgaccatgaatttatcaacaccatcgccaaccgaatcatggagatcacgccggaaggtctgatcgaccggctttccagctatgacgactatatcgtctggagacgggaaaacggaaataaataaaaaccggattttgcaggagagacgcgccggcggacggcagcgaagaaaagaatcgtgcaggccgaacggcgttggtctgtaaagagcgaaagggtttatcttatggcggcgcatcagcgccgccatattttttgcgataccggtacttttacccgcagtacaatatcggggaagctgccagaaccgccgccgtctgcagaatgagatctgcagagagaattcttccggaggaaaagaggatgaatacaccgacgcttgaaacagaacggctcatattgagaaaattcactgaaaatgacttggaagtcctgtatcggatttacagcgatgaggaggcaaatcggttccttctgtggtttcctctgaaaaatatggaggaagcccgattgttattcagagaaaaatatgcttccaagtatttgcttccgcaggcatatgcctatgctgtctgtctgaaggaggacgatattcccgtcggctatataaaagtcgatacccgggaaccttatgatttcggttacggcctgcggaaagagttttggaatcgggggattgaccgaagctgcgaaagctgttatagagcaggtaaagaaagacggactttcgtatatcacagccactcatgacaaagacaatccgcgaagcggcagcgtgatgagaaacgcggggatgaaataccggtattcctatgaagaacagtggcagcctaaaaatataccggtcatattcagaatgtatcaattaaattttgacggcgacgaagaacgggtttaccaaaaataccgggatatctctgctgttcacttcgtggagacggatctgtaaaaacagctctctctgaacttttcgaaagactgaaaaagaaaaaggcgatcttttctcatttcaaaatctctatggagaggcttccctttctgtgttaaaataaaaaacgaaaagcgggattcagcggacaggcgcccgagacaccgggtcgggcctgaaagggggacacggcatgaaaaaaacagcgatctttctcatcctgctgctatcgattccgggaatttccgggtgcggcggcagtcagaatcctgcttccgcggtcactgcggaagaggggacgacgagcgcagagaacggcggagataccgatgaaaagaactggagcagacaggagattctgtcgatgtttgagaatgtaaaagaagactgctggagtgtcgccggatgtgttccgatttctgacgatgcttatgaccgggtcggagccgtgcttttttatgacagtgagacagagacgagcaataccgcattttttgatgaagagggaaattatcaaatgtgcggggtgtctgcaaaaatatactccgagccggattttacttatcacggggatggcgtcgtgactttttatctggaggcggaggaaggttctgcttaccgctgtaagatcgcgttctcagccgacggcagcgaggtgttctttgtgcgcgaggacggcgggccaaagcggcggtaaaacggttcctttatccaaaatcagttgattgtcgattacttttccggttacaaaatctcatacatttattttttattaaaattctcgcgtgctccggaggaatcttcctccggggtatttttcttttttgtttcttccttttcactctctgcagaggcgccggaatcatatttctccatttttcgcgtatcttttacaaggcgcaggtctctgtaaaatactctgctttacagaaactttaaaatttgcggcaaaatggtatgaaattccttgataattaacatacttttaactgaggagcgactttgaacttaacgttgtgtcgttacaataaatcatgtcaaaaggcttgaaaaagtcagagtgaaaataagcaaatccatacacggaggaaagaaaatgaacaagaaagtaaagaaaatatttgcggcaggtctcacggcggcattggccatgtctgtactggcgggatgcggaaacagcagcggggacgggagcgctgagggcggcagcgctgcagattctgagattacggtcctcaccagagaagacggttccggcacgagaggcgcgtttattgaactcttcggaatcgaagaaaaggatgcggacggcaataaagtggatcataccgtccggactgcggaaatcacaaacagcacttctgtcatgatgactaccgtggccggaaatgaagcggcgatcggttacatctctctcggttctctcggcgactctgtaaaggctctgaaaattaacggaacggaagcaaccgcagagaatgtgaaaaacggcacttataaggtagcgagacctttcaatgtagtctataaagaaagctctttaaacgacctggctcaggattttgtaaactttatcatgagcgaagaaggccaggcggtcattgaagaaggcggttatgtaagcgaaggaaacaagggtgctttcgaaagcaagaaaccttccggtacgatcacagtagcaggctcttcttctgtggctccgattatggaaaaactgaaggaagcgtatgctgaattcaacccggatgccaagatcgaagtgcagcagaacgattcttcttccggcatctccgctgcggccagcggcacatgcgacatcggaatggcttccagagaacttaaggacgacgaactcagccagggccttacaccgctgagaatcgcaatggacggtatcgcagtaatcgtcaataagaattgcgctgcggaagatctcacgagtgatcagatcaagtccattttcacaggaaaaacgacaaactggggcgatattctcgcttaagcctctctgccggcgggagccggcttcacataccggtgcggctttccaaaaaaggcggccggaacagttttacaagtttgcgaatagaattggaggggcggatcgtgcagtaacatattattctgcggtccgcccctctgctgtgtgtaacattatcgagtacaggagtaaaaatgaaacagttgaaagaaatttttatgaaagtcgtattcttaatctcggcctgtgcttctatcctggcgatattgctcatctgttttttcttattttccaacggcattccggcgatgtcggagatcggattcgggaattttctcttaggggatgaatggagaccgctgaacggtgaattcggaatttttcctatgattatcggcagtttatatgtgacagcgggagccatcatcgtcggtgtgcccatcggtctgctgtgcgctatgtttatggcgcgtttctgcccgaaacggctttacagcgtgctgaaacccgccatcgatctcatggcgggaatcccttccatcgtctacggtttcttcggtatcctggtcatcgtaccggcggtccacaatctcttcggcaccagcggaaagggactgctcacggcgtccctgctcctgggaatgatgatattgcctacgattatcggagtctgtgagacacagattcgctccgttccggaacagtactacgaaggctccctggctctgggcgccacccatgagcgcagtgtgtttttcgtcttgcttccggcggcgaagtcaggtgttttggcgggaatcattctgggtatcggccgcgccatcggagagaccatggcggtcatcatgatcgcggggaatcagccgattataccggagagcatcaccagcggcgtacgtacgatgacggccaatatcgtgctggagatggggtatgcagagggtcttcacaaagaggcgctgatcgctaccggcgtagttctcttcgtatttatactg

SEQ ID NO: 2569 - DNA, 6379 bp, Unknown
  16S sequences of unknown bacteria
atgcccgggccgtcatttattgtatatctctgtatattaaaaattattccctgctccaaaattcacctcatatgcaagacttcaaaccaacaatacgataaccgatctctatatattttaacccacacaactgttaaaagcaacaaagacaaaaaatcatttaatctgtaatagccgccggacaacacacaacatctcctgttttacttattcaccaaacttgtttgttcaagttgtacaaacaagtttaaattcttggcaaaataaaaaccccaatgcataaacaccggggtttttgagtctttgtaaagagtatcctcgctgggataggtctctgagccgtaaaacaccacgcttcgctgtgcttctggcaggggaccttcctgcagctcgttcctcgctgggataggtctccctatctctttgagaactggcttgctcttcttgctttcttgagaccgtatttctttctttctttcattcttgagtctcttgttaagaaaccttcagcttttaaaggtgctctgtagctttctttgtctgctacacagagagctcttgaaataccgtgtcttaaagcgcctgcctgacctgtgaatccaccgcctgttactgttgcgataacgtcgaatttaccctcacagcctgcgatttcaaaaggtctttttacttctctcttaactatttccattccgaaatactcttcaagaggtttcttgtttacagtgatgtttccagttccagggattaatctaactctagcaactgaagactttcttctgcctgttccgtaatactgcatttttgccattgtctattcctccctttccttagaaattccatacttcaggtttctgagccgcatgattgtgatcagggcctgcataaaccttaaacttcttgtacatctgtctgccgagtctgccgttaggcatcattcccttaactgcgtgtctgatgatttcgcaagggtcctttgcctgcaacttttcgaaagtgatttcctttaagccgcccggataaccagtatggtgcttgtagattttcttctgtcttttcttaccagtcacttctatcttctctgcattgattacgattacatagtcaccgcagtcaacatgtggagtatagataggttttttctttcctctaaggatagctgccgcttctgaagcaagtctaccaagagttttgccttctgcatcgataacgtaccatttacgttcaacttctgcaggttttgcgataaatgatttcatctttgttcctttctacctactgggatacatcgcgcgtatctgtttcggttctgcctactgggttgaagctgtgctccagcttgttcggcattactaatttttattagcggatagcccgtatatacagtcgctatctcttctgttcatataactgcactataaaatagtgccatgcatatgacacagcaccattctatctcatttttcaccttatgtcaaatattttttcaccttaatcaggtcgtttcgccttatttttctttggttctctgtcagttttacttaatcattccggcgagcttgttcatagcttttgtttcatctgccatgtcggcttcaaggcaggcggtctgatctttaaccgctttcttgtaaattgctatttcatctgagaaatcaacttttttgcctgcttctatgtcagccatcttgccgaatatgccatacagcgctttgtaggtattctctgtatattcaaagcctctgtctgtgttcaataagcgcaatgtttactccattggggtctttgataaaagcaattatccccaccagcgtccttacaggctccatagtaatctcaacgccctttgctttcatagtctcaagagttttttcgagattttcaacctcaactcccatagagtaaaggcctgtttcaaagtcactgctttctatgagctctatcatggccccgccgccgtcaagtattgcaatctccgagccgtttggcagattatatacctcctgcaccttaaatcccattacattctcataaaaatctacagagtctttcatattgtctgcaatcattgtggtgtatctgactttcatactgattctccccgtatattattccattgcaagcgctataagtctgtctaaaagctgcggatacggcacacctgccgcctcccacatcttcggatacatactgattgacgtaaatcccggcagagtattaagctcgtttaatatgatgcggttgtcttcggtaaggaaaaagtctattcttgacatgcctttgcagcccatagccttgaacactctgactgctgtctctttaatctgctgctcaagctcaggcgatatatcgtctataattcctgttctggagccgatatccgcatattttgcctcatagtcataaaactcattgcaggagaatatctctcctatctttgcaacctcaggattgtcatttccaagcaccgccgtttctatttctctgcctactatggtttcctcgacaaggattttttcatcatagcctgccgcctctgccagccctctgcctagctctgctctgtcgtgaaccttggatatgcccactgaggagccttcgtttgccggctttataaacagaggatatctattgaaatacgcttcaactctgtcaagcgtcgcagtctcgtctgctttgagctcgcttgccgtaaccagaacatagtcagcctgattaattcccgcagctccggctatgagcttggttatagctttgtccatactgcatgccgaagccgcaactccgggtcccacataaggtatgcctgaaagctctaaaagcccctgcagcactccgtcctcgcagttcttgccgtgaacgacagggtatatgcagtcaattctgatgctttcggtttctctttcctttaacagcagcagtccgcggcagcctctgtcgggtgatataaccgcgcttatattgtccttgcggtctgcccatctgccgtcctttatctgcgcggtatctgccatggtcagaaaccatctgccgtcttttgtaattcctattttgtatatctcatatttgtctttgtcaaggttatcaagtaccgatgatgcagatacgcaggaaacctcatactctgatgaaacgcctccaaacagcactgcaagtcttattttgttcatatctaacactcctcacttaaaatatgtatttattttagcacattatattcagtaaaaaaagtaccgcaagaggtaatacacaaaaaaacaaaacccgctgcggtctgcagcggattaagcctgagttttcaatatgtataatcctatttttccagttcaaaggttttcacaactttatccccgttgccaagaaactcttcaacctcaacatctacaggcgatgtagtgttttcaagctcctttgtaacaataatttctattgttctgccgggtttaatctgcttggaggtatcatcgtccatacaatcaaacgattcttcatcagtatacacagatgttgtgtccagctctacaccgtcctgaaaagcatcacacatcatagcgacatcaaagcttgccgcttcatcactgttgtttgtaaagtcaatacttactgctatggtatctttaccgtcatagtttttaaccagctcgtaatctttaatagccacttcgtagttaccaagcgctccgttatcagacggagctttttcctccggttcagtctcacctccgcaacctgcaaaggcaaacattacaacagctgttaataatattacaagtaccctcttcattatctttgttctccttctcctatcctctgttcttttttacggcatacaatagttccgattataaatacggctccaaaggctatacacagaacaccccatataacaaggtcgctgtagcttcctgcacaggcagcgccgataattcctcctgccagataaaagcctccggcaacaaacgaacctgctccattacggtttcttgtaactattgcaactatacctgctacaatgcagcatatggcaaggataacgcctgcgctaccgcctgcttcgccgttattttcaagtgcatttcctattcccgccgcgcacgactgaaacagtacaaatgcagacaatataaaagagataattcctagaatgagttttaatgttttcataaacactgtcctttctgtttttgttttatcatagtatattttctgtaatttttgtcgtgctgccggcacgattttaatttctatacctgcaagggttctattccatgctcctcaagatatatattaagtctgagtatatcctttgttccgcgcaaagcagcagaagcaattctgacatctctttcatctctcggattaagcacgcaaaatccggcaactgccagcgaatactgaatatggtcaatatccataccggctcctatgcacagagctatcaccttatctcttccgggcttttttcttgtcccatttatgatgttgtagccgtaatttctgttaattccgctgtttttcataacatcagccactgcaatattgttttggtgcatatattccctcagatattgcgaaaaggtcctgctgcggtgtggatacacatacttttctatgtatttttcctcatcatcaaagcttctgatttttttaatctccgaaatcagacagcaataagttttatcatttaattcccattctttcatataataaattttactcattattatatgcttttgttgtgctcaaagcacgaatatatttcctcacgaaaaaagacagccggggtttggtcccgactgccttgtctgccttatttaagctatttttctttgttgtttttgagtatcattctcttgtatttgcttgagtatgtccagtattttgaactcaatgccgggcaattcttggctgtgattgaagaaaccttggttgcctttgcaagccatggtttccatgtaaagtctgctgcgccgtatgccttgcctgatgtcttatagtagttgttgtaaatgtttctcttcataacatcaaatccgccgctgtagaagcctataagctgacccttgaagagtttactgctgctgtttcctccaaccttgcctgtggaatagttgcctttgacatagccacctataactgtggcagttgctgcaaggccgcctgcattacctgtacccttatgagtaacagcgcctgtgttatagcagtttctcatatcagcgcaaaaacctgcgatgccgcctgcatctgctttgattttgctgtttaccgaaaccttacccttgttgtaagtctgttcagccttagctgcggagcatacaactcctgcaacagtaacaatatcaataccgccggcaggtttgcctgtatatgaaatcgcgccgctgttactgcactttgaaacctttgtgccgatgtgggctgcttcacaagctataccggcagcttccgctccgcgattgccgcttgcattattgtttatgcttatggtagctgtatttgagcaggatactatatttgcatccgaaattacagctatgcccgccgcctttggcgcgaatccataggcttcagttgcctttgttcctgttatagaaattttaccgctgtttttacagcctgaaattgccttggtgccatagtaggctccaactatacctgcagcctcgcactcactgcttccccagtccttatcaggagtatgagtcagagcaatcttacctttattggtgcattttgttacagagcctttgcctacaatgcctgcaattcctgaagcagtcggagcgctctgacctttatgcgtaagctctatatcaatactgttagcgcagtttttaatggttccggaggctgactcatacgccacaattcctacagcattgcagcaatcgtcatcttcggtacctcggttctttattttgatgctgcctgatgttttaatgttttcaaatttaccgttctttgagttttcaacaagtcccgcagcgtttccgccgcctgtcatattaatatccaccgatatgctcaggtttttaaaggttgctccttcggtatttccaaacagcgctacgtccgctacatatcttgcagctgtatacttatacgtaatcttgtgactgttgccgtcaagtgttcccttgaacgggtttttgcggtccttgaacagctgtatattacctgtcacctctatatcatttttaagataatagctgcctgacggattattttccattttctttaaatcatctgctgttgatatggcagttccgcttgttgccgcatctgcagcatacagtcccgggcctgccggaatggcaaacgcaacagcaagtgctaagaaaacagttaatattctgctttttctcatgataagccg

SEQ ID NO: 2570 - DNA, 4524 bp, Unknown
  16S sequences of unknown bacteria
ccttgcgtagttccggctttaccatgaaccagctcgccaccgttatctgtgcatccggcgccctttttaaaatttcttcccgaattgcagaaccaattacctgctggtgtacaatcagcacctttttcctatgataatccatgtcagagatcaactcatccaccagcggatatccaacctcataaggtgttccataggttcgttccagatattttgccacctccagggctgccggagataccacaatatgtctctccacattggaaaccttcttcacagcccccagtccgtctcccattccataacagacagctgtctttccttcctctgcaaaacgtttcctgatacgatctgcagcatgcagatcactgatatcctgcggtgtcataccaaggatcccgaccctgcccggaatcacatcttccttttcacctgcaaatacataaaacagttccagccatgctttttcttcgcctttatcatacagttccatgccatccgtatccacagtcatgatcggcagatccacctttttctctgtcatacgctttaatgcatgataatcggttccgatcacggcaggaaccggtgttccgatgatcgccgcaaattttgcatccagctttgtggctgcatctgcaagctttgccaccagtctgtcatcccggccaagaatcgcatccatatcacgaagtcccgcactgaacagagcacttttgctctcaaaccaccgcggctcatcaaatccacagatatttccggtacagccaccggcatcacaaatcacgataatcccgccaaattcataaaatacagatactgcgccggactgatccggtgcaaaaggtgtcaggaattttctaagtcctctcattgtatgatacctccgccaatgcctcaaacagtctgcgcacccccgcgtaaccaaagggctgttgttcctcattccatcgcacattcggacattctttatgataatatcccgcatcttttccaatggtcagattgacccctgactgaattccgtcataatacagcatagttggttccagattggaaaatacttttgtctctggacttattttcgccagctgttttacatagacaaaattttctcctgataaagttccatagatctctggcacacggaatccgtagtgaaccagcgcaagtgccagttcaaatggatctgcgttcatccactctccaacggcaaaggatgcatcaggatgcagttcccggaattttatgatagcatcctccgctgccttacgcggtgctttatcatcgaactgtactcccagtgccgccccaaaagcttgatactggctggcaattttgtcagtctgataaagtcttctaagctcgatatagggaattttcaaccggtcatgaaaatcttctgctgcgaatcgtgcttccgggtgcaataccagattaaaatttgcttctgccatagtctgatattctgcgtaatccctgcacctggagatctcatgaatggttttcacacccgctccgtggagtaactcatacagctcacaatcgtcaatcagcggcgaaaaatatcccagcagatttaccacatttccttttttcttcttcggttccagtagagaatagatggactgacgtacatgcaccatgggtggcttcctgccctctctggtcaatgcatacatataacagggtctcactggaattccaacagactcctctgccttatgacagacgcgctccatatccgtgccaagcagtgcatccacgcaggtgatacagatcattacgaccgatggctttttctccagaccttcacagatctccgccacagccttcgggatctttttcaaatgtcttcctgtcacaatatccgtctcgtccatcagcagataataaaaccggtcatgatatgcctgcatggaactgagaactgacgtattgcgtccacagcatcccggagatacgatcagcataatggaatctggcactgccagtcctgctcgtttgacaccaaatccttcggctcccggcgagttgaatgccagcgtagctggagaactgtagatcagatgcgtatgagatatcaactgctgcggaatgttattttttcccagctcatccagctcttttactgtacaaaaataagcttcctgtctcatgcaccttcctcttctttccacagcagtgccgcaaggtcaaagaaacatttactgatcctggaagttggatctccttcgatcaccgtctttccctgctcttcccagtggatgatctcatcacttcgtggcacctctcccacgatgggcactccgatcttctctgaaaatgcctgtactttctctgtctcgttttctacatttctgtgatttaacacgattccaaatacccgggcataactgcgatcctcaaagtttcgaactgcactggaaatattattggcggcatacaatgccattttctccccggacgtaacgatcaggactttatccgcatatccttcacgaataggtgctgcaaatccgccacataccacatcacccaagacatcatacaaaaccacatctggtttataatgttcaaataattccatatcttccaacaactgaaatgttgcaataatgcctcgccccgcgcagccaagtcccggtgtcgggcctccggtctcaatacagaggattcccccataaccctctttggaaatctgcgaaagatcatctggctcctcatcttcttctctcatataattcatcaccgggcgaagcggctcacctccaagtaaattgatggtagaatctgctttcggatcacacccgatctgaataacacgtttccccatggtggcaaatgccgccgtcagattcgaagttaccgtagattttccgattccaccctttccatatactgctacctttaacatgttcccctcctgttatttttctacacaaaaagaaccactttcccggcagttcgtcagaaaaatggttctgtaaaatcttatttcgcaactattcctgctcggatcatccttgccgtcagagttctcttattcatttttgccatcttgtctttttcaccaaatactctgtagatgtgtgaatcagatatagtaatttcattgattattttatcatcttagatacggattatcaagggaatatgtttttactctaatggcaaacaatcacatcgtccataacatctaacgatgttccatatgcaaggttcagtgctcctgactggtcaaatgagagttcatagcaatcgtcatatccatctctttcgattttgaaaataatcgtatcttctgtataaccatatacatcaagatctgataagattcctccgcccgtgacccagaccgtccaactgcttcctttcactccataatcacagtcttcagatttagcaacaccaacacatgcaccacggctttcgtcaaagatccattgcccttcaaactttgcaaaaacatcatccaaattaagattacttgcatccagactcttctgaatctcaagcggaatcgagaaagattcctttcttacatcagccagatatccggcaaggatgtatgctctcgcacgagttatttcctctgcgacggtattttccaactgcggctgaaggcttccaccattaacctccattccggcaccttttacacgtgcttctttttgcttgatccatgcccgctgttcttccagcacctttgctttcgtttccgcatccagttcatcgctcaatctgctccataaggaattcagttcatcatcccagagctgataccactgtgctgtggtctgattcatgtccgcttgccccatgctgctccagtcagcattttcatatccgatggactgctcctctatctttgcaagctccttctgaatatcaccaacctcatcagtctcttttgtttcagtgtcagtctttgcatcttctccatcttcaatctctgtattctctgtagactggggctgtatctgctcctgctgttccttctcttgttttggttcctcttttgcactgcatccactgcagaaaagcatgatcataattccaaataatactactcttttcatttgtgattcattctctccctgatatcctgaaatactccatatcccagaaataaaattccaactactaatgctacggtcgcagccatcagcagaagtggcccctcatactccagacctgctgcaaacagtcccgcattccaggatgttacatggctcataaagattgctgccgtcagataatatactgaaattaaaatcgcagatatcagacagaaaattgcaccaattcctttattgttcatgttttagttcctcctttatcctctgactctcctgttctcattataccacatcctgtaccattcatccttcgtcatatcatcaccacaaatcgtatggtttcatggtttctgaatttcgatattcatgtttctcataatatcctatcagcttaccctcatctctgagtgccaccatgtaaacatctttattctgtttctca

SEQ ID NO: 2571 - DNA, 10303 bp, Unknown
  16S sequences of unknown bacteria
agagtgtatcggaaattgtccgcacatccccgtgggtatcgtctcatgttggcacgaggggccgtgggtatcgtgccacttacgcctccacgcacctccatgcgcttgcacgaagaagcgggctgcacctttggggagattccccggggtgcagcccgctttgcgttgtccgccctgccgcggcgtctagccggcgatgcggcgccggtcgatcttgcgcgcggtgaagtctcccacgctctggaagacctgcacgaggatgacgcacaggatgaccgcggccagcatgacgtctgcctgccagcgccgacggtgcccgccatggcggagtagccgaagaggttcacgaacgtgatggccacgccgcgcacgatggagggcagcgcctctttgagcagcaccttgtagacaatctggaagctgctcgcgccaaagctctgcgccgcctcgaccaggctcgggtcgacctcggcgatagactgctcgacgatgcgcgccacaaagggagcggcggagacgacgagcgggacgatggcgcccggcacgccgagcgacgtgcccacgatcaggcgcgtgaacgggatgatcgcgacgagcaggatgacgaacgggatcgagcggccgatgttgatgatccacccgaggaccgtgttgagccagcggatgggatgcagcccgttgggcgtggtcaccgcgaaggcaacgccgacgggcaggccgatcacataggcgaacaggcacgagacaacggtcatgacgagcgtgtcgatagtgccctgggccaaaagcccgccgtattcggcaaagaactcggataggtactccattactgctcctcccccttctcggcatcgagcaggccttcttgccccgcgctgacagaaatcgtggagctgacctcgtggtgcgcgagcagctccctggcgatgtcgctttgcggattggagaagacctcatgcgtcgtgccctgctcgacgatgcgaccgccgtcgatcatcgcgacgcggtcgcagatctcttctgcgacggacagcgcgtgcgtgatgacgacgagcgtgacgcccatgcgctcgttgatgtctttgagcaggccgaggatctggatggtcgtgcgcgagtcgagcgccgaggtcgcctcgtcgcacagcatgacctccggacggttgatgagcgcacgcgcgatggcaacgcgctgctgctggccaccggaaagctcgcttgggtagcgggactcctttcccgaaagcccgacgagctcgatgaggttcttggcgcgctcgatgcgctcggcgcggtcgacaccctgtagttcgagcgggaacgtgacgttttgcatgacggtacgctgctggaacaggctgaagttctggaagatcatgtcgatcttggtgcgcagcttgcgcaggtcgcgtcccgtgtagttggtcacgtcgacgccgtcgatgatgacctgaccctcggtggggcgctcgagcaggttgatgcagcgcacgagcgtggacttgcccgctccggattcgcccaggatgccgaagacctcgcccttcttgatggacaagttgatgtcgtcgagtgccacgacatcgccctcgcgcgtgctgtacaccttcttcaagttcttgatttcgatcatttctaccttcttacatgcaacagtgcggagcgctgcacgccccgcactgcccagcagcctgtatggtgctgactgtctagaaaactggcttgacggctccgtcgtacgtgttgttgatgtagtcgcgcacctcgtcggagttcagagcggcggcgagcgccttgatcttgtcggaatcctggttgccgtctttgacgacgagcaggttggcgtaggtctgagccgcggtgccgttggcatcctcggttgcgagcgcgtccttgttgacgttcagaccggcctgcagggcgtagttggagttgatggccgcgatgtcgacgtcctgcagcgactgggacacttgcgctgcctcgagctccctgaactgaaggttcttggggttggacacgatatccttggtggtcgccgtcaccccgacgccgtccttgagcttgatcaggccctcctgctcgagcagcagcagcgcacgggcctcgttggtggtgtcgttgggaacggccacgatggcgccgtctttaaggtcggcaagcgacttggtcttgccggcgtacagcccgaacggctcgtagtgcacggccgtgaccttcaccaggtgcgtgccgttctcggcgttgaagttgtcgaggtagggctcgtgctggaagtagttggcgtcgacgtcgccttgctcggtgacggtgttgggctgcacgtagtcgttgaactccttgacctcgagcgtgtagccctccttctccaagatgggcttgaccacgtcgttgaggatctctgcatgcggcgtgggcacggcggcgacggtgaccgtcttgtccccgctcgccccgttggagccggactgctggctgccgccgccgaccaggccaatagcgccgacgagggcgaggctgcacgccgcagcgacgatgagcttcttagatggtttcttgagtttcatggttctcccctagacaggttgtttcgaatacgtcgtggtagtgctgggatcgcgccgctcgtgcgcagcgcgggcacagaggcggtgcccagccatggccgccctacgcccatgcattcgggcgatgccgcccaggctcctcgtcagttgcaccgttacctcctttgccggtcgggccccacagggcactcgattttgccgatatgtgcgtaacagccctcacgatgccgagtcatgcagttgagctgctgcgacgcaacgggtgagcagattacgggagaacgatttgggcttcaaggggtttggtgatgggagaatttcacgtctggccatcgatatagtcaatgggatgtgacaagccagtgcaacacgcactctacctgcgttttacctgtatttctacgcctttgcgcgtaggcaatgagcctgatattccatcatttcataatatctatggccagctacaagatatgcagaggaacaattcgagcccggcccgacataatcgtgtctgaacatttgccacagagcgcaggaacagactgcgtgaaacaagaggaggaacccatgaccatcaatgttgaggagctgcgcaacgcgccgatcgccgtgctcggcggtggtgcagttggcaagacctgcgcagcagattgcgcgcttgccggccaggaggtgcgcatctgcgacctcgacccattcttcgagagcacgctcggcaacgtggacaagaccggcgtgaccatcggccccaagctgcccggtacccagaccaagtacggtttcgagcgctggggcaaggccaagttcgcgcttgccaccaacagcgttgccgaagccgtcaagggcgccaagctcatcatcgtcggcatcccgagcgtcgcgcacgagaccttcttcaaggagctcatcccctacctcgaagacggccagatcatccacatcatccccgacaactacggcagcctcgagctccgcaagatgatgagggaggccggctgcgacaagaaggtcatcatcggcggctggtcgagcgcgccatatggcacccgcgtcgacaccgagggcggcgtgcccaacgcgcacgtctcgctcgtctaccgcgccatcacgctgcgcggcgccgcgctgcccatgaccgaccaggaagacttcctcgagagctccaaggcgctcggctgctttgacgcaatcacccaaggcgacggcgtgacgagcggcggaaccgtgctcgacatcgggttctccaacgtcaacccggtcattcacgtccccggcacgctgctcggcgtctccacgatggagaacttctccaccgtgctgcgcagcaacatccacgactactcaatctacagccactccttctgcccgtccatctccgaggtgcagtaccagttctacaacgaagaaatcgcgctggccaaggccatcggcgtcggcatccaggagttcaagaaagaggtcttcttccagcgcacgagcgttttgggcgaggagtacatgggcgagggctgcaacgtcccgttcgaggaagagtgggaagtcggctacggcaccggcccgttcaccatcaagaaccgctacgtcaccgaggatgtcccggtcggctgccatgtgtaccacgagcttggcaagaagtttggcgtcccgactcccatcatcgactcgatgatcgtcctgggcggcgtcatgaaccacaccaactacttcgagacgggcatgacgctcgagcacctgggcatcgcgcacctcaccaaggagcagctgctcgcctacctcaacgacggcacctacgtcgaggcgtaggagagcgcgcatgacctggcaggcaccccttgccgacgaggccggcaggcacggcagctttaccgtgcctgcccacttcacctccgggcagacaatcggcatcgtgaccgtcgacctggactatcccaagctgcccggcaacgtcgccaacgcgacgacttttggctaccccgtgcgctacgagaaagtcgagttcgagatcgagcggctcttcgcgggagatccttcaatcgaggggctcgtcatcgacgccgcaagaaagctcgagcgcgagggcgtgcgcgccatcgttggcgcatgtggcttcttcgcgcacttccaggacagcgtggccgccgccgtcgacgtgcccgtgttcatgtcgagcctcgtgcaggtgccgctcatcgaagtcgggctcaagcccgggcagaagatcgccgtgctggcagccgacggggcaagcgtgacccccgagctgctcgcacacgtcaacgcgcgccccgaccgcctcatcgtgagagacatcggaagcctcgagagctttgcccccatccgctggggcaagacgacgctcgacaacggcgcgctcatcgccgacctgcagcaagtcgcgacgtcgcttgtcgcagagcacccggaaatcggggccttcctgctagaatgcagcgacttgccgccgtacgccgcggatatccaggcggcaacggggcttcccgtgttcgacttcatcacgctcatcgactgggtacaccaaagcgtcgcccagcgcccctactacggctggctctagccgcgctcgatcgtgccgagcttttcgataagcttcgtgtagatgcgttcgcgtatccagggctcggtcgacagcgcgatcgcatcttgcaggggcacccatttcaccccgctgttctcgtccggttttatgcggatcggctcggcggggtctgccaccgcaaggtaggtcacgttgaggtgcagatgcgaccccacgtaggagccgcgcttgacgtgcccgtccacggtgagcacctcgagcgagtagatgccgcaatcgaccagctgcgcgtgctcgacgccggtctcttcggccagctcgcgcagcgccacggcggcaaggtcgcgctccccgtccgcatgcccgccaatccacgaccacgaatcgtagatgttgtggtagacgagcagggtccgcgtaaacgtggggtcaaccgtccagatggagcaggccatatgcgcaagcgaagaccgctcgaagcaatcggggttctcgcgcatgtacgcgaggatgacctgcttgtcgacttcctcctgctcgttgaacggctcataggccgcaatatcatcgaaaagcgacatcgatttcgccttgccctttcttccccacggtaaccagggttgccaaaccccgctgcatcgcggatcacctgcccctcgcaacgcccctcatgacaagccggtcaggctttgaccatatcgctgacaaaacggagaggcactgaccatttttggccaatgcctctccagtctgtcacgtatacggccaatgccttgccggtctgtcagcggcgcgtacgatcggcgcctctcggcagcgtcaagccacgcacgttctgccttcgtccctagccgcggcgctcggcaatctctgccgtgatgtccttgatgaaatcggccagttcggcggggtgcgtctcgttggaacggtcgcgcacgctgatgttgccggcttccttttcctgctcgcccaagatgagcatgtaggggacgcggtcgacgctgcgcgcctcgcgaatcttgtagccgatcttctcgtcgcgcgcatcgaccgtcgcgcggataccggcatcgagcagcgcctggccgacggtgttggcgtagtcgacgctcttctcggagaccggaaggaccttgacctgcgtcggagcgagccacgtggggaacttgccctcgtactgctccgtcagcatgccgatgaagcgctcgaacgagccaaaaccggcgcgatggatcatgatcgggcgctgcttgctgccatcaggggcagtgtactcgagctcgaagttgcgcggcagctggaagtcgagctgaaccgtgccgcactgccaggtgcggcccaggcagtcgcgcagatggaagtcaatcttagggccatagaaggcgccatcgccctcgttgagcttgtagtccatgtgcatgaagtcaagcgcctcgcgcagggcgttttccgcatgctcccattcctcgtcggtacccatggagtcctcggggcgcgtggaaagctcgaccttgtacgggaagccgaactgcttgtagtacgaggtgatcaggtcgacggtcttggagacctcttcggtgatctggtcggggcggatgaacaggtgcgcgtcgtcctgcgtgaaggcgcggacgcggaacaggccgtgcagcgcgccgtgcagctcgtggcggtggtcatggccggcctcggcgaggcgcagcggcaggtcgcggtacgagcgcggcttgctcttgtagataaggcatgcacccgggcagttcatcggcttgatggcgaactcttcgtcgtcgatggtggtcgtgtacatgttctctttgtagtggtcccagtgaccggaggtctcccacaggctgcgcgaaagcatggtgggcgtctcgacctgctcgtagccgaacttggtctgcatctcctgccagtagcgcatgagggagttcttgaggcgcatgccgttggggagccagaacgggaagcccgggccctcttcggtgagcatgaagaggtccatctccttgccgatcttgcggtggtcgcgcttttccgcctcggcaatgagcttctcgtagtcggcgagctcggccttggtgcggaaggcggtaccgctgatgcgggtcagcatggtgttgttgctgtcggccttccagtaggcaccggagacggcgctcagcttgaacgccttgagcgccttggtgtaggtgaggtgcgggccgacgcacatgtcgacgtactcgccttgcttgtagaaggtgatgcgcgcgtcttcgggcaggtcggcgatgtgctcgaccttgtacttctcgccgcgctcctccatgaacttgacggcctcctcgcgcgggagctcgaaggtctcgatcttgaggttctctttggtgatctttttcatctcagcttcgatggccgggaggtcttccacagacaccttcgcgtcaccgaggtcgatgtcatagtaaaagccgttctcggttgccgggccgtacccgaacatggcctgcgggtacaggcgctcgaccgcctgggcaagaatatgtgctgcggtatgtcggatgacgtggagttcttcttcctccgggcattcgtcgacatgaccatcgttatagagaaccttcaacgagatactcctttgttgccggtgctaatagttgtcagaagactacaccattaccccgcgcttgtgcggggattatcggggttttcgaacagcctgcgcactcttttggacaggacatgaaaagagggccacgagcacgtgcccgcggccctctctcgtgcatgttgcgcgagccgccgctccgcgcgggagcgaggcgtcgcaatgcagcctagtgcgtgaactcgcccatcgcatggtcgatctcccacagcttgtcggccgtgggcttccactccttggcgtacttgtcgcaacgcgagcacagcagctcgaccgtctcgtcgccctcgaggttggaggaatgcgcgcccgtgcgcttgatcatgtcgcgcagggcctgggggttctcgagcatcgggcacggcctgagcatgttgtcgttgaacggctggccatcgtggtatgccatgaacagcggcgcctgcaggccctcgagcagcgtgtgctcgtggatgttcgtgtcgctgaagtggatgaacacgcacgggtccatgtcgccgttggcgttgatgtgcaggtagcggcgcccgccggcgatgcagccctgcacgtactggccgtcgttctggaagtccatcgggaagatggccttggtgacgcggtactcgcggaccttgtggtacatctcctcacgctgctcgggcgtgaccatgagctcgatgttcgcatccgagccgaccggcatgtagtggaagtaccagacgaacagcgcaccccagtcgatgagctggtcgatgtactcggggctcgagaccgcctcgtagttttcggaggtgtagcagcaggagatgccgaagggcaggccgttttccttgagcaggttcatcgcgtgctcgatcttgtcgtacacgctgtagttgacgcccacgctgcggcggaagtcggtggtctccttgctgccttcctggctgatggccgggatgaagttcttcacgcgcagcaggtcctggcagaactgctcgtcgatgagcgtcgcgttggtgaagcacaggaagatgcagtcgtcgtgcttctcgcacagcttgatgaggtcgtccttgcggaccagcggctcgccgcccgtgtagatatacatgtagacgccgagctctttgccctgctcgatgatggagtcgatgtcctcgtagctcaggttgagcctgttgccgtagtcggcagcccagcagcccttgcaatgcaggttgcaggcgctggtcgggtcgagcaggatggcccaggggatgttgcactggtacttggcgcgcagctcgttttgctttgcccagcccttgacgttgacgttgaagtagaagttcatcaagacgttgtcgaggacgtctgggttgatctggttgagcgcgcgcatgacgagctggtagacgtttttgtcaggaccagacatgtactcgttgataatcttgagctgcgagggaagcagctttttgccgaccatgttgatgattttgagaaggcgcgggattgccttttcggggttcgagtggagcatcttgaggaccgacttgatacccagatcggtaagttcttccttgaccataattacacctcgtcttctgtgcgatagtgcgtaacagccagggccgatcatgccctgacaacgattactatcctgtaacggctctatttgcgactgatgttattcctaaattcgataacgctcaacttcacaagttgtacacatataattttgcgcattaaattttttcatactagtctgcaaaaagattaataattagttactatgcctagactaaatagatatgcagtctaaataaatagacacaaataatttgtttgcctagtttaagaaggcacccatgccacgcccgaaatacaagaaaaacgagaaaacggccgtcgagaaaatcgaagacgcgttctggaagctcctcgaaacgacgcgctattcctgcatcaccgtcgcgcaggtcgtgaagctcgcaggactcaaccgcaacagcttctactaccacttcgagaacatggacgacctggcccacaccgccgtgacagacaccatgaacccggcggccatcagcgtgatggtcgacgcgatgaacggaaaagaagacctctcggtcacgcgcaccccggagttcaagcagagcgtcgagcggttctgcctcatcgccggcaagaacagcagttacgggttgcgcacgatgctcaccgacgcgctcgaacaggcatggtgcaagatcgtccacgtcgaccccgccaagttcaccaagaaggataaggtaatcgtcagctacctgctcggcgggaccttgtcggtgttcgcgtactgcgcagacaacaacatcgaagtgccgatggaagaaatcttgcattcggggttgtccaagcgcgtgcacgagacgcttctcgagatagcggccgagcaaaacgccgtagcctagcggccgctgacgggcagacgacgggcccccgcccgctcccccgcgcgctcctccgcgcgaaaaacgtggcagtgccacgcttctcgtgcacaaaacgtgggatgtgtggcagtgccacgcttctcgc

SEQ ID NO: 2572 - DNA, 7932 bp, Unknown
  16S sequences of unknown bacteria
cttacatgggcattgtgcgaaggaaccttttttatgccttgaatcagatgatttcaaaagagtcatcaacgctgatcctaaagaaaaaagccattctatgcagaatggctttttggaagggaatataagcacatgcttgcttataaaagcgctttctttacaagcgccaaattgtctcggatcttgatatgctgtggacaaaccgattcgcattttccgcattgaatgcattgatccgcttgctttttgccatggccgccaaccaaccaattttcttgatgagcagcggcggctttgtcaccataaagcgtcagataattcatcgcggtaaacgaaccagagatgccgatgttttgaggacataccttagcgcaatagttacatgttgtacaggggatcagcggaatttttgcaagctcctcttgtgctttggatagcgtggcttgctgagccggcgtcaacccatgaaaatctttcatataggatatattatcctgcatctgagctacgctactcataccagataaaacggtgatgatgccgtctaaactggcggcaaaacggatggcccaagaagccgctgaggagtctggctcagcttggttcaacacctgtaaaacggatgcgggcggcgttgccagcataccgccttttacgggctccatgatgataacaggcttgttaaattttcgtgctacctcgtagcattttttggattgaacggcagggttttcccagtccgcatagttgatttgtagctgcacaaactccatttccggatgagccagcaatattccttccagctcttcaggcgtagagtggaaggagaagccgatatgcttaatcaacccttcttgctttttctgttgaacccaagcccacatgtcaaagtcgtcaaaaaaacgtgtacggctttcgccgaggttgtgcaataaataaaaatcaaaatagcctgcgcggtacgtttaagagatgtttcaaactgatcgatagcgtcttcctttgttttgcagttgatccaggctgcgtttttggtggcaagctgatagctttgccggggataacgctctaccaacgcttggcggatagcgtcttcactgcccgcgtaggcccaggcggtatcaaaataggtaaagcctgcttttataaaaagatcaaccatttgttttgtctgttctatgtcgatgacatcgttctgttgaggcaagcgcatcaggccaaagcccagttttttaatgtcttcacccaaatatgacaaaaaaatccctcctatccactcatactttggcggcaaagtctgccaaagcctgtgccgaggcatgatttaacatctgtccgggcagccatttggttgttttgtcgcaacaaggcttcaaggattctatggttttgccgaacccactgccgccagaagtggcgaagggaacgatggttttgttcgaaaaatcatagctttccaaaaaggtatggatgatggtgggtgctgtgtaccaccaaatggggaagcccaagaaaataacgtcataatcggccatcgtgctcagcgtttcagcaatgttaggacgagaatgcggatcgttcatttccacggagccgcggctatgcgtatccctccagtttagatctgcatcggtatagggaaccgcgggcctgatttcaaacagatcagcgccagctacttgggatagctgctcggctaccttctttgtaacgccgcttgcagaaaaataagcaacaagttttttagacatatttgctccctccttatgttaagctaaaataatgctcgtctgtgacaggctccagccattggttttctgtttgctccccaggaacctccacagcgatgtggctgaaccaggaatcggccttggcgccatgccaatgctttacattggcggggatggggatcaccatgcctggacaaaggctgatggcttgttttccgtattcctgataccaaccttctccggccgtacagatgaggatctgccctccgccgctattggcgcggtggatatgccaatgattgcggcagcccggctcaaacgtcacattggcaagaaaaacagagctggccttaggatctgtcaacggattgagataggattgcccgatgaaaaattgtgcataagcatcgttgggcgatcccaagccaaacacattgtatgaatcaaattgttctttttgttgtattttcattctgtatccctccataaagacttaatttgaattgtttttttcacataccgcgctatttgaatccgcattgttttgagagagcatcagctgataacgcagataatccaaacgatccaactgcttttccttccgatggatctcctcgagaaaatcagcccgccttttttccagcatcgccaggcgccgtcgagaggtttcatatctacactgacatagacgcatgtattcttgagcctcctgagaggaaaagccaagatcgtgcagcgttaaaagcaggctgatttgtgctaggtcctgttcggtataatggtgatgagcactgcacttttggccatccttgttgcctgccaggcatcgttcgtaggcatccaaaaccttggcggagacacaatagcgctctgaaatttcttgtcttgtcatgtgaatgctccttaaaagacgcaacccggccggaacagtaggttggcgcggactgcaaaagggctcttgcccgaaaaaaatagatgcccgttcttcggacatctaaagtataatttgtgattggatgcaaagccaatgcttatttttcatcggttgaaatacggtttatgtatgccttggaaaaatccacaaaagcgcgcagggcaggcgacatcatctgatttttcttccaggccagcaccgtatggctctccagcttgggaagtagcgggatataccgcagcccttcatagtggcagtcaagccgtaagtttagaaagacaccgacaccttggcgtcccatggcggccagattatacggaagattcccgctggcaacgatatgcagctgatcggcatccttgccaaaccaatgcaaaagctcctgcttgatgagatcacggcgtgtaaaaagcagcggcctatcggccaaatcgctgggcgttacctgttttttatccgccaaatcggagtgctcggaaaccaaaataccccattcctcggagatagggctgcgaataaattcatatttagcgacgtccacgggctctaacagaaaccctaaatccaaaagccctctttcgatgcgctctttgatattgtcggaattgccgctgtatatttcgtattggatggcgggatgctgagcctggaaagcggccaagatttctgcaagcaaacggctgttttggtactctccgctaccgatagagatttcgccgcttagctcatcttcctgttttagctcttgcttggttttttctgccaaagagacaagttcttgtgcgcgccgtttcaaaagcaagccttgctcggttaaagtgatgttatggctgtttctggtaaacagtttgaccccaagctctgcctcaagctgcatcatttggcgagaaagagtaggttgcgtaacatggagcaaagcagcagccttggtaatgttttcctctctggcaatggttagaaagtagcttaatacccgaagttccaaaaaagcacctcctatctagtacaccacatttagcggcccatttcaataaggaaaaccgtataaaaatcatagctgtggaaaatcacgaggctgtgtacaaagagatgcacacagccttgtatgtagagcatttcagcggcacaggattcggtctagccttgcacccaggcggctgagtatttcattggaaatggtgcctgcgctttcagccagatcgcccgcagagagggtaagcgtgccggatgtgccgatgagtacggctgtatctcctgcacagacgccgggaatatccgttacgtctatgatggtttggtccatacatattttaccaagaatcggcgctttttgtccgcgaagcagtacatacccgtggccatcggataggctgcgcggtagcccatccgcatacccgatggagagggtcgcgattttcatgggatgatctgctgtacaggaaagaccatagccgacagcttcctgtgtatacagcggctttaccgtggcgacgcgtgccttgagcgataaaaccggccgcaactgacgtgcccaagcgtcagtatccgcccacgtgctcaatatgccatataacgcaatgccgatacgcgcataatctccccccaactccggatagttcaacactccatagcttgccagaagatgggtgcgcgggcagggcacgccgcgctttttcaattcacggagcacggattggaaagccatggactgtaccttggtgaaggctttattgcggggggaaagagattcgtcggcggatagatgtgtaaagatgccgtcaatttgtaaatgctttagggcaaagagcaatgcgatttggtcgatgttttcgctgcgttctcccaagcgatgcatgccggtatctatgccgatatgaacacgaagcttctttccataagtggatagagcctttgcgtattggctgtctactacggtttgggaaagccggtagcgccgcaaaagaaaagcttgcgaaggatgcgtatatccaagaatcaaaatctccccagcaattccatttttgcgaagctctatcccctcactaaggctggcgacgcagaaatgacgcacgcccaagcgatatagctctttacagacaggtacggctccatgcccataggcgttggctttcacagcgggcatcagtttgcaggagcggggcaggcggctttgcaaaaaggcgatgttgtgagccaaggcctggctgtccagctcgatccaggcccgccctttgggagaatagcgctggggccgcggaagaatcaatgcaaggacatacgcagcgccaaaggatacagcggaaacggccaaataatgagctaggctttgatctaccagccagggaagcaaatgcagtgcttttgctaccgctctgataagcacgatgacagccggatgcaggatatagacccaagtggcggcagtgcgggccctttggcaggatggccgctgccaggatagcacaagatgataaagataaagcatcgtgggtagcaggaaaagatacatgctgtcatgccgcggccagcccagatgacgaaggataaaggcttcgcctgccatgccagcaaacgagagacaaagtccgaaaatggctttgggccgctccaggttttttttttgagaaagccatgcgcccaagataagaaagataggcgcaaagaacaggccattgcgcgtataggaaaacacctgaaaaccaccctgatagaaagcatccagcacagggatagaccgagccaaaccgtagtagctgtctcccatcaggccgattaaatagaggaagagggctatggcaagggaattgcgcaggcttagctttcggctcatgagatagacaaggcagaggccgagcaaacaggcaggaaaataccaaagatggtaaaaggtgccgtcgaacaacaacagacgcaaagcgctgcccaaggaaagtgcctcgtaatggccgccatacaaaccgatgggtacatacagcgcaatggccacgagataaagcagagaaagctttgttaaagatttagtgagggcggcccagccgtttgtatctcgataaaagcgggaaacgacaaactgcccagttaccatgaagaagaacgggacggcgaccctggctaaaacgcgggttaaaaagaaatctgcgttagcgctaaaacaggtaaggggcgacgtatggatggcaattacgagaaaagcggctaccaggcgaaatgcatcaagtcccccatagttttgtcttgtttgcatgggtatgtctccattctgttaagataaatccatccgtattgttgccggagatgctgtatgggatcgtgttatcgacttctaggcaggtataagcgcctttgcatggcagatacgaaaccaccacatcctgcccaccccaaaggatggggtaagcggattgtccataacgatactgcttgataaaagaaagatattcttcaaggaccagatgattttgcaccatgattttggcatgtggaaccccaacataacgaaaatgccagggttcatgggcgatgccggtaaggtgttcttttccggctggatagcgctccacaaatccatagtctgccgctttgtcacgaaagatctggcaaatgccgctatatggaaacgcgggacgaataaaatcaatgtgcgcctgtttttgcccaagatctatggcaagaccggtttggtgctcactatggccgggcagggccacatacttttgcgtaaaatccaggccgctatcccggacggaatcatcccatatctgctgctgctcggcgtgcgcccgccagccgctgaccggcacaatgtgttgccatccatggaaagaatccatcaaattggaaagaaggacggcggctcggcgctgcatctggatggtaggatagctttccagcacaggaaccaggggcgtttgcgcatcttcacgatagcctgccgctgcatttaccaagatgaggctgccggtatggatttctttttgtagaagggtcaatgttttcattgtgccaccgcctgttcgatgatacgatccaacacatccgcaagggaatagccggccgccttcatcatgccgggataacggctgtgttcggtaaagccgggaatggtgttgacctcattgaatacgagctgtcctgacggtgttaagaataaatccacccgggcaaaccctgcgcagccaagcgcgcggtaaatccgtttggccgtctgcttgatttcctcggctttggcgtcgctgatgcgtgcaggcacatggatggcggaggagtgtagcgtgtacttttcagtaaagttaaaaaatcctttggaaagctcgatttcgtctatcgctccggtcaaaagggtttccgtgcccaatacagcgcagcccacttcaatgccttgaatgttttcctcaagaatgacctggttatcataaagaaaagcaccatcgatggccttggagagctgatctggggactccacccgagtgataccaaaggaagatccggcttttaccggttttacatacattgggtacccaaccttttcggcaaaagccacggcctgctgcaatgtgtagcccgattccaggacaagcccctggggcacgcgcacgcctgccagggagaccaatttatgggaacggtctttgtccatacaaagggcagaggccaatacgccgcagcctgccaacgcgatcccggacaacgcgatggcgccctgaatggtgccatcctccccatttttgccatgaaggacgggaaacgcgacatcgactggcaaggaggatatgccggtggtttcaaatacatacagcttgcgcgcaccgcggtccagagaaagcatagcgggaatacagtcttcgcacctaagccaggtatcgtccagcagatgctccgggctgccggtatagtagtaccagctgccgtctttagagatgccgatggggaggatgttgtatttgtgccgatccagatggctcagcactgcatgcgccgaagtaagggatacgctgtattctggagaacagccgccaaaaaacacggctacatttttctgtttcattggtttatcctttctctgctatgttgatgtttgatgacaggggatagccgatacggcatttattttggtagagcctgcggctttcaacgggttgtccggagcctcggtctatgcgtgtctggatgatatcggccagctgaataatctctttgtcttggcgtatatacgagattttgccgttttgaatctgatacaaacaggcgtcctcttccgaacacaagagg

SEQ ID NO: 2573 - DNA, 32759 bp, Unknown
  16S sequences of unknown bacteria
ataaacgctgaaggcatctaagcgtgaagcccccctcaagatgagatatcccataacgtcaagttagtaagaccccttgaagacgacgaggtagatagggcagaggtggaagtgcagtaatgcatggagctgactgttactaataggtcgagggcttaaccaagatggtttaggataggtttaaaaaagatggatttagtatttgactgtatgcagttttgaaggtatataacatatacttttcatagtacaaaagataaagtaagctgttgttttctgacaacagctttttttgtgcatacctttctaatccttaacttttcttaagtttgaaaaatccacttttccttgattttcttggaaaagtggatttatatgttactaatttgttactagttcagtgaaaatcttattatttcagcagttcaatcgtagcccgaagttgttccaatgtcttgtgattatacactctgtttcctatatcttttgatttatgaccgatgatcagatcgatgcattttttattagcatgagcattatcaagccgggtttcaacggtatgtctggctgcatggggagtctttgtatcatcctctggatcaataccgattagtgccagggtttctttccagattttgtaaaaccgagtcttaggtattcgttttccatcttctgcgatcagatagtttcccggctggtctatcagctccatgacaataggctggacccgggaatggatggggactattcgtccttttccagcagcggtttttacaccgctttgaaaatacagctcatccaggtttacctgatcttttttcattccaagcaattcaaccaaacggaatccggtatatagatagaggagcatgaagtccgctccagcttttccacgatatttccagagatcttctatctgcttatcggtgaagggcgtcctggcttctttatccggaggagcagctgataccgaaatgatagaggaatactttttatctatgatatcccgttcaaaggcgaaatcatccaaatgtccccacaggtttttcatatgtgtttgagaagaatagctggagacaccgtctatagcatcctgcatatcgaaagatttgatattgatatatttcataccatagagcttggagcaatgcttataagcagcttggagcgaatactgcagagatgttccgagcttgggctttttgattttcgcccattggttatagagatcggcaagagtgatattcttgcgatcaatgttccaggggttgtggttgtatttggccagaatgatgttggcttcttcttcagtggtcgcatagtccagtgggacctgcctgccattaccatcagcatcgtactgggtcacctttatgatccaaggcttggatcggttacctttgagctttgttacggatccgtatccatttgggtttcttttccccatgtcatcctccttttttgcgatatcgcaactaaaaacgggtataaaaataacagccagcgggaacgggtgttccgcttgcatggccgtccggaagatgatacaatatttttgcgaaattggttgcatcatccttcgggagtgtaatctatgtgaaacggttctctgttggagcagggagccgttttcttttttacttaataccaaagagtcggcctacttttgcacgacgtccttgttttgttgttggaatgccggttgctttagcaatctttctctttgcactggtaattccaagcgcacgtttccagctaaatgataatccagggattccttttttctttgccatagtgatgcctcctttgacaattatgggttacattttccgcacggagaatatccttgagaaataagctcttcacgggaattattggatgtactgtaattctgtggagcaatctttttgacactggagcaagatggacgatggaatttcatcgtacttgtattaagtacatagcttgcagaagtatcctgctgctgtgcattgtcgtatgtattgaagttacctctatctcctgatccactggatccagaagaactagacgatgactgcgattcagatccggcagcaactgcagcaacagatgtgcttgtggatgcttttgcagcagcctctttttctgcttgctctttagcggccttttcttctgcgagacgctgagcttctgcttcagcagcggctttctcctcagcttccttctttgctttttcttcagcctctttagcagcctgttcctcggcaagtcgtttttcttcagcttctttttcagctttttctctggcagcaatatcaactacattgattgtaattacattgctttgcacgccatccgcttgaacgtaaacttcataggatccttcttctgacccggtttcgatttcagaattttcaaaagtaacagattcatcactggtaaaatattctaggtcttttgatgtcgcgtcttcaggtgtaattactatatcgacaggaatgtctgtgttaatgtcgtactcttcttgaacatctggaatagagagtgcaatggagtcgactttgacttttggagtgaataaacttcctatgccgataatcacaagagctgcggttaccacaatctttacagttttattccacttcccatatcgccacatcagataaagtccgatagggaaaaagaaaattagtaacagtataataccaaaagtcttttggtaccatttttgaggttcagcttcgctcataacacgtttcctccttagtatttagttttcagcatttacaggcaaacatatttataataacccttatggggtattatccataaaaatattcttgcatttcagcaattcttccgagtatccagtcattcttgccagctgtccgatcgtcagatccggattctcagcaatctccgtatctggcaccagaagctctatggcaaaggtattggcttcgatttcaattcgatctgcagataaaaaagtcttatttcggatgaaatagcaattttggcgcggatgtaggatggcatgtcctaattcgtgcgccataacaaagcgcatttcatgttcatccagattttcattcagaaaaatacatttatgtcttttcatatacatataacatccaaggcggctaccgatatcgccaatggcaagttctatatgtagagctttagcgatttggaacggatcggatgtttcaaattttctcacatagtaagcgactgttttatgtatatctcttttcaaggtaatctcacctacttctttttgttcggattgtatttttccttgttaatagcttttagacggcgtagcataagctcgatctgtccggcgaagagctccagatcatcttccggtatgtcagttccttcaaaacttgcaggaccatcttcaccatttcttagtttttccataatagagttcagatcctttgcgatatctctttcatcacgagcggtcagttcagattttttttcttttggttcttcttttccggtcattagatagtctacagtcactccaaaataatcagcgattttctgtaatttttcacgtttgggcgtgtacctcccttttttccaactggaaagtgtagcagtagtaattccagtatcctgagccactttgtacgctgttataccgcgttcttttagtagattttcaaaaatctcatacatagcaaactccttccaagattaacttagaaaactttgctaaaatcattgacaagcatagaaaactatgctatagtgcaaatatagcttagaaaactaagttaaagctaagatttcttttataacttaggtggtgctttgattatataagaaatcttagctaatgtcaacgaaacggaggtgtaatagtgtacaaaaaattcttggagttattgtcgaaaacaaacaaaactccatatcaggtagcaaaagatacaggtatatccaccgctacactttcaagttggaaagctggtgcatatattccaaaggtcgataagctccagaaactggcagattacttcggagtaagtattgagtattttttgaaggagtaggaggtgagaagagatggattatatttctttgattatggcaattgcttcgataattttaggcgttgtagcagttgtcagagattaaaaagaaaagccccacctgagtcgcaatcaggcagggcaagcaccaaaatctggtagctatgaaaaataaccattttcattgtaccagatcctaggagaacatgcaaggagaggataaaggctatgagccagttcagagaaaaactgagatcagccatgaaagagctgaatatcaatcaggttcagcttgctggtctgactcagaagagtaaagcaacagtaagtcagtggctatcaggaaagcagacacccacagaagaggggcagatgcggatagccagggcattaaatcttccggaagattatttctggaaagaagataacctgctgtgtcttggaaaaaaagctgggacagtagagaagctgcttccgaaggatgcggcaagactgcttggcatatctgttaagtcagtcggccttggcttgcagcagggcgtattcccgtggggatacgggatcaagacagacaaaagctgggtgtatttcatcaatgcccgaagatttgcggaaatagaaggtgtagagatacatgatacggcagaagtcagaaaggagagcttggtatgatccatatcattaaagacttgtatattgatcctgaagatcagtgctatacactctgtcgaaaaaagaccggtactcggaatggtgaagcagcagaggtgtatgacagactgggagacaaatgatgaagagattggtagcgaaagcattatatcagctgtatggcggttttagtatctgcttattcgtgtacgggatactgtggttggcagaagcgatatgtgacaacaaggacataccgttggccgttgtgacagcggtaggagggcttgcttgtgtgtttatcacaggaatcatttacgaggaatatgagttatgagagataacaagtgggtaatcatcctgctagtgtgcctgatgatctgggcagtggtgctagcaggtgtgttaaagattggaggataagatgttaaaggtatttgaggacaagctggttattaccagaagcgagtatgaggaatatgtgcagcttaagtttttaagagatacgctggataagttatccagatcgaagaagtactttgattcagcagagatccgcacggctctgggactggatgcggtagaggaagaaaagcatggtatggaagtataaatgcgatgcctgcggttgcaatctcgatccgggagagggacttctgtgcgaagaatgccgagctagaatcagagagcggacaagacgaggcaggcagttagataaactgttggatacagagaaaccgcagatccggctgaagttggaggagatggcatgtgtgtaaaagaaccgtatatcctctgtgatgaatgcggaggaagaatccacaaagaaacagaggaatatgaacaggatgactgctatgagattgacggatacaggctttgcagaaactgcgtgatgccgtatctgagaaaggaacataaggtgagattacatgattgattttgcgaaccttgcaagtgtagatgtgaagaaccacatcgagaaaaagaatggtctcagttacctgtcatggtgctgggcatggtcggagattgtgagaagatatccggatgccagatatgaaatcatgatgtttgatggaaaaccatatctgaatgatccaactctcggatatatggtaatgactcagatgatggttgacggtgttgaacggaccatgtggctccctgttatggacggagccaacaaagccatgaaggaccatccgtatacatatcaggtgaaagagtataagaacaaacaatggactggcggatacattgataagactgtagaagcagccaccatgtttgatgtgaataccgccatcatgcggtgtctggtaaagaatatcgccatgtatggactggggctttacatctatgctggtgaggatcttccaccggcaaaaccggcaggaaagacgaagctggacaagattgagaagctctgtaaagaactggacgtcaatatcgagatgatgtatcggaagtatggagccgagtacggcggagagttaaaagaagatgtggcagacgtgatgattaaagtgctggatgtggcaaagtcaaagaaaaagacaggtgaggctgagtgcacacaataacaaatatccgaaaggtccggcagacggaagagggaacagatctgatgatccacatcccaaagctccagctgcaggacatgctgatggagaagcggatccggcaggcagagatcagatttgatgatggccggacgatatccattgagcagcggaagaaagcatatgccacgatccgagatatcgcagcatataccggatatctcccagaagagcaaaaggaatggctgaagtatttgcatattgccaataccggatgcgagtatttctccctgtctgactgctctatggatacggccagagaatttatcaatacgattctggagtatgcgatcaccgcaggagtgccgctgacggacgcaggagtggacagaacagacgatataggcagatacctgtatttctgcatcaaatccaagaagtgctgcgtgtgtggctcagaaggcgagatacatcatgtggatgctataggcatgggaaacgaccggcgaacctttgatgattccagatgccggaagatgtgcctttgcagaaagcatcatacgatctggcatcaggttggagatgaaagattccaacagatgtacaaggtctacggaatcatcgtaaaggaccagttacctccgggcgataatatatcacacaaaagcccatgatggatatatcttcaagattgtttctcaaccggcggctcagaccgccggagaaaggagaagaatgaaggacaaaaagaaagctgcggaagacctgttttatcggatcggctatgggcgagagtccagagtcgagagaccaaggaacagagcagtggacagaagcctccgccggatgattggtgaatggaatgagcatagcgacaacgacacgatcatcaatgtcggggatggttattacaaaccaagattaagtgttccggatgaaaagctggaatgcaagcaatatatagcgcaagagactgccagagcatatagggtactggacaagatcaagcctatgtgggcggcatttgaaaggatggataagcatggtaaacgggaagaagaaggggaaagccggggagctggaagtggcgaggattttacgcagctacggttacccttgtagaagaggtcagcagtattccggagccaacggtgatgcagatgtggtagggcttccgggtatccatatcgaggtcaagcggagagaaaatctgaacgtctacgaagccattgaacaggcaaaaagagacgcggcgaagatcggaaccatgcccacggttatgtggcgtaaaaacgaccatgaatggcttgtgacgatgcctatgagcgactggatgaaactctatcagcaggcaaacctgtaggtgaatgcctatgggtggacatatcaagatagaccggaagattctggagtgggagtggtacagcgatataaatacctgccggttgtttatccatctgttactaaaagccaactggaaggatggtcggttccagggcactgaggtgccgaggggatcgctggtaacatcctataacagcctttccaaacaaacagggctgtcagtgcagaacgtaaggacagcgataaaacatctaattttaacaggcgagataacaagcaagcaacaggcaaaatttactgtaattacagtaaaaaattacgataagtaccagttggataacagggtaactaacaatctcctaacagagaaccaacaggcttctaacaagcttctaacaacaatagaagaaggaaagaaagtaagaagggaagaaagtaataataatactatgtcgggcgagccgtctacgagtaggggtcagccgtatgcagagattattgattacctgaaccttaaagccggtacacggtataagcactcgtccgaagatacccgtaaacatatacgggcaaggatggctgaaggatacacaatagatgattttaaggttgtgatcgacaagaaggtcgatgagtggaaagggacaccgcaagaaaaatacctgagaccagctactctgtttggaaccaagatggagtcttacgtgaaccagaagattactaaggaatccagagcaaaacagacaggcttcagtaacttccagcagcgcgattatgattttgatgcactggaacagcagttgctgcggagtcagaaaggagattaaaatggcacatttatttgagctgtactgcgaagatcggctgatcggcaagaacaagacagctacccagatcgcggaactgatgggcatcacagtcggacaggttaccgcatacgcaaaaagtggcgaactgataaatgacagatacaaagttgtccggattccagagaagtttgatcctgagcttgtcccgctgatgagtgagtgggagaaggtcacggagccattccggcgggtgatctggtgtaagcatctggcggatggggttcggcagttaggaggcgggttgaaatggagatgctgaagacgagcaacgagctgtgtggcatatgcgtctacggccttaaagactgcggacaggcaagagtgatctgcggatacctgctgcaagctggcagaatgagaaagtgcgaggttggatggtgcgacaagttcgaggaaaagcggaggaagcagaaatgaagaataaagagaagtatgcggaagagctgatggagattgcaatatctggatatagcgttgccgttatcaatggaaagccagcgagatgcggcgcaacaaatacagattgcaaattgtgcatcggaaataaaccaggctattgtaaccgtgaaaaagtgagagaatgggcggaatctgaatacgtagaaccatcggtagattggagtaatgtgccggtagatacgaaaattcttgtgagcgaagattctgaactttggtatagaagatattttccaaagtttaaaaatggaaaagtatatgcattttttaacggaggcacatcgtggaattctgctgatggcgatactgcttggaaatacgcaaaattagctgatgaatagaaatcgaaaggagtgagaggtttgctggccagcgtgaaagagctcattactccgtagaaaatggaatcagtacaagaaagaatggaacggctgggaatgtatgaaaagatagcatccttcatgcaaaaggaaaaacagccgtatgaatttaagcggaaatacgcacagatccgggcagaggaatttgccacggaatgtgacggacgtggattgaattatcatgtatcggttggcggactggacagcattattttgtacctgtttttacatgaggtctgccatatcaatgcaccgggcgtgagtgcatccatgctggaggacaagtcaatccagagggtgcatagggcactggggatcatccgggtaccaccgctgagaagagatgatgggaagctctggacgaaagctagggtgatacaggaatttggatttccggtgatatcaaaggaagtggcagcgaagattgagctgctgcagaacccatcagagaagaataagacagtccggcatgccatcataactggtgaaaccggagaatatggtggctggcaaaaagactccaacatgaagctgaaacagcggtggctggagctgtttggaggatatgaaaacgagaatgaagggtgcaattatcagaagccggatttcctggtatcttccaagtgctgctattacctgaaggaaaagaactgtgacaactggggtaaggagcataacagtgtaccttatctgggacttatggcatccgagggcggcagacgtgccaagagcctgcggatgaatggatgtaattacttcggtaagtcaaccatcagatcagcaccgtttgcaatcttccacagacaggatattttgattttggcattggagatggaccagatgtggaaagatggattgaaagaaaagtaccatgaaaagcttctggaggaaggaaagattgcagagagcttccagatgccggacagcattattccggagatctacggatccatcgaaagaaaaccagacggaacactgtataccacaaaggcacagcgtaccggttgttcaatgtgtggatttggaatccacatggagaaaagacctcaccggttcgatatgttgtacaaggaaaatccgaaagaatgggattacctgatgttccatatgtgcaaggacgctgatggaaatgactatggttgggcgaaggtacttgattatatcggcgttgattgggatccaactacgattggtgggaactgtaagggacagatgagcctggaagaatttatgtaaagaaaggagccgagactctggccagagtgaagcatatgcggtctccttttacgaaatgacatacaaagagtttttggaaacaaagatagagcttgcgacagagagcggattcatagtggatccgaaggacgtcaataaagcattgaagccgcaccagcgggatgctgtgatgtgggctttaagaggtggcagacgggcactgtttgagagttttggacttggaaagacagtgcaggaaatcgagttttgccacctggcagcagaacatagcggcggacgcgcattgatcgtgttaccgcttggagtaaagcaggaatttaccagggatgcggtggaagttcttgggtatgagaaaccagaatactgccgaacgatggaagaggtggaacaaagtaccagtcagattgtgctgacaaattatgagcgcgtcagagatggagacatccggccggaatactttgcagcaacttcgctggatgaagccagtgtattgcggagctttggaagcaagacatatcagacgtttctggacaaattcaagaacgtgccgtataagctggtggcaactgctactccgtcaccaaacaaatacaaagagctgatccattatgccggatacttggaagtgatggacaccggacaggcattgacgagattcttccagcgtgacagcaccaaggcgaataacttaaccctgtatccgaacatggaagatgagttctggatgtgggtgagtagttgggcattatttatcacgaaaccttcagatctgaatcctacatattcggatgtcggttatgatctgccaccgttggaagtgcgatggcatgaactgccggtacactatggagataccgccgataagagcggacagatgcaactcttccaggaagcggcggaaggattgaaagaagctgcagcagtgaagcgtgacagcatagatcaacgagtagccgagatgaagaagattgtagaagaatctccggatgatcatttccttttgtggcacgatctggaaaatgaacggcatgcaatcaaaaaggcattaccggagacagtggacatttatggagctatggattatgacctgagagagcagagagtgattgatttttcaaatggagagacaaagctgtttgccacaaagaaatcattatcgggatccggatgtaatttccagaggtattgccatagggagatatttctgggaatagactatgagttcaatgatttcattcaggcagtgcaccggtgttacaggtttttgcagcagtacccggttgtgatcgacatcatttacatggagaatgagcggcagatcaaggaagcattgttggaaaaatggaagaaccataatcacatggtcgcaaagatgatcgagattgtaaaaaagtatggactgacctcggcaaataaggcagagcgactggaaaggaagatgggcgtggaaggaagcagagaagaaagaacagtgagaggacagcattatgaagcggtgtatggtgactgtgtggaagaaactagagcgatggagagcaacagcgttgatctgatccatacatccatcccctttggtaatcattatgaatatagtgccaattacaatgatttcggtcataaccagaatacagacaggttctttgatcagatggatttcctgacgccggagctgctgcgtgtattacgccctggcagagtggcagcaatccatgtaaaagaccgggtgctttttggaaatgcaaccggcacaggaatgccaaccatagaacccttccatgcgcagtgcatcagtcactatatgaaacatggattccagtattttggaatgattactgtggtaactgatgtggtccgtgagaataatcagacctaccggcttgggtggtcggagcaatgtaaggacggatccaagatgggagtaggatgcccggagtatattctgcttttccgaaaacttccgacagacagatccacggcatatgcggatgtaccggttaagaagtccaaagaggattataccagggcacagtggcagattgatgctcatggatattggaggtcatctggagaccgtctgatcagcaaggaagagctggaaaacatatccgtagataacctgcaggcagtgtaccggaagtacagccgggaaagcgtatacagctatgaagaccatgtgaatctggcaaagaagctggatgaaaacgggaaactcccggctaccttcatggtggttgcaccgggatcctggaatcagatggaagtatgggatgatatcaaccggatgcgtacccttaacacaacacagagccgcagacgcgcacagatgcatgtgtgtccgttacagctggatattgtggagcggatcatcaatcgttacagcaacgagggcgatacggtttatgacccgtttggagggcttatgacggtgcctatgacagcagtaaggatgcaccggtatggaaaaggctgtgagctaaatccagattacttccgggatggtgttggatatctgcaggctgcagagaacgaggtggatgagccgacactgtttgattttatggaggtataggttatgagtaaatcaagatattccaagaccaaagcagcagggcagctggtaggtatgagcagatacgggaaacagtttggtggacagcaggcgcatttagtgcctactgagaaccggcagatgcgaagggcgaggaagcatggatcagataaccattgaagaataccttaatagccagaaaagcactctggcaagttgtggtgagtgtatctgcaagaagtgcctatactggtggtctggaagatgtccacatggtgattgctatgatgatttccgggcaaaggatgagccgtataacaaagctcatccgggactgccaccgaggacattatggtctgactggaacaaaccgggagaacaagcgcactggtgtcgcggaggcacattctatccgacccgttattgtgagcattatgtgagatatgagggtcagacaatagaatgctgtattcgtgaaaatgttcagattttccaggacggatatataagatgcagcattaaggatcagattggctgtgaagcctgcattgacgaggacaatcacaggaatgtctataactgccagtatatgactgactcaggatgcgagaggatgataacagccaaaagccttattttggatgagatagcgaaaggacaagatattgagctatgtaatgagcagtgctgcataggctgcacgaagatatgcggatatagatgcggacaagcatatgcacgtaactcaacttaactcgagttaactcaattaacgagttaaattaactcacctgatgaattggacattggagtggagatgacagcagttcaaaggcaaaatgcattgcttggatgccactgccggagccgtggaaaggagaatgagcatgaatcgaacatatggaaataaagataatttaacagaagcagttcatgggttagatattttcacaaaaaattggtgtatgaattgtgaagaaacagaaaaacagaatgatccgatttttagatgtaaagaatgtctatttttagaaaaaggtaaatattgtcttattaaaacttttgcacttgaacacaagaatgaacataaatatccaatgcgaaattttggatgtatgaggtggcactgatggagaaacttaaaccgtgcccgttctgcggcggaaaagcaaaagtaaaagcagcaaagaaagattatgtaggattcacgatatggtgcgaatgcgaaaaatgtcatgctaaagtatccggctattgtccatatatgaaggacgaggattttgctcttgaaaacattgattcttgcagaaacgatgcaataaaagcatggaacaggagggcaaacaatgggaagactgattgatgctgggctgtttttggacaacctaagcggaaggcttgaaagcatgaaagattatgatgcagtaaaagatgtgattaacaatatgccgactgcctacgatgtagacaaggttgtggagcagttggaaacagaggatagcaaaatagaaatacagtacgaaaacaactacgaaaaagggctattagatggaatttggaaagcaatctagattgtgaaaggcggtggagtatgatgcattttgacagattcgactttttggttgatatacaagatgtatatattctaccaacaatcagaataagcacacagtatgaaatgattgataaaaatttcaacattcagattcattttgcagtatttcattttagatggaggtgggtagatggctaaacattgcacaagagaatgcccagtgggcgagaccgagtgctgcatctgctgtagcaaatcggaatcttgcggattccagtgtgacgatatggacagctacgaatttgcagaggactgtccagaatatgtggaggatgaggtatgagagagattcttttccgtgggaagcatatgcatgtatgcccggagaacaaacatttagatggaacatgggtagaagggtatttggaagacgaaaatcacataaacgatggaaaatgtgagtttttaattgatccagaaaccatctgccagtacaccggtctgaccgataagaacggtaagaagatctgggagggtgatatcttagagggacacttggatgataaattcccagaagatgttaccagagaaaaagtaatatggcatgaaagcggctggaaaacagaagaaccgggatgcgtcgataaagaatatttggatgagtttgatacggaaaactttgaggtagtcggtaacgtatttgacaacccagaattgttggaggcgtgagatgggagataaaccaaatatcgaagatatgacaaaagctcttaaatgcgtggcaagcatggctccagacggcgattgtcatgcggatattgagaacttcaaacatctggacgatgctgattttaagcgtgttgtatgtactggctctgaaaagccaagagatccaataaacggtggtgaaggtcaatgctgtccatattatcaaaaaacatacggttgttgctttgaagatggggagttgtactggcttgatgatgtagctaaattgctggaggtgtaagaatgacagattacgaaaaaggctatgagcgtggcagggatgagatccttgccatgaaagagaatgcggacggctgttgcggctgcgcatttgagcatgtggagccttgggagctgccatgccggaagtgcaaaagaaacagcaaggattactggcggaagaaatgtgatctggatgagtgatgaatattttgacaaacgagatggaggatatatggatgacctgagaaagaatggatctggatacacggatccaacagcatataaagcaattaaaaatattttgaaggaggataatgcgatggaagaagtaaagagaggcgaaatatggagtgtcgaaggaaaaaattataccagagactttctagtgatccagcaaaaaaacggatattgtataggaattatgctttgtgatgtaattcccaaaaatgcggatccagatgatgtatgcgaggtaatgagtaggacattgatgtatgcagatgcaggaaaattgacttatgttacagacaatacaccgaaacagtatgtgaagacaatttcggatgatagaattgaggcgatcatagaaaaggttagtaatgctttgcagttgtcacatagagagatgccgactgaaagagcacctatccagtataatttggtgacagacagtacagagctggtagcagtaaaaacagaaagagatatatttaaggggctgtatactaatctgctggagcgtgtaatgaaaggtgcgtgatctgatgacagaggagaatgaaaagaaaaaagaatatctgcggggatatcggaatcatgttcgcaggatcagacgaatcgatgcggagctgcaggagctgagagaaatgagaacatcaatttcggtgaacaatgatggaatgccgcatggatctggccagagtgacatgtctggatatgtagcggagttggacaggttggaaagagcgcttgtgacagaaagacaggacagagtgcaggtgtataaagcaatcgtccagcagatcaatatgttacacaatgaagtggaaaaggatgtgttattctatcggtatataaaaggccttgaatggtatgagataggggagaagatgggatattctgagagacatatacataggtttcacggaaaggcattggcacattttcagatcccggataaaaatgtcatagaatgtcagtcgcatcagtggtattatggtagcatcgaagaagcgacaaggaaagcaattctgaatgtataaatttatgcaagagtcacctgcgggtggctctttttgtgtccaatattaaggcaaggaaggtgaggtgatggcgaacaatgagaacctaaaaccggtgcgaaccaagagtgaagcaagagaacgtggaagggcaggcggaaaggcatccggagaagccagacggaaaagagcggacttccggaagacgctgaatgcccttctgacggcagagatagatagtcctgaatggaatcctttactggaatcattgggattggatccgacgctggaagcagcgatcaatatggcgatgatcaaagaagcacttgccggaaatgtgaaggcttatgaagttgtggcaagatacgcaggacagtcgggtcagacggctgcggatgatgaagagcagcggatccggacagacagggcaaagagagccagagatcaggaagttggcgatacagataatcaggaggataatatccagagtttcctgaaagccatgagaccgacagaggaagatctggcgggattattcgaggaggatgaaacagatgccgaagcggaagaagagaccggcgaagtttaattttaaaccattttctccgcagcagcagagactgattcattggtggagaccgatgatcagagcctcggagaacaattacgtgattgcagacggatctattcgatcaggcaagacaatagcctgtatcattggattccttacctggtctcaggagatgttttccggtgagtcttttatcctggccggaaagacgatgggagcactgaagaagaatgtggtcagaccgatgctgcagatgttggaagcatggggatggccttatgaatatattcgatctggcacagatgccaggcttgagatcggaaccaatacctattacctgtacggcgcaaacacagaggcagcgcaggatgcactgcagggattaactgcagcaggtgcatatctggatgaggctgcactgtttccgaagagctttgtggatcaggcgattgccagatgctctgtggatggctggaagttctggatgaactgtaacccggcgggaccgcatcacttcatccgtgaggagtatctgaccgaagaagccatgaagcagaagaaagtatatcatctgcactttacgatggatgataatctttctatatctccaaagcgtaaagaagaatacaagaatgcatggccgcatggcagtgtattctacaagcgttttatcctgggtaaatgggtggcagctgacggtctgatctaccagcagtttgcagatcacacaaaagattatctggtcagcagttcctggcttctggagcgtgatgagcatggccgtctgaagaacgaaattgtatatgcagttatcggagtcgattttggcggtacaaagtcggctcattcttttaccctgacaggatttacaaaagggtataagcaggtagtggtacttgatgagtattactgcaagaagcggatcaacccaaaacagctgcaggatgattttattgattttgtcaaaagggcgcaggcaaggtacaaggtcctggaagcctactgcgattctgccgagcagactctgatcagcggactggagagcgcatgtattcaggcgcacgtagcaattgacctgagaaacgcgatcaagggaccgatcaatgaccggattgcattttataacagtctgattgctcagcaccgttggaaggtgatgaagcactgcacccacattattgcagcttttgaagaggctgtatacgacgagaagaaaaagaacatggatgtccggcttgatgacggtgagatgaacgtcgatagtttggacagtacggaatacagcacggaaagtgtccaggaagaaatcctgtacattgctgcttaggagggacgtatgaattcagaaaataagatcagggaatacctgatcggtcagaaatatacagtgccggctgatgatacttacagccatattgatgaatggctggaatggtaccagaatgatgtggagaaattccatcactacaaactgtataacggcagcgtagtgacagaacaggagcgctataagcttggtatggcgaaaaaggtctgcgaggattgggcgaaccttttgctgaatgagaaagttgcgatcaaagcaggatcatacgataaacagctggctgtgatcctgaataaaaataatttttatgtaaaagggaaccagctcattgagttggcttttgcacttggtaccggagcttttgttgagtacagagatgctgcaggtgcagtggtgattgactacatccgggcagatatgatttacccactggcatgggacaacggagatattacagagtgtgcgtttggtacctatcagactctgaacggaaaagagtacatttatctgcagatccatcgtctgggaaaaggcgatgaagaggatccagatatgtattacatcgagaataaatatatcgatgcgaaatccggaaaggaaacagatcctccggaggatatcgagatatttgtaaataccggttcggtagaacccctcttccagatcattgcaccgaatatctgtaataacattgaactggatagtccacttggtatttccatttatgcgaatgcaattgaccaggtgaagggctgcgatcttacattcgacagttacatgaatgagtttgttcttggtcggaagagaatcatggtaccgctcagccaggcaaagatgcagatgcagaaggatggatctacagcgccgacgtttgatccgcatgatacggtatattacataattccggaagacagaaatggcaataatcagctgacagaggttgatatgaagattcgtgcgacagagcatgaacttggcattcagagatgccttgatcttttgagctttaaggccggtatgggtaccgggcgttataagtttgaaaatggcggtgtaaagacagccacggaagtgatctcagataagtctgatctgtaccaaagccggcagcgccattgcatcacagtgtcagcagccattttaagtatggttcgtattatttcattcctggacacaggtggagctattgatgcaacggtagattttgatgattctatcatcgaggacagcaatgccacgattgataagaatatcaaactggtgaatgctggactcagatcgaagctgtcagccattatggaaatcaataaatgttccgaagcggaagccaaaaaagaactggagaggattgccgaagaagggcagatcacaggtcaggacatcgactggacagagggggatgacgatgaatcagaacagaaggatgattcggccgaagagaccaaaaaggaaaaaggttcagagaccgatgataatcaggatactgaagaagatactccagaagataaagggtaaggtgatccgttatggacatgttggaaaaccaggcagcagctgaatccgtagatgcggtctttcaggatttggaaacgctactgatgcagaacattatccgacactgccagagttataatcagcctattgccacggatgagtggctgctgcagatgcttgctcagattgggcagctcacccaggagaatatccagatcattgctcaaatgacgggattatcccagacagcgatggaacggatgctcaatgagacatcggagaaggcattgaaagaggtagagcctgctcttgcttatttgacacgtgaagggcttgctggaaagccggtagcattgaggaagagcaagaatgtccgggagaccatgagcagcatgaaacggcagacaaagagtactcttaatctgtgcaataccacgatgctttacaaatcaaaggatgcatacaaaaccttggtaaataaggtggctgcagatgcttctgagattgcgaataagcagtcgttcctggaccgactgaatgttcatgcaacggcagcaacgattggagcagagtcccgccagcaggctatgagggcatgcatcaaggaatttgtggacaaaggtattccggcatttgttgataagcgtggtcgtgaatggactccggaagcgtatgtgaatatggccatgaggaatacggccaagaatactgcagacgaagtacagacagccagatgccgtgattatggtgtgaatctgattgagattgattcccattccggagccagacctaaatgcgcgaaagaccagggaaagatatatgatctcaacaatggcagcggatacacgacagatgccaaagggagaaaggtgcagtattatccttggaactccactagctacggagaaccagacgggatcctcggcatcaactgcaggcatcacaaatatccgttctttccgggcatgagcttacagacttattttccagtggaggatcaggaagccagtgaccgattgtacaaacagacacaagtgcagagagctctggagcgagatgtccggaaacagaagcgagagtgtatgctatacaaagagctgggtgatgatgaagcctttgaacagtccgcagtaaagctgaaagccaaggaagcgaagctccggaaatatgtcggagacaatgatcagctacaccggaggaaagaccgggagcaggtggttggctttgacaggaaaatcagtgcagaagcagtggcgataaataaagcctatacaaaagccctaaatactgataaaataccattaaaagacacgattatccatcgaagtgttggtgcaaaatttaagaattataaagttgttgataaagcaacaggtgtggagtatgaatttgcggcaggaagccgtattcaaaactcagaggtgttcgctggaaaaggaaccaaacatccacttcatgaaggtgttgcggaaggattgacagagcaatatggtggcaaaacatccgaatggcaacatgcgaaagggtatggtacgttgattgatccagatacaggagaggagctaagtgctgaagttcattggttccaggaaaagagtgtgggtaaagtaaaattcaaagtaaaggagtggttagatgaaggttaggtaccttggaaagacagagtttcttgtgcttacaaataataaagtgtatgatgtcatctctgtagagaaaggctggtaccgggttgtcgatgactccggagaagattatttgtatcccccaaaatattttgaaatagtagaagagtagataccactggtcagtaggctggtggtatttttatacccattttgagggaaaagttatgaatcaatattacacggtaacaaaagatgtggacattcttgcaccgtcatggctggcagatcgcatcgaaagacacatagcaacaatcctgtatcggaccagagatggacatgcagaagtgaaaggagtgaggataaaaggtgatggggtggcacagatcggtgacacgatcatgtttgatggcagacggatatccgtagaaaggcggtgatccagatatctcggagctgtccgttaaacagtgagtgactccaggaaggaggaatacgtagtgataacggtaactatcacagagaatggtcttacgatagacggccatgcgggttacgcagaaatcgggaaagatattgtatgtgctgcagtgtcgagtctgacacagggactgatacattcgctcaaggctttgacggatgatgagatctcttacagagttgcaagcggacatgcggaaataacgtataaggatctatcggaaagaggaaagcttctggtcgattctttttttattgctgtgagtgacatacagcttacttacggtgatgactatgtgaaaataggcgccgaacgggcgtaaaacggaaaggatggtattcagatgaaatacagaacaatgctggtaaagggctatatgctgaatcttcagctgtttgcggaaggatccgaaggagctgatgacggcggggatgatggagaagaggactctgacggtgatgacgacgatgatggtggtgacgatgatcaggatgagaagaaatattcccagaaggacatcgatgatgctgtgaagaagcgtctcgccagggaaaagcgcaaatggcagagagaacagcagaagcagacagagaaacctgacgacaagggaaaagccggtgaagatggcaaaaaggatgatgaggacaaggagacaaaagctcttcgggacaaggctgcaaaagctgatgatctggagctgaagtggacatgtctggaacatgatgtggataagtcctgtgtagatgatgtccttgcgttggcaaaagtgcacatggccaaagatgaggatatggatatcgaggatgccattgatgaggtactgaagaagtatccgcagtttaaagctggatcatccaaagaagaggatgatgacgatgatgaagcagaaaagaaaaagtcctggggacagcggcagagaggtggaagcaagaagacttccggagtagaagccgcattcctgaaacggaatccgggactcaagatcgattgagaggagaagtaagagtatgaaatttttaatgtttttacagctgtttgcacatgcacatcaggagagatggtcttccctggtggatgcgaagctgcgtcagacacttgtgaccagagataattatatctttaataccaattatgagggaaacccgaaatccggaaaggtcaaggtcccggtaagagatacagaagtaacagtgaaggattataacaaggctacaggagttgatctggagactggaaccacgacttacatggatctgaatattgaccaggacaaagcggtcaatgagctgatcgatggctttgacgctgcggcagtcccggataatattctggctgaccgtctggattctgccggttattcccttgcactggagatggatcagaagtccattaacctgctggagactacgagcggaatcaacgtgtgtgcaaccaagactgcggcaactgatcagaccgcatacaaggaagttctggcagcaaaggcctatctgaccagaaaaggtgtaccgcaggccggacgctggctgatctgttctccggagttcatggcagttctgatgctggatgatcatttcatccgccagggagatctgtctcaggagctgaaaaacgcaggtgcggttggatctgtagcaggatttgctgtgttcgagtctggaaacaccatgtatgaagatactaagttagtggcatccaagaagactacaactgagtttattgcaggtcacccgaactggtgtcatcgtgtccaggagtggggcgtggatgtgcatgcacaggatcttgccggatccggaaaatacatcggagcatctgcggtgcagggtcgtaagatctacggtctgaagatttctaaaccgcagactgtgtatgtgaagagaacggaggccgctgcttaaggggagctgataaaatggcatatgtagatgaggtatactacaatgattctttcagtggggagccagtcgatacgactgacttcccttctctttgccgccgtgcagaagagatcattgaggagatgacattgtatcgggtcactccggttacgtttccggcgatgcccgaagacatgcagacacggataaaggatgctgtgtgcgcacagattgagtatctggatgcaaacggcggagctgatctggatatgggagatggtcttgccggggcatcgctcggaaaattcagttacacaggtgcatcttccggatccggttcgactgttcagtcaattattgcaccaagagcggagcggatcctgtggccaacaggactgacgtataggggagggagagtatgaaaccgatacctaaacgactgttaatccatacggttacactgcacaaggtagtaaagaaggatgcctggggatctgcgacattggatgagggcacagagcttactcatgttcgcatagaaccgtcaagtaagatcgtccgggataagaacaatgcggagatccagctggcggcaacattgttttttgattgcaaatatagctgccctgcggggatggagattcagctggatgatattgttgtcttcaatggtcagaagttccgtgtacagctcgtagagcctctgtacgcagagaaaaagctgcatcattacgagataggactggtgaagtatgcctaaaataagcacaagagttacctttgacaagaaagccgcagccgcacggatgcgggcggttgcaaatgatgcactgacggtcatgggaaaccaggcattgaaagatgttactcagtatgtaccgcttgatcaggggacactgcagtccagcggcctgtcttccagtgatagagccgcgcatgatatgaagtttgaccttcggtggtcaacaccctatgcccagtatctttggcatggtgatgtcatgtatggaaatcctacaagcaggacatatggtccggagaaactgagttttaccagtgctcttgccagggaagaatgggcgaaatatgccagagaagtgcacggcgaagactggaagaaagtctatcaggcagccctaaaggagggattgaagtgacaccattgattgagtttatggaaactctgaaaaggactgcagaggaaaactgttgtcttggatcagaaatctcgctggatgaacttccggcgggcggcggtatttatgcagaacccggagagggatcaactgcagataccacttataataaagcggagatgaagacaatccctgttttgtttttatgcaggaatgaaagccagcagaaatgtcttgagcagctggagagcatctgtaattatttccagaagctgaagaaacatccaaatggcgagtctttcagttggctcaatacggagattgcaaagtatccttccaaaattggaaaagacgaggatggaacttatcattattcttgcatattgcgttgtttattatatttttagaggatttagaggaggaaaatcatgaaaatgaatcttcagatgtttgcggagccggagctcccgaaaagtccgattgctccggaaatcaactatgagacaaaagcctatatcaacacaacaccagataccgaggcatcccctacatgggcagacatggggaatctcatgaagaacatgtctcaggcccttaatgaagtcctttcccagaacagctattatgcggatctgggatggggaagtacggccgtgacaggtgctcagatgacgctcactgtaactggtgacgtgaaacctggggatgctgcttgtgattatattctgtctgataaagttatgtatggctttggagcagcgcgtcagacccatctgaaactggagaaaggtaataagattattatctggccgatcacactggcgaacattacaccggcatacggagatgcgaatcagccgaatgcgctgactgtcacggtccacggaaacgggaagcctgctattggaacaaaatcataagtcttggcggggttctatctccccgccctttttggaggaatgaaaaatggcatataaagcaaagagacaggatcgggtaattgaagaccttgaactgtgcggatctgacggaaaagttgttaaaacaattcatgtagaactggatgctgataacatggttcggaaactgtcagagaaacatgtagctttgatcaatgcgctgaaaaacgtgcaggaaatcaaagatgccagcacagagggagagaaagcaaatgctgtaacagttttgggagcggcggtggtagatttgtttgaagctgtgtttggaagagaagatgctgagtgtattcttgatttttacggaaaccggtatgtagaaatgtgccaggaagttgttcccttcatcacacagattgtgatcccggaagtccggaagattgcaaaacagaacaaaaaagctgtactggccagatacagtcgtagaaattctatatttaacgggttcagaaaatgagccttctaacggagtatccatccagcctggtgaaatacggcggacatcggatcagaatctgctgcagctatgacaatgtgctggaagtgcagaggctttacagggatgcgggcttgtcggatcttgagaaggcagatcaggctctggttatgctgacaggaagtccattccggctatggctgatgggtgaaggggacaagatccagcttctcaataaaatttacgaggaacagatccggattccgaagaagccatctgtgggtaaacagatccggtcattcgactttgaactggatgcagaatatatctatgcttccttcctgcaggattacggtatggatcttgtgagggaacaggggaaactgcattggaagcagtttgtggcattgttccaaggactgaccagtaagaccaagatcaaggagatcatgcggatccgcgcgatggatgtcccggagcctaacgggcataaccagaaagagattcagaacatcatggagctgaagtcttattatgcgctgcctgttgaaggcggtggtggtcagagtggcttgaatgcattgtttgcagctctggaagcggaggctatgagatgatggataagaaaaaagtaaaatgtccctattgcgggcatgaacagaatattttgtatggtccccgagcaatgtgccggggcatttttatacgctgtaaagcaaggcaatgcagaaaagaatttgaaatcacgataaaccaggacaggtagtgcctatgtgccgatgtctgatttgtaaggcagaggcaggtgaatggcatggctgtgaagggtgaggtcacatatgaactccgggcggatgacagtaagctggagtcagatctggaagaggcacagaaaaaggttgagcagtctacggagaagactgcagataaaatagagcaaaccgaggaaaaaacttctaagactgtaaaaaaggaaaaagaagatgttacggatcatcacaagcagcagaatgatgagagatgtaaggacgatcaggagacaggaaaaaaacgggaagaaacagagcatgagaccagtgaaaaaataaaatctattgcgtctggaacggcgaaagcgattggggcgggaatggcagctgctgcagctggtgctgttgcccttggaggatttgcagttaaaagtgccacagatatggatcaggcaatgaaccaattcatatcgtccactggaaaaagtacagaggaaacacaacggtatcagaatgtccttgaggatatctataaaaacaattatggtgaatcctttgaagacattggggatgccatgtcacaggtcatcaaacagatgggggatatggatgatcagtccttgcaggctgttaccgaatccgcatatgcgctgagagatacctttgagtatgaaattccggaatctacacgagcagcaaaagccatgatggataactttggagtatccggagaagaagcgatgagtctgattgctgccggtgctcagaatggtctggactattcaggagaacttctggatagtatttcagagtattcggttcagttcggaaagctgggactcagtgcggatgacatgttcagcatcttccaggagggggctgagtccggtgcctggaatctggacaagattggtgatgcggtcaaagaattttctatccgtgcgattgatggaagtgagaccacaaaagccggatttaaagcacttggcctgaatgcggatgaaacggctgcgaagtttgcagcaggtggagatacggcaaaggaagcctttcaggaagttgtaaaaggactttctgagatggaggatccgctggcgcagaatactgctggtgtcaatcttttcggcaccatgtgggaagatttgggaccggaagcggtcgcagctcttgccagcatatctgatggtgcttatgatgctgcaggagcaatggatcagattaaagaggtcaaatatgatgatcttggatccatgtttgaaagtctgaagcgtagcgtggagatgttagccctaccgctcggagaagagctgataccgattctcagtgagctgatcgaggcggtgctaccgatggtagaagaagcattgccgcctctggcagatgcagcgggagagatgatacagcagttgagccctatgattgaagagctgcttccggtgctaatggattgtctgtctgatttactgccacctttgatggacatcgtaaatgagattctgccggtgttgacagagctatttttggagctgattcctccgattgtagaagtggcggaagctcttctgccggcattgttggatatcatcaatgcgctattgcctattatagaggctttgtttccagtcttggaaccactgatcgaatgttttacaagtctgttggaaccgatacttgcgttgatagaagaagctctggtgcctttgctggaagcattggagcctatcatcgagtgcatcctggagttggtgattccaacactgcagattttactttcagtgtttgaagaagtttttgaggggattgtgtcatctgtaagcgggcagattcagcgagttacaacggtcatgaaggaactgatggcctttatcaagaatgtatttactggaaactggaaggctgcctgggaaaacgtacggaagatcttcacgacaatcgcagaatcaatcggggagtttttcaagattccaataaaccgaatgattgaccttatcaatggttttattgacggcctgaataaaattaagattccagactgggtacctggttttggagggatgtcttttaacattccaagaatcccaagacttcgcattggaatggattatgtcccggaagatgattatcctgcattcctgcataaaggagaggctgtccttactgcagaagaaaacgcaagattgcgagaaatcggcggtgtatggggactccattctgcggttactgcagcaccggaggttaatgatcgtatgagtcgggtcatggttgaaaacatggcagcgaatgagggaatcgactatgatcgtctgggaacagcagttgctgacgctctcattgatggaaatgtgagattcgtgattgatggccgtgagtacgcgagacttgaaaaggagatcaactgatgaagatatattataagaaccataacgggcagattctggatctgatgaagtggccgtatatgatcagcgagtctgatatccttggatatgaatggtcttataccgcaacagaatatacaggtaatcgaagtggatccacaatatcagacataaggaaaaagacggcaaagggatccgtgaaaattgccgtctcggccagaacaaatcaggaatatacatcagctctaaatacacttctttctgtgacagaatcggatatcatggcaggggtgccgggaatgttgtatgtggatgattattattacacctgttatgtatatggaagcgtaaaaaaagaatgggagggtatgacggcattcctgatcaacactttgaaaatcgtatctccttatcctttgtggtgcagagaggtatcaaagtctttccttaaaaacgggtcaactgctgtagttgagcgcgcagcggacacgtacctgttttatccggttgcatatccgtatcgatattcgatgcccggtaatgccggtttcgtgaacaatgatcattacggagattgtgactttaagatgatcatctatggtccgtgtacaaatccggtgatccgcaccaacggtcatgcatacgaagtcgcagcgactttgtatgcaggggaatacatcctgatcgacagtcgggaccataccgtatacaggtatctgatcgatggcaggaagcagaacctttttaatcagcggaataaagaaagcgacctgtttcaaaaggtgccgtctggtcgttgtgctgtcctgtggaatgccgcagcatttggatttgatttgatcctcttccaggaaaggagcgaaccaacatggaatttatcttagctgatcaggatcgtatggagcttggaatattatctgcagcagcatctctggacattgatctgtccaggaatgctgaaaacgcagagggaaccaatgatggacagatgacagtaacagcggatgaggggatagaatatggaatgtatatcttttctcctggcagcgagtttggtggacgtatcctggatctgaagcgcagcacagcatcagaaagtctcgtctggtattttgatacctggcggcggatgttggggcagattatcattgagccaccggaaggacaggcttataaaacggtgaacggtgatgcgcacacagtccttgcaaaacttctgacgggcatttctggtggtttgtttacagtgccggagaaattgtcaggtatcacagtatctgggcaatttaaccggtacacaacgcttctggacggcatgaataaactgctggaatcatccagtgcaagattacagatccgggctgttcagggtggtaccggtgatacatttaaggttgaagtgtctgctgtacctattgctgattatagtgcagaaattgagtatagccaggataataagatcgatctgacaatccgggattaccggcgggggatcaaccatctgatctgccttggtaccggtgagttaacagagcgcatggtccggcatctgtatgtgcaggcagatggcagtattgggacggtacagtattataccgggctggatgaacggactgcagtgtatgattatccaaatgcagaggatgaaaacgaactgctggaatccggaaaagagcagcttcaggaacttgcgagttaccagaaactggagctgtccgtgtctgatgagcttgatctggcgattggagacatcattgctggacgagatcgcttgacggggctgtatctgaaaaagcctattgttaataaggtcttaaaaatcaagaaggggaaagagaccatatcttataaagtggaaggagataactaatgcagataattgatggatattgtaatgaaccgaatatctttgctgatgatatcggagaatataatacagccatttggggaaccagagactgtgttcttccggccggagaacggctgggttatgaacttgtcagcaataatgagatcaagatcaaagatggtgtattttccacacaggggcgccgtggtgtgatcaaaaaaggcgctacagaaagctgcattattgaaaatggtacccaggcagaaaacagaaatgatctgatcgtaatcgagtatgcaaaggactcttccacgctggtagaaagccataccttaaaagtgatcaaaggtacacctggagaggccgctacggatccggatgttgtgactggagatatccaggcgggtgacgtcctgcatcagatgcctctgtatcgtgtcaagctggaaggactgaatgtggttgcagtggaaagactgttttctgtaggcaacaatgctattggaaaagaatttgatccggataaagactatgagatcggagatctgactctccagtataacaaggcatggaaatttaaggcaaaacatctggccggtgcatgggatgaaagccagatggaagagacggatgttttgaccgagcttgcagcacaaaataaaaattttgccgaactaaatgagaattttggtggattaacatttgcccaaaatgcatccggagcttggggatacaaggtaggaggtgctggttcagttatcccttttaagtcattggacatagtgtacgttggagcaataacatcgtcaggtagcatcaatgtcacgagtaaatgtcctaattataaaaaaatgacagctggtgattttctacttgattatcagtctatggcggtaagactgtgggacggtaagatcggtggatctacaattaacgtatcaaaatactatgatccgtcaactggagtactgtctctgtctaatttgtcagcgtcttcaagttcatcgtatgtcaggt

SEQ ID NO: 2574 - DNA, 17192 bp, Unknown
  16S sequences of unknown bacteria
tcatgctggttgcagtctcgatggttgcagcgttcaggtcgggcatcttctgctcagcgatctgtctggcctgagccatggtgatcttaccaaccttggtcttgttcggaacgccggaagccttgtccagaccggcagccttcttgatcagaacagcagccggaggggtcttggtgataaaggtgaaggagcggtcagcgtaaacggtgatgacaaccggaatgatcataccggcctcattcttggtacgctcgttgaactccttggtgaacgccatgatgttgacgccgtgctgacccagagcggggccgaccggcggtgcaggagttgcctttcctgccgggatctgaagcttgatgaagcctactactttctgtgccattgtattgcacctccataagataagtggtaaatttcggggagaaccaaagggtgaaaagcggctcccctcccacaggcagcaccctgctgcctttgcgtatcagccgacccgtacaacgaggccgtggatcggctacctcaaaggaaattagtccagtgcgcggacctgaccgagttccagctcgaccgggacgtccttgcccatcatggacacaacaacccggacatagtttttctcggggtccagagcttccacggttccgataaaaccgtccaggtaaccggataccacgctgaccgaatcacccacagcgaagttgacttccaccttgccggtatcaacgccaagacgggctacttcctcatcggtgagcggtacgggcttggaacccggtcccacgaaaccggtcacaccccggatgttgcggacaacataccaggagtcatcggtcatgatcatcttgaccaggacatagctggggaagagcttgcgttccacctcacgcttcttatcgtccttgatctccaccacagtttcagtggggacccggacttcctggatcagatcgtggagcttgcggttttccaccgcgttttcaatgcttgtcgcaaccttgttctcatagcctgagtaggtgtggacaacataccattttgcagtatcggacattacagcaccctccttgccatcagttcacagtgcggacaagtcttagttttagaactttgtcggaacggaagaaacaagcttacgctcccatgaagaacagcgataccagtttggtaatgacgaagtcgaagccgcagatgatgcaggcggagatgatcagagcaatgatcacaatgccggtgttgttgagcacctgctctttctccggccatacaaccttcttcagctcgccgcgcatatccttgaagtagcgcttgatcttggcgaggaaaccggtcttgttttcggcattcgcagctttagctgacatctacttcccgcctttcgactacttggactctctgtggagagtgtgcttccggcagaacttgcagtacttcttcatctcaagtctgtcaggatcgttcttcttgttcttggttgtgttgtagttgcgctgcttgcactctgtgcaggccaaggtaattttaaccctcatttcggcacctcctgattaacggaatttgtttgcctccctcgtaaaggaaacggtttctgcttatttttggacataaaaaaataacccttttaagaggtattacaatagtaccatatcccccggcggtccgtcaactgtttttttgcccaaaaaaccctgataccatgcggttttttcgatcaaatgagtgtttttcccgggaagtttttccgcccatgccgcacacactctccccaaaatgcccaaatccccggaaaagacgcactttttcgcactgggggtttgcctccggagggctgttgtgctatcatatatctgattggactataataggatagtaccgccattattataaatggtatatcccggatcgttagatcgttctgaatcggaggcattttgattatggaaaaacgcacaatcggcattctgttcggcggtgccagcagtgaacatgatgtttcactgatgtccgccacctcagtgctggaaaatatcgaccgcgaaaaatacgatgtcatcatggtgggcatcacccgggacggacgctggatgcgctataccggcgatgtaaagaagctcatcgaccactcctgggaagaggacagcggcaacctgcccgccttcctctcccccgaccgttcggtgcacggcctggtaactgtccgggacggtcagatggagatcacccgtctggacgccgtattcccggtgatgcacggacgctttgcggaggacggttccatgcagggtctctgcgacctggcaggtatcccctgtgtgggccccggtgtctgctccagcgccatctgcatggataaggagtacacccacatcgtcctggatgccgccggcatcaagacctccgattggttctgtgtgcgcaagggcgaagttccctcgctgctcgacctggaggtgaagatcgctgtcaagctgggcggtttcccggtctttgtcaagccctgcaacgccggttcttcggtgggcgtttccaaggtcaagacctcggacgacctggaagaggccatgatgctcgccttccagcatgaccagaagatcctcattgagcgtgccatggtgggcaaggaagtggaagtggctgtgatgggcaacgactctcccgaggcttcggtgcatgtgggcgagatcgttcccaagctggaattctacgactacaactccaagtactatgacgataccgctgacctctatctgccggcccgcatctccgatgaggagacccagctgatccgtcagactgcggtgaaggcattcaaggccctgggctgccggggtctggcccgggtggacttcttcctgctgcccgatggcagctgtgtgctcaatgagcccaacaccctgcccggctttaccaagatcagcatgtatcccaagctgttcatcgactcgggtctgagctatcccgagatcatcgaccggctcatcactctggcgattgaagcccagtaatgggcggaaagggggcttttccatggatcagcgacccatcggcgtctttgattccggcgtgggcgggctctcggtggtgcgggagctgtgccgtctgctccccggcgaggacatcgtctacttcggcgatgtgggccgggttccctacggcacccgcagccgggaggtcatctaccgctatgcgtccgaggacctgcgcttcctccgggaccggaatgtgaagctcatcatcgccgcctgcggcactgccagctcggtgatcgattccgccctcaccgaccggctgcccatgccctataccggcgtcatcgaacccaccgcccgggcggcagccgctgccacccgcaataaaaaagtgggcatcatcggcaccgacgccaccatccgcagcggctcctttgtacgggcactccatgccatcgaccccgccattgaaacggtgggtcagggctgtgccctgctggtgccgctggtggaaaacggctacatcgactttgaaaacaaggtcacccgtctggtgctggaggactatctccggcccatccgggaatcgggggcggacaccctgatcctgggctgcacccacttcccgctgctggcgcccatcatcggcgacatgctgggcgaaggggtcaccctcatcgactcaggcgccgccaccgccggttatatccgggaactgctccggcagaccggcctggagaatccccgtactgaaggcggcgtgcagcggtactacatctcggagcacaccgagacctttgcccgcaccgctgaactctttctggggcatggcatcaccgccgaatacgcggtggcggcactgccgctggaagcggaggaacaggcatgaccccccgccgggctgtggtggagctggagctcatcagccggattgaccaggacggcgactgtaccgagacccggacctttgcccggggagaactgacccgtctgcgggacagtatcaccctggcctaccgggaaccggacggagacagccggacccagatccggctctcggaaaacggacaagccctgatccaccgcaccggagaattttccggacgcatcccggtctgtcccggggaatgggcagagtttctctatcacactccctacggcgacctggaactggcctgtgaagggctggaactgctgctccgggaagaaaacaccgccgaacagctggtgctgcgttaccgcatcggcacaccggacggcgatattatcagtgaaaatcacatcaccatcatatataaggagagtgcaaattaaatgacagcaaatcggatcgcagacgctcagaagcagctcgataccctgatccgcaccgcctatgccaaggcgttcccgggcaaggagatgcgggatttcatcattgagatccccaaggatacctcccacggagattttgcctccaatgccgccatggtcaacgccaagaatgccggcaaggctccccgggacattgccgccgccctgctggaggccatggacttcaccggcagctactttgttgccgctgaaactgccggccccggctttatgaacttccgtctgggtcagaactggttctcggactctgtacagagtgtcctggactgcggcgctgactacggccgttcggattacggccacggcgaaaaggtgatggtggagtttgtttccgccaaccccaccggcccgatgcatatgggcaatgcccgcggcggcgccatcggtgactgcctggcttcggctctggactttgcgggctatgaggtctgccgggagttctacatcaacgacgccggcaaccagatcgtcaaattcggcaagtcgctggaagcccgctacctgcagctctacctgggcgaggacgctgtggagttccccgaggacggctatcagggcgaggacatcaaggtccgtgccaaggaatttgccgacctgcatggcgacaagtatgtgaacgccccgtctgaggagcgcacccaggctctcatcgactatgccctgcccgccaatgtggaaggcctgcgccgggacctggagaagtaccgcatccagtatgatgtatggttctcggagaagagcctgcatgagagcggcgctgtcatggatgtggtaaagctgctctccgaccgcggcatgacctatgagaaggacggcgcagtctggtacaaggccaccgagttcggcgctgaaaaggacgaggtcctggtgcgtgccaacggcattcccacctacttcaccgccgatattgcctaccattacaacaagttcgctgtccgtggctttgaccgtgtcatcgatgtgtggggcgctgaccaccatggtcatgtggcccgtatgaagggttcgatggatgccatcggtctggacggcagcaagctggatgtggtactgatgcagctggtgcgcctgatgaaggacggtcagcccttcaagatgagcaagcggaccggcaaggccatcaccctcaccgacctgctggaggagatccccatcgatgccgcccgcttcttcttcaatatgcgggagcccaactccaccctggacttcgaccttgacctggctgtggaagagaccagccagaacccggtttactatgttcagtatgcccatgcccggatctgcagcattctcaagaacctggctgccgagggaatttcgccccgtccggtcactgccgctgaactggatctgctcaccgccagcgaggaaaaggaactgatccgcaagctggctaccctgcctgaggagatcatcggcgctgccaagaactatgaccccgcccgtctgacccactatgtcatcgacaccgctaccctcttccacaagttctacaacgcctgccgtgtcaagggcgaggaagagccgctgatgcaggcccgtctggccctgtgcatggctacccgcattgtcatcgaaaatgttctgggactgctgaagatcactgccccggaatccatgtaaacccactgtttctgtcttacggaaaggactgtgattatgaaggactatccccctttgccggacggactcccacgggtcctgagtgcttcttctgccctcaccgcctgtcccgattcggtctgcccggtactggatgccccggaactggaagagctgaacggctcacccgaccgctggatcgccggacggctccgccgcctgcccctccgcaatgaggacaacgaaccccggcgcatccgggatctctctgccggctatgcggagcagggctttgagctccgccgtctgggtgcccgactgctgctggcagacggtgtcatctcggttgccgaagcccgtgccgccgttctgggcggacggcagaccggcctgccggtgatgatctgtgtggagctggacgacgagggcgaaacccccgagggagttccctttgcttcgatcctggcgtcggttcagcatctaggtgtggctgctgtgggcttccggtgcagcggtgaccgcatcgataccctgagcattctcggacagcatgccgcctttgcggcagtgccgctgatgccggtgctccgttcccggggccgcagcccggaggagatccaggtgcatgccatgcaggctctgcgggccggcggagatctgttcctgctgggcaacagcatcgacgatgcccaacttgccgccgccgaagaagccctggcggactaccgtcccaccgaccgggtcatcgaacaggaccgggaaacgctgttcatggcctgtgaggcggaggccttctatctccagccggacgggctctccttctgtgagccgatcccctgccagtacgacatgggcgcggatattctggaggcggaggcccagggctgtgatgtgctgaaggtctatgtggactccccggaggacgctgagaactttgcggaaaattcccacatgatccgtctgccggtgtgcatctcctcccatcacgaagtggcgttggagatggccctgatggaatacaacggacgggcctttgtggatctccagtcggaactgaccgactcggaactctataccctggcaaagggctacggagccgtcgtagtctgattcttccagacgacactgtctttgaggcagtgtcgttttttcatgcccggattttctcttttccgcctttattttcctttcctgtaaaatatattctaaatctgcttgtattctgttcacaattttattataattatcctataataacccataataaaatgtgattttctatgttatttgctgtatcatggaaaggactgaaacattgagtgaacatgtgggagactttatttaccaagaaacaggagggtgctgacctgccggatgccggaatggatcagccgaaatccccggatacggaccctgttccatctgctcctgctttcagcatcgcagttacgccgaagtgcgcccagttctcaaagctctacaagctcgcgaacccggaaaagagccagtcggtgatcctgctcaccagctcggctccgaaccgggaagcccttgctgctgatgcggataaaatccgggcgcagctcgaattctttgccaatgcgagaatgcagcggttagccagactccaggaatccaggtccgccaggaatctggatgaagatgtctttgtctacataaccgaggatcagatgcttgccttcttcctgctggttccgcccatcgggaacggcaagaccctgtccggctcgaaaatcctccagattctcatcgaccatggggtgagctatggtctggactttcatttcatctataccctgccggagcgggaaaaccggtatttccgcttctatctgggcgccagcggcaccatgcccgaggacggaagggacggctatatcgtagagctgtaccagcgtgagctctatgcctccctggaacagaccgaactgagccatgtggactatgcacagctcagcctgagcaagaagatccagaaaaacggcgtgatctgtgagatcgtaccgcccacagccgggcgctcgggcatcacagtgaagcggaaccttctgctccctccgccccgggacggacgcccggcggcgattcccatggggcgcaacacctgcctttcagaggacggacggtacctcattgcgcagaaggatggcaatgtggcctatgccggcaacagcttccaggtaaagccgatcctggagatccggcacggaattgaacccggcgaccagcaggacatcaaattcctgggggacatccatatccatggcgatgtctgtccgggggtttctatccgggccaccggttcggtgcatattgacggcgttgctcaggactgcaccattgaagccggtgagagcgtcatcgtcctggacggcatccaggggcagtacagcaccaccatccgggcacacaagagtgtctatgccgggtatctggagcactgcaccgtctatgcccgggaatcggtacaggccaactgcattgtggactgccatgtctactgcaatggcccggtcacagcccgcaccgggctcggagccatcgtttccggctccatccagagtgccaagggggtttcctccaaggtgatcggctccaaggcagctgtccggactgagatcatcatcgccggatgcccgtatgacgccttcgaccgggaggagatctcggcagagctggaaaacatcaacaagaatatcagacgacttgcagagtgtccggaaacgccggaaaccaagacagcgctgtccaaactgcgtctgaaccagtatgtggtccagatgaagctgaataagctcgaaaaggaagcccagtcccagcggctgcctttggatgtcaaggatgcctgtcctctgagatgcagccggattcatccgggggtatgcatcaccatcggaaaccagtccattgaaatggacaccgaaaagacagactgtgcgatcagtatcaatgcggaaggggcgctctgttatgttgaatccaggtaaagggggattttgtggactccttgacacatgaggaaatactggaagtgctcgactgcattctcttccatacaactgaaaaaatggccggaatgcacatccgcagccatccgcatgatctctcggacgacctctgctgtgtcagtgccagattcgaggggagctgtgagctgacccttgcgctctatgcggaccggttgtttttccggcacctggcccaggagattttccaggaccccaatatcacagaagacgatatatccgaagccgccagagaatacctgaatgtgatctgcggcagactggtgggaaaggtatccaaactgatccaccggcccaccactttccggttcccggtctataacggggactactgtgtgctggacagcgagctggaatgcttctgcaagtcccagtacatcaacgaggacaatgaaggcctgatgctggttctgacattgtcgcccgtcaacaacgaacggcaccacaataccaaatgcaaactggatcatttggagaatatcaataactttaaaggagcagtgtaaaatgactaaaaagattatggttgtagacgattccaaggtagcacagctgcagctgcagcgcatcctgtcggattctccctatgaagttatctcctgctgtcagaacggagaggacgctgtggagcagtatcgggtcctgaagccggatctgatcacaatggatattctcatgccgggtctggacggtctggaagctgcccgcaaaatcctggaggaagatcccgatgccaagattctgatgatctcttccctggcctatgatgagaccattgaggagtccaagaacctcggtgcgaagggcttcctatataagcccttcgaagcggaggatgtgctgcaggctctggataagatcttcgctgaataacaaaaaggcgcacagggttttcctgtgcgccttttttcttgacatctcccacaggttgttgtatagtaaatatatagcaaactatatatttactatataacggaggcgccggaatgaaacagtcaaatccccgcagacaggtcagcttcaacatcgaggaagaactctataatgagttcaagaagcggatgctggacgatcacaccacccccaccgcctatctgacccggtgcatccgggaacgggtggagcgggaaaccgtgcagttccaggtggacagccgtctgtaccggcagttcaccgagctggcccggtcccggaatgccgagccggaggaactgctgctggactatatccgccggacggtggaagaggccgggaaggaggaagcgtgatggagctgatctgtccccagtgcggcagggaccgcctgtggtatgacccgtacaccgggaatttcgactgcccgacctgcgggactcccactctgccggagaaactgacctgcccgctctgcggcaaagccggctcactccggacagaggacggaatcctctgctgcggcagctgcggcgaagtcctgtgtgacctctgcctggaggaaacagccctggactactattatgatgagattctcggcggctatgatggagaatccgccggcgaggtctgggacggaatggacgattagcagaaacagcgggaactgccctgtgcagccccgctgtttttatttctgtttctccggcgttctatcggactctctggaacatgggatgtgattcccggaactgaatcagatcccaccggttgccatacagatcttcaaagactgccacggtgccatagtccgcctctttgggctcccggacaaagtggattccccgttcctgcatctcccggtagtcccgccagaaatcatcggtacccagaaacacgcccgccggtctggttcccgatgaatgcctcctgctccggcttagaagcccgggccagcaggacagtggttccatgggaaccaggcggtgccaccaccacccagcgtttatcctgttccggctgatagctgtcctcgatcagggtaaagtgcaggcggttggtgtagaaatcgatagcctcatcataatcccgcaccaccagtgcaatatggacaatggtctgcagcatggttatacctcctcatggtcctcagatgttctctcctgagggtaccatatcggcccgctctttgtaaagccctgtaccacaagcccgactgcgaagaaaagcgagcctccctgtacagggaggctcgctcttttcattttatgttattgggcagaggggagctttaccagcttctgcagccgctccactgttgccgacctggtatccgggtaggttccgaaccggaactcgattcccagcttttcatacttctgacggcacatggtgtggaaaggcagcagctccacccgggtgatgttgtcatagggagcgatgagctcgttaagccggtcgacattctcctcggtatcgttgaagccctctacaatgacctgccgaatccaggtggggatcttccggcgatgaagctcccggaggaagtccatagtctggcggaggctgccgccggtgtattcccggtagtcctcctcggtggtcatcttgatgtccagcagaaccgtatcggtttcgtccagcagtgccattacccgttcgtccagcacacacccgctggtatccaggcaggtgttgatgccgtcagcatggcagagccggaacagctcagtgacaaactccggctgcatcagggcttcgccgccggatacggtcacgccgcctgtttcaccgaagtaggtcttgtaccggcggatcttctggaacagctcttcggcttccatctcggtgccggcattcatggcccaggcatcgggattatggcagtaagcgcaccgcagcggacacccctgcaggaacaccacgaaccggatgcccggtccgtccaccgagccaaagctctccagtgagtgtactcttccggtcataggcggtttcgctcctttgtgttacattctgtcgtggcaggttctggagattacatccagctgctgctcccgggtcaggtcgatgaacttcactgcgtagcccgatacacggatggtgaagtttgcatactcttccttctccggatgctccatggcatcgatgagcttctcacgaccgaatacattcacattgaggtgatgcgcgccctgatcgaagtagccatccataacccgtaccagattgtctgcctgctcctgttcgctgtggcccagggcttcggggttgatggtctgggtattggagatgccgtccagtgcccactcatagggcagcttggcaaccgagttgagcgaagccagcagaccgttctgctctgcgccgtaagccgggttggcaccgggagccagaggctcgcctgccttgcgtccgtcgggcatggaaccggtggccttgccgtataccacattggaagtgatggtcaggatcgaggtggtgggctcggaatcccggtaggtgtggtgcttcttgatcttggagaggaaggtgcccagcagccataccgcgatgtcgtccgcacggtcatcatcattgccgtaccgcgggaagtcaccctcggtgatatagtccactacgatgccggtctcgtcccggacggtcttgaccttggcatacttgatggcggacagcgaatccactacatgggagaagccagcaataccggtggcaaaggtgcggcggacatgggtgtccagcagagccatctcagcggcctcgtagtagtacttgtcgtgcatgtactggatcacattcagggtgttcacatacagttccgccagccagtccatcatctggtcatacttgtgcattacctcatcgtagtccaggtactcgctggtgatgggccgcagctcggggccgacctgctcccgggtcttgacatccacgccgccgttgatggcgtagagcaggcacttggcaaggttggcacgggcgccgaagaactgcatctccttaccggtctgggtagcggatacgcagcagcagatggagtagtcatcaccccataccggcttcatcacatcgtcgttctcatactgtaccgagctggtacggatggagatcttggcggcatagtccttgaaggctgccggcagtgcggacgaatacagcacagtgaggttgggctcgggagagggtcccatattctccagggtgtgcaggaaacggtagtcgttcttggttaccatggaacgaccgtcgctgccgatacccgctacttccagggtagcccataccgggtcaccggagaagagctggttataggagggaatacgggcgaacttgaccatacggaacttcataaccagatggtcaatgagctcctgggcctcctcctcggtgaggataccggccttgaggtcacgctcgatatagatgtccaggaaggtggagatacggcctacgctcatagcggcgccgttctgggtcttgatggcagccagatagccgaagtagagccactgtactgcttcccgggcattctttgcgggccccgagatgtcatagccgtaagaggcagccatcttcttcatctggcccagcgcacggtactgttcgctgagctcttcccgcagacggattacatcatcggtcatggtcttgtcgccgcagttatcgaagtcatgcttcttctgctccatcaggtaatcgataccatagagagctacccggcgatagtcgccgacaatacggccgcggccgtaggtatccggcagaccagtgatgatcttattatgacgggccttgcgcatttcaggagtatatgcgtcaaatacgccctgattgtgggtcttgtgatattcggtgaagatcttgtgcagctccggatcgggggtatagccataagtctggcaggcttcctccgccatcttgatgccgccgaagggcatgaacgcacgcttcaggggcttatcggtctgcaggccgacgatcttctccagatccttgcattcttcgcagatatagccaggggcatgggatgtcagggtcgaaacgatgtcggtgtccatatccagtacaccgcccttggcgcgttcttccttctgcagcttctgcagaatcccccagagcttattggtcgcttcggtaggacctgccaggaaggactcatcgccatcatagggcttgtagtttttctggatgaaatcccgtacattgatttcttccttccacagtctgccctcaaaaccattccactgttcgaactgtgtcatttagtttcctcctgcatgtatcaaaatcccgccggaattcctgtatgggaaaccggcccgtttgaaagattcagtgtccgtaaagacaggaacttctcctgccggacttctgccgaaggtggagaatcggcctgatttaagtatacggatttttggcctgaaatacaatccgcaaactatacaaacacagtacactatgccgttcaaatcctgtatataaagtcgattcaggcaaaacaaaagcacaatatgttgtatatagtaaataaaatatccacaattcaaggaacaatttgacaattatcaaaatgttcttgacattcggctgcccaatggctacaatatcatttagatagctatcgaaatgtaaaggaggggactgtatgggctttcatcagaccttcaaggcactgagcgaccccacccgccgggcgattctggagcggctgaagaatggcaggctcactgccggggaaattgcttccgcctttgatttgagtgccgctacggtatcccaccacctggcgatgctgcgccaggcggagctggtcattgaccagcgggagggcaaacacatctattatgagatcaacacctcggtcattgacgagatcctgacctgggtgacatccctgagggagggcgacaaaacatgattcgcaaaaatatggtattcctgtgggtgacagctttgctgccgctcctgctctgtctgtggttttatccccagctgcccgagctgatccccaccaacttcaataacggcgagatcaccaaatatggccccaaggccaccatctggattatcggcggactgggcccagtaattgcgctgctctttaccctgctgcccatggtggacccccgccgccggaactatgaccggctgggcagccggtacaatctgctggcaggcggcgtaaacctgtttttgctgatgatgaccgggctgatcatcgccgaatccctccgtcccggcagtctgcgggtggaaaacctggtctttgccgccatcggactgctctttgccatgatgggcaacttcatgcccaaagccggcagcaactttgcctttggcatccgcaatatgtggaccctctccagcgaaaccgtctggaagcgcacccatcgcatggcaggcaaactctggtttgccgggggactggtgctgttcctgctggggctttccccgctggagaaaatggccctgtacgcaccggctgtggcgatcttcctggtgctgggactggtgcccactgcctactccttcctgctctggcggcaggaaaatcccaaccccggacactgattttccggaattctgcccccatccgacaccggcgatgcctttcctggctctgccggtgttttttattggcagattcaccgaaaagcgggggattttttcggtttgtcaacggcactttgggatggtaaaatgaaaacagacagagccgcgcgccggctcgggaatttactgtgaaagaaggttttctgtatgatcggaaatacacgcatcacacaggcgatgaaaaacaaaatggcagaactggaaaaccccttctacctctatgaccaggagaccattctcggtcaggtacggcggctccatcgggatttccccgactttgagttcctctattccatcaagaccaatcccttcctgccggtggtaaagaccattctgggcgaaggtctgggactggatgccgcttctctgcgggaagtggagatcggtgtggaatatggtctgcccaaggagaagatcctctattcggcacccggtaagaccgagcgggatctccggggcgccatggatcatgccattcttatcgccgacagcctgcatgagctggaactcatcaacaagctggcaggtgaaaagggtgtcaagctgggcgttggtgtccgggtcaaccccgatttcaccatggacgccgatcacggtgctgccggtaagttcggtattgatgaggatcagctctttgcctatgacttcgcaaagctgcccaatatcgagctgatcggtatccatgtccatgcccgcagccaggaactccatgtggaagtgctcaagaagtactatgccaatatgtttgctctggcccagaagtgcatcgacaagctgggcatgaagatggaattcatcaacatgggcggcggtatcggcgtggcttactccactgaaaacgataccgatctggacactgctgccctgggcgcagaaagtgccgctatactggcagaactccgtcagaagctgggcggcgtgcgggtgatcattgaaaccggacgctatgcagtctgcactgcgggttattatgtcaccagggttgtggatgtcaaggagagctatggcaccaagtttgtcatggtacagagcaccctcaatggctttatccgtccgtcgctggcacggctgatcgctgcttacctgcccgaaggcgctgttgccaagggcaatgagccgctcttcaccaagatggacgcctttgacttcgagctgctcaccgatgagaccgcttcggagaaggtaaacctggtgggcaacctctgcaccggtaccgatatcatggcagccggcatcaccctgcccaaggccaaggtaggcgatattcttgccatcaccaaggcaggcagctatgcctatgtgcttactccggtacagttctcgtcccagccggctcccggacagttcctgctgtgcgcagacggcagcatgattgctgaataagcgaatccccgcaataaaaaggaggctctcccccgggagggcctctttttctgcataaaaaagaactcccacagaaaaactgcggaagttccaggaagaaaagaaacaaaggatatttcagaccgggggctaaaatttggagagagccgcaccggtaaaacaccctgtttccccaaaacgaccagaagccgacacttgctctcgtacaggacagccagaggtcttgttttggcaggatagcggagggaaatcccctctgttaaaaccgggagcctgtgttcccggttttaacaga

SEQ ID NO: 2575 - DNA, 32759 bp, Unknown
  16S sequences of unknown bacteria
cgcgaagcgactgcgttcatgagcaagtagcgaagctaggccctgtcagcagagctgcagggatggattgcgaatgtccgctttacaaactggattgagaacaaggcgatgagacggaattttggaaaaatttggagggctgcgaaatgactgaaaaagaaaaaatgtactgtgaaacagtaaaaatcgttccggattttacgagagacgatatggtttcccctcttctgtttggtaacaatctggagcatactaggtcttgcgtgaataaggggatttcggcacagatgctgagaaaccgtaaatttgtcggaaagccggcatgctacgacggaacaccggaagaatggttcctgataggcaatcatgtaaatatcctgtttaacgaaagtgaagatgtaatcgggacacatataaatgaagtgtatacgcgtcatgccgattcttatcacatgaaacgccgccatgagtgcaatgctgttacaattaccaattaccgcagagaagctgcagggataggacaaaaggatattccggttcaaaaagatatggagtatgaattccggattgttgtaaaagcgtggcagatgacaaagatgagaatcgtattatctgacagagacggaaatgtatgctacgacgaaaaagaaattgtttttgataaaaaagaatatgaagcaaaaacagtgttcttacatacagcaaaaaaggatgaaaatgcaaggctttccatagctttttgcgaagaaggtacagtatcgatcggtgctgtttcattaatgccgggaaatcattttcatggaatgcgtccggatgttgtaaatttgttaaaagagatgggagtcagacttctgcgctggcccggtggaaattttgccggtgaatataactggaaagatggtttattacctgcagatatgagggcaccatttgagtcacatttgggtctggagacacagccgcattctctgggatatgattttaatgagataaatacagatgattttgtggctctttgtaaagaaatcggagcggaaccatttatcaccattaatccgacctggaatacagaagaggaatgtgcccagtgggtggaatattgcaacggagatgcggacacggaatatggacgcataagaatcgaacgaggatataaagaaccatacaatgtaaaatactggtctttgggcaatgaattcggttatggccatatggaaggtgacaatacggcagcaggatatggaaagaacggaaaacgttacggaaaaaagatgttagaggtttcacctgatttggtattatgttcctcaggcccatatcccaatagggagtgggcagaacaatctgcaaggcagctgatggaagtcgcgccgatggttgccctgcattcatacgttgcacaaccgttctttatggaaaaggaacagtatgaagaagactattatgaatgtattgataaagtagatacacaatgcaggaagctggtacatcagatgagagaggagctgggcgatgacaggcttcgaatctcatttgatgaatggaatgtatggtatgcatggtacagggctaagagtgtaaatgacggtatttttacggcgagcatgctgcatatgctgattgaggaggcagggccgtccggaatcgatatggcctgccattttgaagccgttaatgaaggggcaatccgtgtggagtgggatcacgccttccttacaccgagcggtaaaatgttttctgttatgaaaaatcatattggcggaaaaatacggtttgcggcaaaagacgcaatcatgacagaaaaagacggaatttgtatcgtcacgctaataaaccgttcttattcagacgataaaaagtttgtgctcatgcaatgtggagctcctgttgctgctaccttattttcttctgaggatgtgcttccgtattctgattttgaagtgacggatgtaaaacttaatgctattaatgacacgataaacgttcagctgccgaaacacagcgtaatgcttttgcagtttaagaggtaagcttcataaaagataacggtgtaagaagggggaatatggggaatgacagatgaaaaacggcttgcaatgctgaagtggagagatggtattgtggatcttgttctggataccgatgcagcaacagaggtggatgatccatttgcaattgcgtatcttttattatccccggaacggtttcggcttcaggccatttatgcggcgccctttgcaatgaatgagcgcacgcaggatccggcggaagggatggaaatgagctatgaagagatattgcacataatgcggctgtgccataaggatcaggtgtgtccggtataccgcggtgcaaaaaaatggcttactgaaaaaacggaagaagagatagtacagattcgttcggggcgtgtatggtccggatctgaggctgcagaggatctcatccggagatcaaaaaaatatacatcagagaatcctttatacgtgcttggcattggcgcggggacgaatcttgcattagcacttttgaaggatccgtcgatcgtagagcgaatcgtgattatctggctggccggcgatgattttcagaacagtccgaatgtttataatgtgtatcaggaccggcgggcggcgcaggtaattctggattcaggagtaccgcttgtgtatgtaccatgtaattatgtcacgtcccatatgattacaagcgttccggagctggaagcatgtatcggcggaaaaaatgaattgtgcaattatctgataaagatcgtccgggaatatggagcagacctttttgcatggggaaagacgatctgggatctcggagctgcgggaattttgtataaaaaggaatggagccagtgggaggttcgctctgtgccggtgattaccgaacagctgaccttcagcttcggtccggaccggccgctgattgcctgtgtccgttccctggaccgggatgaaatctttcgggatgcatttcagaaatttggaaaagtgaaataaagagccggtgcggaaatgacagattcagacaatttccgcaccatttttgttttggatacagtggacaaatccagaaggattacttataatatacgtatagtttgcagtcagtctgcgatgccattgaggttttgctgaagaaaaggatttgccgaaaaaatattcgggaatatttcgacaaaaatgaatgatgtcgtaggacgagactgccgaaatttcaggaggtcaaagaatggctagcagtgtaacgattgaaaagctggcggataagatgaagctcacgaatctgcttccgaatatcagcatggcgggcaagaagatcgtgacgtcagagatcaaccgtccggcgcttcagcttaccggatattttgatcatttctactcagaacgtgtacagattatcggatatgtagagtatacttatctggagcatcttccgagggaggcgaagcttccggtatatgaaaagtttctctcttatcatgtaccgtgtatcatttatacgacgatgacagagccagatgaggacatgctccggctggcggagcagtatgaggtaccggtatttatgacgaaaatgacgacgtcatcgtttatggcagagatcatccggtggctgaatgtcgagctcgcaccgtgtatctccattcatggcgtattggtcgatgtttacggtgagggcgtgctgattatgggcgagagcggcatcggaaaaagtgaggcggcgctggagctgatcaaacgcggacaccgtctcgttacggatgacgtcgtggagatccgaaaggtcagtgatgcgacgctgatcggatcgtcaccggatatcacacgacattttatcgagctgcgcggtatcggaatcattgatgtaaagacactgttcggagtcgagagcgtcaagaatacgcagtccatcgatctggttatcaagctggaggaatgggatcgggaaaaggaatatgaccgccttggcctggaggaggagtataccgagtttctgggcaatcaggtcgtctgccattcactgccgatccgtcccggccggaatctggccgtgatcgtagaggcagcagcagtcaaccaccgccagaagaagatgggctacaacgcggcgaaggagctgtacaaccgcgtgcagaacagtatcatgaaaaatgcgggaaagcagaaagaggagtagagatgaagaagtattgttttggaattgatgtaggaggaacaacggtaaaatgcggacttttcactgttgacggtgaggttctggataagtgggagatcgagacgcgcaccgaagacaatggtgtgaatatccttccggatgtggcagcgacgatcaaggcaaagatcgatgagaagcagctgaatgcagaggaaatcgccggtgtcggcattggcgtaccgggtccggtcaatgatcagggtgaggtaccggtagcagtcaatctgcactggggattcactccgatcgaaaaagagctttcagagatgaccggcctgactgtaaaggcaggaaatgatgccaatgtagccgcacttggcgagctttggaagggcggcggagcaggccaccacaatatgatcatggtgacactcggtacaggcgtcggcggcggtatcattatcaatgataaggtgatcgcaggcagccatggagcaggcggcgagatcggacatgcgcatgtcatcgacggcatgcaggaggcatgcaactgcggcaatcacggctgtctggagcaggtagcttccgcgaccggtattgcgagactcgcacgggaagcgctggcagcaacggatgctccgtcggtgatgcgtgaaaaggaaaatatttcagcaaagaccgtatttgatgcagtaaaagaaaatgatgcgattgcaattcaggtggcagagaaattcggctcttatctgggcaaagcactggcgacattttcgacggttgcggatccggagatcatcgtaatcggcggtggcgtatccaaggcaggcccgattcttctggattatatcatccacccgtttaaggaatatgcctttacaccgtgcaaggagacgacaaagtttgcactggcgacacttggaaacgacgcaggtatcttcggtgcggcgaagctggtgctgtagtacataataaaagaacactgttacgggattaactggaacagtgttcttttttaatggttttttacgcgctgttctttttcaccggaatgtggtacaatggccggtaatggagagcctgtagaaaatgaatgcagtcaaagcggtgcacaggcggcagaaatgagaaaccaataccgacatggcagagtatggagatgagaaaatggagcgacacccattgtgcagaaaaatatatctgaagcttgcgcctccgacggaggaggatgcgcgcggagaccgggagcggatccttgacgggctgaccggtgagtatacgacagctgtgatgccgctgcaggtgatgcgaaagctgtatccgctgtgccgaaaggccgggtggaaggtgacgctccttatgggatttcatgatggcgtatgggagattctggacattgaggccggtgatacgacggatcagctctacgggctggcagtcgactacgggagtacgacactcgtgatgcaggtagtggatctgcacacaggagaggcattgacgcagcagactgcctttaatccacagatcccgtatggagaagagattttaagccgtattttttatacgaaggaccagccggagcatctggaggagctgcagcacaagacggcggagggattcaacgcactgatccggacgtgtgaggaagtgaccgggatcccaaaggatcagtatggcgcgatggtgattggcggcaatacgacgatgatccacctgcttctggggctgtctccctggccggtatttgagacgccgtttgcaccggtcgcgcagcagcctggctttgtacgggcaaaagagctggggcttgagctgccgggctatgtgtatgcatttccgtcggccgcgaactatcttggcggggatatcataagcgggctgctggcggcagggctggatcagtcgccggagctgtccgtatttatagatatcgggacaaacggcgagctggtggccggcaattccgagtttttgctcgccggcgcaggggcggcaggaccggcgctggagggcggcatcagccgatatggaatgcgggcggataccggggccgttgatcgggtgacggttcagaaggatgatctgatgctgcatgtgattggagatgaaaagccgcggggaatctgcggctccggcattgtggagctgctggcggggatgtttttaaacggctgggtggatgcacttggaaatctgaatccagacgcatcttcgcggattatccgggtgaaaaatcacctggacgaggagcgggaggaggctgctgtctgctatgcatgggcagcggagtccaaacagcaggaggatctggtatttacccagaccgatattcatgaatttatccgcacgaaagcagcggcccatacgatggtcgcgtatctgatcgaggagttcggattgcatacggacgacatcgcgcatttctatcttgcaggcgcgtttggaaaatatctggatctggagtcggcgatcacgatcggcatgtacccggatctaccgcgcgagaagtttgttatgctcggcaattcctctctggatggtgcacagaagctgctgctggaccggcaccttgtaatgcgggcaacggagctggtgaagaaaatcacatacgtccagtttggcaatgcaggagattttgtcgagaaaatgcatgcggcacagtttttgccgtatacggatctggacgaatatccgagcgtgaaggcgaagctggcgcgtggataaacatcccactttgcgatatatctcacccgaatccggttgctgtagcccaaggcatttttgaagaagagagtaaggacgggaacataaaaaggagatcggcggccatgaaaattttactgacggcaatcaatgcaaaatacatccattccaatctcgcagtgtacagcctgaaggcatctgccggaatatatgaagatcaggtggagcttgcggaatatacgatcaaccatcagatggatgaaatatttgcaggaatctatcgccggaagccggagcttttactgatgtcctgctatatctggaaccggcgtgaggtgacggagacggcggcttccctgaaaaaggtactaccgaatctgaagatatgggccggagggccggaggtgacttacgatgcggagcattttctgcgtcagaattcggcatttgacggtgtgatgattggagagggagagcagaccttttaccggctgctggactattatataggaaaaaacgggacactggagcagattccggggattgcgtttcgcgagtcagcaagggtgaggcaggaggaagctgcccgtgtttcagatgtcggggagcaggagaccggtggtggatcagcgtttcagagcacattaccgctgattcccacccggaatctcgaccaccttccatttgtttatcaggatctgcaaaaatttgaaaatcgtatcctctactacgagacgagccgtggctgtccgttttcctgcagctactgtctctcctctgtcgataagcgcgtccgataccggagcatggagctggtgaagaaggagctgctgtattttctttcgaggaatgtaaagcaggtaaaatttgtagaccgtacctttaactgcagccatgcgcgcacattggagctgtggcgttttctgcgggatcatgataatggcgtgacgaattttcactgtgagatatcggcagatctgatcaatgcggaggagatcgaggtgctgaaaacgctgcggccgggacttttacagctggagatcggagtgcagacggtaaatccggatgcactgcgggcgattcaccgtaccgcgccgtttgccgagattgcagagaatgtgacgcagatcgcacaggcgcacaatgtccaccagcatctggatctgattgcagggcttccatatgaggattttgagagcttccgtacctcatttgatgcggtatatcagctgtatccgcaggagctgcagctcgggtttctgaaggtgctgcgtggctcagagatgtatgagagggcagaggaatatgggattgtataccgcagtacgccgccctacgaggtgcttgcgacaaaatggattacctgtgatgagctcctgcgtctgaaggagatcgaagaaatgctggaggtgtattacaacagcctgcagtaccgcaatacgattcgggcggcacagcagctctttacacgaccgatcgagctgtatgaggcgttggcggattattatgggcaggaggggctgaacgggaaatcgtggtcacgcctgcagcggctggagatcctgcggaggtttctgcatgcagtggatgaacggacagaggccggcatgccgcgctttcgcggaagaagcgaagagccggcagatcctgcctgctttgatgaactgctgacgctggatctgtatctgagggagaatgcgaagagccggccggattgggctcctgatcagaatgaagagaaggacgcggtgattgaattttataagaaggaagaagcagcacatcactatctgccggagctggcggatcggagctggaagcagctgatgcgcatgacgcatctggaatattttgagcactgccgtctggcgaaggtgtcgccggaggtacaggcggagccggtgaagcagtcttgcgggacggaaccgatgaccgggatgaaaaacagaccgggatcagatagcagccggacaaagcgcgacggacagtgggtgctgttttgctatgagaagcgggatgtgctcacgggagacgcacgggtgcaggtactccccactgatttttgctcagtgcaattgaaccgaatcaagcagcattcggttatgacatatcttaaggatggacccgtttgcgggaagattaagtagcgaagcggattgcgaatatccgcctgacaggagaaaatatgcagcatacatatatcgcgctcgaccttgagacgacagggctgagcgcaacgaaggaccggattctggaaatcggtgcagtaatggttgagaatggagaggtcacaggaacctacgagacatttgttgataatggcgtggagatcccggagcggatccgggagctgaccggcatcacagaggatatggtggcgggaagcccggagatgaagccggccgtagagggctttctggcattttccggagagaagccgctgctgggacataatattttgtttgactatggcttcatgaagcgaaatgtgcagaatatcggaggcagctatgagcgtgacgggatcgatacgctgatgattgcacgtgcctgtctgccgcagcttccgagccggtctctggacaaggtcgcagaatactttggaatatcgcagcagcatcatcaccgggcactggatgacgcgctgacggcggccagagtttatcagcggctgtggaaagaattcggagaacagcaagcagcgctgtttgcaccgtcaccactttgctttcatgtgaagaaggagagcgccatcacaaattcacaaaaaggatacttgcgtgatttattaaaatatcatagaatagagagtaatgtaaaaattgacacattgacaaaaagcgaggcatcccggatgatagacgggatcattctgcagtatggcaagattataaggagatagctatgataaattttaacagttccaagacaaagcagaaaattgcggcggtgatcgtcatcgtgatcgtagctgcgatggtcatcggaatggtggcaggagcatttttgtactaagacattttcagacatacgcaatgagaaatttgcaatagcaggacaggaggattatgcgaaaaaatttatggacagcgcttgctgtgactgcggtagctgcgataatatccgcagttccggcggcagcggcagactctgatgtcatcagcgacggcgtctatatcggagatcaggatgtcggcggtatgacgacgaaggaagcggagcagtatgtaaagggtcaggtcagagcgctggaagatacgacggtgaccattcagatgggcgaacagcagagcacaaagaccttaaaggagctcgggctgaaatgggacaatccggatctggtacaggagatcagccagatcgggacgaccggcaacatcatccgccggtataaagaacagaagagtctccaaaatgagaattcacgctatgagattgaatataccgtggattcatctctggaggaggcgtttgttgattcctgcaacgcttacaattcggatccggtcgagggctccgtttatatgggggacgacggacagctctatgtcgaaggcgggacagacggcctgacgctggatgcagaggcgaccttgaaagaagtgcaggcggcgattggcgagtggaaggctgaggacatcacgatcgaggcgacggttgagcgggagtccccgcaggtgactgcagagacgctttctaagatgaccgatgtgctcgggacggcgacgaccgattattctgcatcctcttccggaagagcgcagaatgtcgaaaacggtacttcgaagatcaacggtactttactgatgccgggtgagagcttttccgtgaccgatgcagtcgttccgtttaatgcggaaaacggctatgagctggcaccgtcctatgaggcggggcaggtcgtcgattcctacggtggtggtatctgtcaggtgtccacgaccttatacaatgcggtgctcaaggcagagcttgaggttgatgcccgttcgaaccacacgatgctcgtcggctatgtggatccgtccaaggatgcggcgatcgcagaaggtgtcatggattttgtatttacgaatgacaaggatagcccggtctacattgcgggggcggcatattatgggacactgacctttacgatttttggtgaggagaccagaccggcgaatcgctctattgagttcgtcagtgaagtcctttcacagaccgatccggcgacgaacatcaagctggtggcgaagacggatcagaatgtcggctattttgcacaggtgcagacgccgcatcagggcatgtcagctgtgctctggaagaaaatctatgtggacggtgtgcttaccgatacggtgcaggtcaacagcagtacctatcaggcatctccggcgatctatgaggtcggtatcgtcacgagcaaccaggcactgagctccgcgctgagtacagcgattgcaaacaatgatctgacgcaggtacagaatctgatggcgaacggagtgccgcagcagacggagacggatgcaccacagacggatgcaccacagaccgatgcgccgcagaccgatgcatctcagatggtagatccgccggagaccgatgcggcgacatcctccggagacggggatgtgcagatcatacagtaagcatggcagaagatatacatctgccggatatggaaagaggtgagggcatgcaggaaggaaagctttcagagcgggcgctgaagcgctcggtactgcgtccgttgcagcagacagtacagaaaaagcatcagaacaaagctgggactttggagtacggagcagactgcgcggcgcttgtggaagaggccggctgtgtgacccttttttctacggtaaatacagtgccgggctttgagcatgcgccggataagctgatcgtggcggcagctaatgggctggcggcggcgggcgcagagccggtcgcatttcagatatcggcagtgctgcccacagagtatgaggaaggcaggctgaaagcggacatgaaagcctgtgccgagatggcagatgctgagcatgctcagatcatcggcggacatacacagatatcttccggtgtaatcgcgccggtgtacagcgtgaccggtatcggacgggcgacaaaggagcagtgccgtcaggacgagcggctccgaccggagtacgacctggtcgtgaccggccggatcgctctggccggtacggcggcgctggcgctgcggtatgagcaggagcttcgcggacattatccgctgtcactgatcgagcacgcgaaggcatttgaccggcagatggcagtgggggcggtggctcgagccatcacccacttcggtacggcagcggtacatgatctttctcagggcggtattttcaatgcgctgtgggaaatggcggatcgggcaggtgtcggactggaagtggatctgaaaaaaattcctgtgcgtcaggagacgattgaaatctgtgaatattttgatgtgaatccctactatctctattcggcgggcgcactgctcgtcgggacagagcacggggaggcactggtatctcatcttgcggcgcaggggatttttgccgcagttatcggtcgggcgaccggcggaaaggatcgtgtgatccgaaacggcgaagagtgccgctatctggatcggccgaagcaggatgagtggtataggaggcttgaatatgagagagcaaatattaacgtttctggaaaagaacagtaaaattgaccttggtgagctggcaatcctgctcggatcaagtgaggcagtcattgcaaacgaggtcgcacagatggaaaaggagcaggtgatctgcggctatcatacactgatcgactgggaaaagacttcctctgaaaaggtgacggctctgatcgaggtgcgcgtgacaccacagagaggacagggctttgactccattgcagagcgcatctataattacccggaggtgcagtcagtatatctgatttccggagcatacgatctgcttgtcatcctggaaggcaagaccttacgggacgtatcttcctttgtaagcgataagctgtcgactctggatactgttttatcgacggcgactcattttattctgaaaaaatataaggattacggaactattttcgggaaaaaatcaaaagatgaaaggatgctggtgacaccgtgagaaacccattatcaaaaaaagtaacgtcgattcagccgtccggcatccggaagttttttgatattgtaagtgaaatggacgatgtcatttcgcttggcgttggtgagccggactttgataccccgtggcatatccgcgatgaaggtatttacacactggaaaaggggcggaccttttatacgtccaattccggtctgaaggagctgcgtgaggagatcacgcattatctgaagcgccgctttgagctggaatatgatccgatgcatgaggttctcgtgaccgtcggcggaagcgagggcattgatgtggcattgcgtgccatgctcgatccgggagatgaggtacttatcccacagccggcatatgtttcgtatctgccgtgcgtcgttctggcggatggtgtaccggtaacgattgaactgcaggagaagaatcagttccgcctgacaaaggaggagctgcttgcgcatatcaccgacaagacgaaggtgctcgtgcttccgtttccgaacaatccgaccggaggtgtaatgcgccgtgcagatctggaggcaatcgccgaggtctgtattgagaaggatatttttgtactgtccgatgagatttattccgagctgacatacggtgagcatcatgtatcgatcgcaagcattccgggcatgcatgagcggacattgacgatcaacggtttttcaaaatcttatgcgatgacgggctggcgtctcggatacatctgcggaccacgtgtgattgtagaacagatgacgaagattcatcagtttgcaatcatgtgtgcaccgacgaacagccagtatgcggcggtcgaggcactgcggcacggggatgaggacgtggcgatgatgcgtacagcctatgatcagagacggcggtatctccttcatgcatttaaggagatggggctgtcctgctttgagccgtttggtgcattttatgtatttccgtgtatcaaagaatttggcatgagctcagatgagtttgcgacgcggcttctcgaggaggagcatgtggctgtcgtaccgggcagtgcgtttggagactgcggcgaaggctttgtgcggatttcctatgcgtattcgctggaaaatctgaagatagcgatggagcgtctgagccgttttgtgagccatctgcgcgagtggaaccggtaaggggtgcggacatggcaaagctgaacattgtattgtttgagccggagatcccggcgaataccggaaatatcgggcgcacctgtgtggcgaccgggacaaggctgcatctgatcgagccgctcggattttctttatctgagaaagcactgaaaagggcggggatggactactggccgcatctggatgtgacgacctatctggattttgatgattttcttgcgaagaatccgggtgcgaagatctatatggcgacgacaaaggcgcgtcaggtttacaccgatgtgcattatgagccggactgctatatcatgttcggaaaagagagtgccgggatcccggaagaaattttaaaagaacatccggatactgcagtgcggataccgatgctcgatgagatccgatccctgaacttgagtaattcggtggcagtcgtgctctatgaagcactgcggcagaatgagttcgaccacatgaagctgcaggggcagctgacgagatatgagtggtagagagagccggatgacctgcgacaggctccacttctctgcctgtttgatgctttagttaacaacagacagttacgaacagggtgactgtcgggaaatagacagttctaagagagtgagggtgtgactcataccgagtcacaccctcactgttttaaccgaattaagtatctttagctttcctcggatgctgtctttgtgtcgtcggtttttgcttccacggcttcatcctttgcggtttcttcttccgtctcctgcagctctgcattcatcattgcacgctcccgcaggcttttcttttgtgcaggctgtgcagtagcggcagatgccccggatgatttcgatccgctgcgtgcgtcctttacctttttcgtgttcagtgcgatcttgcggtcaggatagagctttgcgagcttttccagacgggtcgcgccccagatcatgtaggccggaacgacgatggcgagcagcagtgtgcccaggttcatcatgtgcgtgaaaaacagcactgcctgcatcagaatctcggcgacgagcgtcacaatcgagattatttttgttcctttagccttgtccagccggttgcagcgcatcgtgcagaagatgccggaatatatttcccagcatgccaatacgagaaagcagactgcgatgaatcgtaccgtcgagatatccatatttgcctgggtgaggatatccgtgtactcctgttcgccttttgcagcgccggatgcaatcgagaagaggttaatgccgtacattaaagtggaagagacagcagtgacaagaaggataataccgcctgtcatcagtcccattcggccgttcatggccattttcagttctttttggtctttgtaatcgctcataataaactcctgtgatttcgtatgatgctgctgtttgtagaattgcgggagctgctttgcagcggagcaattcgtgggcatcatttagaggtcagaatcccggtacatactccggtattccgtcggggtacagtgatttaaaagcttgaacatacgcagaaacgccgagaggctggaaaatccggatgcgagcgccacctcaatgacagagagacccgggtcgagcagtagcgtctttgcgtggtcgatgcgccgctgattcagatacttataaaaagaggtatctgcatactgccggaacagcctggtaaagtgatatttgctgaaaccggcgagggaagcgacctcctcaagcgtaagattttctgtaaaatgctcgttaatataatggcagattgcaagaaatttatccatatattctttctgtttggcatttcgggcatcaaagcgctgctgtgtattttccgcatggctgcgcccgacaagcacgaggatttcgagaaagcgtgcatagatcgtcgtctcggtaaatggggcgtcgctgaaataagcatttttgatctccagcatcatacgatgcacacgtgcataaatttgaggaaacgactcaggcgtgatcagaatcgccggtcggatcatcgaggtaagcagctccagctcttttgtgcgcagctggccgagattcggctgaaagataatgcgttttccgtgctcgggagcgaagagctcatgcaggatcccggggcagatgattaaaatttccccgggctggatcaggtactccgtttcgccgcagcgcacacggtaggaattttccgttggcataatcagctcaaacggggtgtgccagtgcggtggatagcattcggaattctcattataatgaagacagatctgagtgtctgcccggtaggtgacggtttcgtgaagaccgttcagatttttaatcacgagaaaactcctttcctgtgaaatttaaccgaatcaagcaagtcccctgcttcaattgcgcaaagcaataagcagtgggttgggacttgcttgtatcaggaatgtcctgataagcggcggagataaaatcccgcagattcgccgatatccggaagctgtttatatggcgattgcttttatagctggcattcggatatcgtagtgagaaattgcgatttcaacataagataatatagcaaatattactaaaaaaagcaaggaaaacggataaaagagaattaaacaaacaaaaaaaattggacagttcgaaaaaccgggggatagtgaaagcaatattttgatgccagaaagcaagaattattgagataaataaaacagaggctggtatagtgatggcagaacatggcggaaaatcaaatgactgaggcaggcaggagtaccgataacaatgattgccgggtttgctgtgtgtcggaaaaagcggaaggagcgaatagtatgatcagtaaggagacgaggaaaaaggccagagaaaaggcagaggcactggttggccagatgacactggaggaaaaggcagcacagctgaagtacggagcaccggctttaaaacgcctggggattccggcgtacaactggtggaatgaaggattgcacggggtagccagagccggtcaggcgacggtatttccgcaggcgatcggaatggcagcgacgtttgatacagagctgttaaaggaggaggcagatgtgattgcgacagagggacgcgcaaaatacaatgccagctctgccgaaaacgatcgtgatatttacaaaggactgaccttctggtctccgaatgtcaacattttccgcgatccgcgctgggggcgcggccatgagacgtatggagaggatccgtatctgacaagccgtcttggtgtggcgtttgtagagggcctgcagggagatggggataccttaaaggcggcggcatgtgcgaagcattttgcggtgcactccggaccggaggcgctccgacatgagtttgacgctcaggcgacgccgcaggatatggaggagacctaccttccggcatttcaggcgcttgtgcaggaagcaggcgtagaatcggtcatgggcgcttacaaccggacgaacggagagccatgctgcggaagtccgtctctgcagaaaatcctgcgcaaggactggggatttgagggacattttgtttctgactgctgggcgatccgggacttccatgagcatcatatggtgacgaaaaatgtacgggaatctgcagcgatggcgatcaacaatggctgtgacgtgaactgtggaaatacgtacctgcacattttaggtgcggtacaggatggactggttaccgaggagacaatcacagaggcggcagtccggctgtttacgacgcggtatctgctgggactgattgacggcagtgaatttgatcagattccatatacagaagtagaatcggcagaacatctggctctctcaagaagagccgcgcaggagagcttcgttttgctgaaaaataatggcatccttccactggataaggcgaagctgaagaccatcggcatcattggaccgaatgcagacagccgggctgcgcttgccggaaattaccacggtactgcatctcggtatgtgacagttcaggagggactgcaggattacctcggagactctgtgcgcgtgctcacgagtgtgggctgcgatctgttccgcgaccgcgtggagaatctggcgtttccggatgaccggctctcagaggcgaagaccgttgcaaaatacagtgatgtggttatcctctgcgtagggctggatgagacactcgagggagaagagggcgataccggcaacagctatgcgtccggtgataagagagacctgctgctcccggaatcacagcggaagcttatggaggcgattgctgagacgggcaagcctgttgtgctctgcctgatggcgggcagtgacattgatctttcttatgcagcggagcattttgatgcggtgcttcagctctggtatccgggatccgagggcggaaaggcagcggcacaggtgctgtttggcgaggtatctccgtcaggaaagcttccggtgacattttatgagtctcttgaggagcttccggagttcaccgattaccggatggagggcagaacctatcggtatatgaagggaaaggcacagtacccgtttggctatggcctgacctatggaaatgtttcagtgacaggagcggagatcgcagcgcgtccggatggcagtattgtggtatcggctgaggctgagaataccggtgtggagacggacgaggtgcttcaggtctatgtggaaaatacggactgcggcagagccggaaaacacccggagctttgcggatttttgcgaatccatctgaaggaaggccagaaggcgtgctttgagatcccggtatcaaaggatgtgtttactgtggtcggtgaagacggtgtgcgggaagaaaaaggaacgcactttgtattttatgtgggctgcagccagccggatgcgagaagtctggagctgaccggaaaggcatcactggagatccactacgagcggagatgacggaaaaagcaggagaatgcttgattcggttaaatacagacagggacagggcaaaaagatgctttgtccctgtttttgcggttaaggtaggcaaaagcagtggtctatgctatacttacatcaaaactgcggcatcatcaagtagataaagaaagaggagagaccatgaatctggaacagttaccacaggaatttttagagcggatggagcacatgctgggagaagaatacccggcatttttacagtcctatgaggagccgcgcaagttcgggctgcgtgtcaatacgatgaaaatcagtgtggaggagtttcagagactggcgccgttccatctgactccgatcccgtggatcccgaatggtttttattatgagcgcgaggatgatccggcgcgtcatccattctattatgcgggtctgtattatcttcaggagccgagtgcgatgacaccggccagtatccttccggtgatgcaaggagagcatgtactggatctatgtgcggcaccgggcggaaaggcgacggcgctcggtgcaaagctcgcgggtgagggactgctcgtggcgaacgatatcagtgcttcccgtgcaaaagcactgctcaagaatctggaaattttcggtatccggaattcctttgtcacaaatgcgtatccggcaaagcttgcagagcagtttgccggggcatttgataaaatcctggtggatgctccgtgctcgggagagggtatgttccggaaggatctggcgaatgccagagtatggagtctggaaaaggtgaaggaatgtgcgaagacgcagcatgagattatacgtcaggcagtgagcatgctcagaccgggcggactgctgctgtattcgacctgtaccttttcgccggaagaaaatgagcagacgatcgcatcgcttttgcaggagcatccggagctgcagctggtagagcttccgtggtacgagggatttgcgcacggccgtccggagctggccgacggaaatccggagctgacaaaatgtgtccgcatcttcccacaccggatggcaggggaggggcatttccttgccttactgtataagaaaagagaaggcgaggaagatgtcaagctgtgcctgaatgataattacattatgtcgtcagagaacgtcagtgctgagatggtagaggaagaagcagtacagacaaatgctggaccggagtctccggatataaacaggaaacgaaaaaaagaagccagaagtgtggataacttgaactcaaaccgaaaatcgcgtggaaaagacaagaattccgcgagagagcgtctcgccttgggcggcaaaaaatccggcgtgcagtccgatgaagccgttctggaagaatttttacaggatattgctccggcggccgactatacatttgcggatatggacatccgcaacggacaggtctactacatccagaaccgcgtcccggcaggccgtggcatcccgtttcttcgcaacggcctctattttggtgagctgcgcaagggccgtttcgagccatcccagtcgcttgcaatggccttacgcgcatccgactacgcctccgtcctcaattttcctcagaccgacgaacgcgtgcgccgctatctgggcggagagaccatcgatgtagaagatcttccgtgtgcacgtaaaaagggctggcagctcgtctgcgtagacggttatccgctcggctgggggaagctggtcaacggaaccctgaaaaataagtatcatccggggtggagaatgaccgtgtaaacggcataaaaagtcaaaaaggtaatataaaaatccgtcaagtccggtacagccgggacttggcggattttttgcacgtgtcgggagaaatcatgctttaaatcagattcatttttttctgatgaaacgtgttccgatactgcgaaggagtcatgccctcgtaacgcttgaacagcttcatgaaatacttttcatccgtaaatccacacagtcgtgcaacggtactcaccttgtaggcctgatccgtgagcaggttttttgaaatcgtgatccggacgcggttgatgtaggtcatgagcggatagccggtatattttttaaagaggccggtcaggtaggtcgggtggtagttgaaccgttcggcaattccggcaaccgtaagcggctgttcgtaatgaatccggatccattcaatgatggtcagtatctgcatggggatatcatttttttcaatctgctgggtgatcaggacttctgtggaaagctccatgagtagcaggctcagggcatagtgagaattccatgtcatgcggtaatcctgccgcttggaaatgtccagcaattgtacaaacagcaaagtcagccgctggcttaaagaagaggtgccgtattctggcagcagatagtgctcaggtgttttgggggtattcagcgcggttggattggcgctgaaaatttcttcgtggcgcagcagggcaccttgattgtaaatacagtaatgcgggtcggttacattaaaatgaacccagtaataggacagctttccttcgcagggccggtagccgtaatgtagccggtccgggaacaggataatgaattcattcgaatgaaccgaatagtttttctgcccctgtgtgatgtgtagagttccctgctggacgaggataaaaacgaaggtgtccagaattcttcttgggtgaacaaatccaccttcgctgaccagatttccggaggatacataactcattggaaacttggcatcagaaatgcaatacaacataatatcagatcctttcctgataagctcgtgattttgcctgaaaaatgaacggaaagagcaaaaaaatgtatctttgcatgaaaaaacagatgtattctaaacgaaaaaacagaaaaataaacttaaaaaccgatagcagtattctaacacaagatttgtcgaggagaaagtgaacgaatgcaataaactagatttgaccactttttgttaaaatatggacgttgtttctgaaaaccaaaatgataggatagatacatcagatgagcggacctgcaggaagcgaaaaatgagataaacggaaaagaaaaatggtttgtatttaattcaattttcaaggaggaacggtatgaacaagaagagaatcagtgtagtaatggcgacagcgatggcagcatctatggcatcagcagttccgatgactgcatccgcagatgatacagtagagcttacctttatgggatgggaggcatctccgctggagacacaggcagtacaggatggtattgcaaagtttgagaagcagtacccgaacatcaaggtaaactatacgccgggtcttagcggatccgaatacaatgcgaagcttctggcttccgcagcggcaggatctcttccggacgttatgtttgtagcggcagagagttaccggaatatggtagccaagggcgcactgatggatatcacagataactttaatgaggattatccgctggatgactttattgattcttccagaatgatcatggatgtagacggacatgtatacggcatttcttcctgcaccgtatctccgattctttactacaataaggatgtgttcgatgcggccggcattgaatatccgaatgcggatccggcgaactgctggacgatcgacgagttccgtgaagtggcaaagcagttgacgacagatgatatttatggtgtttacggacttgagaccgtggcagacaccttaaatgcgcagcttctttccaacggcgctacgcgttacaatgaggactatactgaaagtacaataaacagcccggaggccaaggaagtatttgagacgatcaaggcaatccgcgtagaggatggatccgcaccggatgcttccacgctggacgcagttggaatgtccgcgacacagatgcttgagaccggtaaggtagcgatgctgatcagtggttcctggtctttacaggagctggcagcagccggtatgaatgttggtatggctccgcttccgtcctacggagaagtgctgacaaccggaactgcacatctgcactgtatttccgctacgaccgagcatccggacgaagcatggatgttcctgcagttcctctccggaatggattaccagggcgcattgaccaagagcggtctgtggatgccgaatcgtcattccatgtatgaggatgacatggttgcccagtggtatgatgagagcgtacatggtgacagctacaagctgatgcttgattactttgagaatgcagtcgtgaacccaactgccatgcagaagtctacacaggcaagagacatccttgcagaagagaccgatatgtactttaaacaggatcaggacatcgatgtgactctggaaaatattgataccagaattaacgcagcgatccaggaggttctggcgggttaagaataagcagaaatgccgggggctgcgcccgcgtgatcggtgcgcggccctttttctgactacagggcgacaggcatagagatgaaaagaaatgcattacggcatattggaaatcaccacttgcaatagcgatgcatttttcaggatagggaggaaaattatggccaaaacaaagaaagtaagcaagcttaaggatgacagcaaatgggcatggctcatgcttgcaccgaatattatcggttttcttttattcatgctgattccgatggtggcaacgtttgtgcttagctttacaaagtatgatatgctttccacgccaaagttcgtgggactgcagaactacatagacatggtgaaagatccaattatctgggaagttacgaagaataccattgtgtatacaatacttactgttcctgttgggatgtgcatttccttacttctggcggttatgctggatcagaagattgcatttcgaaaattttatcgtgcagcgttctttcttccttcaatcacttctatggtagttgtagcgatcgtatggcagtggatttacaatccggattacggtcttttgaattattttctgtctctgtttgggattaaggggccgaagtggctgctggatgcaaatacttccctgatttctctggcaatcgtaggtatctggaaaaaggcaggatacaatatgattattttcctgtctgggcttcaggggatttcctacagttactatgaggcatccatgctcgatggggcaaataaatggcagcagttccgctacatcacacttccgatgctgaagccgacgaccttctttgtatttgttatgacggttattggttccttccaggtgtttgatcagattatgctgatgacgaaaggcggacctggacggtcatcctccgttcttgtacattacctgtaccagaatgcattccagtatttcaagcttggctatgcatgtgcgatcgcatatctgctgttctttatcgttatgggcattaccgtgtttaacatgcgtatggaaaagagcatgagagagatctattaaggagggatagcatgaacaacaagagaaaacagcttattgtaaaaattgtggcacatctgattttgctccttggcgcaatcaccatgcttgttccgtttatctggatgctttcatcctctgtgaaaagtcttggcgaagtatttgtgttcccgccgaagctgtttggagaaaaaatagtatgggagaactatacaaaaatttccagccgctttaattattttgcatattttctgaacagtgtaaaagtatcggcatgggttgttgtctttcaggtatttacgtctgcaacggcgggctatgtatttgcaaaactgaatttcaaaggaagagatagaattttcactttgtatctggcgacgatgatgatcccgtttcacgtaacggtcatcacgaacttcctgcagatgtccatctacgggctcgtaaatacgctctggtctctgatgcttccggcatcagtatccgcgttcggtacgtttttgatgcgtcagttttttgtgacagtaccgaatgagctgatcgaggcggcgaagatcgacggatgtaacccgttcaagacgttcctgcagatctgtttcccgatggcaaagccgacgatagcgacgttaagtattttctgctttatgaatgtgtggaatgactattttactccgctgatttatatcaacgattccagaaaatatactctgccgctcggtctggcgagcatgaagggaatgtactcgacggactggccggtattgatggcggcatccgttatttccgtactcccggtattgattgccttcctgtttgcacaggatgcatttgttaagggcgttatgatgactggaatgaaggaatgagaaaggagattaaagaaatatgagcacagtgaaaaatataaaggggcaacaggtacggcttcgcgacgaggaacttctgcgaagacgggaggaaaataaaaattatctgatggaactcgagaacgagcatttgctgctttcatatgtattggaagcggggcgatgcagactgagtgaaacaccaacagacattcatggcggctgggaatctccgctgtgtgagctgagagggcattttcttggacattggctgtcagcggcggctatgcattatgaggcgactggcaatgaacagatacgagcaaaagcagaagaaatcgtggaagaactagcagcctgccagaaggataacggcggccagtgggcagcatcgattccggaaaagtatttgtactggattggacagaaaaagccggtctgggcgccacagtacacgattcacaagacatttatgggtctgttggatatgtatgagctggcaggcagtaaaaaagcactggatgtggcggtgaatttcggaaagtggttttatgactggagcggaaaatatacagaagcacagtttcaggaaatccttgacgtagagaccggtggtatgctcgaaatatgggtaattctgtaccggattacaaaggacgagatgttccgcacattgatggatcgctattaccgcaagagtctttttgacggactgcttgcaggaaaagatgtactgacaaatatgcatgcgaacacgacaattccggagattcttggtgcggcggcagcctatgaagtgacaggtgagcagcgttatctggatattgcgcaggcgtattggaagagtgcagtcacagatcgtggatcttatgtgacaggtggacaaacctgtggagaaatctggagtgcaccgaatcagctgaaagcgagactgggcgataaaaatcaggaacattgcactgtttataatatgatgcgtcttgcagatttcctgttccgccacacacaggatccggtttacttggattactgggagaagaatctgtacaatggcatcatggcccagggctactggcagggcagctttacgcatggaagaaagtcggaatatccgacaaaaggattactgacctattttcttccgctgcgcgggggtgctcagaaggcatgggcatccagaacgcaggacttcttctgttgccatggatcactggtgcaggcgaatgcggcgcataatgcaggaatttactatgagggagatcatgcgctttatgtatgccagtatttggaatcagattaccggggaacgattgaaaatgttggagtgtctgtaaagttacgtaaaaaccggatgaacggaacaaaacatctatcatctgattcagcggggacacacaaaatcagccggattgcggcacgctatccgtcttatccgcgcagacaggtctatgacctgattgtggagacagaaaaggaaaccacgtttgatatatacgttcggattccggcatggacagccggggaaggaacggtatacgtttataacacagagaatgcggatgagcttcgggcggttatggaaggagaaaatccgaatggcgagaagctcagcgcaaagccgggtacgcttgtaaagctttgcaggagctggaaacgtcaggtgatccatgtagagcttccaaagacactgacagtagagcatctcccggatcaggaagatatggcggcatttctggatggtccggtcgtactcgcaggactttgtgacgaggaacggattcttcacacgaaaggactgcaggagaacgagctgcttgttccggacaacgagcgagagtggggaaactggatgggtacctggaagaccgtgcggcaggagcagggtatccgctttgtaccgctgtaccaggtcggatatgagcactattccgtgtacttcccggtagaggaataaaaattaaatgaattacgttatttcctgtttcagcggtgcatatccgcctgagcaggatgtgtacagaaaaagatgcccgagcgggcatctttttctgtatcggcagtagccttctcaatgaccgggagagattcttccagctcatcagcgatttgtcttttctgtctgttgtcggagcaactctgagccatcacaggtataatttctctgcattgtcgaatagaattttatcaatgatatcctttgcgttgcttacggaaaggtatccgtcctctattttttctgtcagaactttgcacagcgagaaacggaatgcaagaagtgagccatagctttcttctaccgtccatgtatcacagccccagcagattttatcgatctgggacatctcgatcagctgatgcaatacccggtttgatgccgtgtaggacaaaagcggaacccaggtcagatccggatacacattctggtatccgtccaccatcgggaagagatcgtccagccacggaaagccgcaatgcagcagcacaaactttgtttcaggattgcttttaatcacattgtttagctgcagtatattcgtattcgtgatctgtcccattcctgtatggcattgcagcggaagcgataattctgctgcgatttcgcagattttccagaacagatagttctggaaatatcggatatcctcctgtgttatatccgattcctttacccggaagacgcgttctgcctgctcctgtgtcacctgttcaaaatgaaggtcgcgctcgtaggcgagtgctatttttaaggctacacagcccgcgttctttttccgtatgatccacgttttgacccattccacataatctggcaggttatccggaaactccccgaatcgttcctccaacgatacaccgtcatgattgcggagtccctttttatagcccaggaagaacagatccagtcgaaaagaaggcgtaaacagctcaggtcttccgttgtcagagcccggattccagtaggtatctacgatgatattctgatatttgcatttattcttcagaacatccatgtaaaaggccggattctgatgcgctttgctgatttggtcggaaatcgagtcccagttcccggctgtgatcggatctgagattccgtaaagctcctgaacggacttctgaagccagataaaaaaggatttatatcgaaccttctccaggtatgcggatctgctttccgcggttgatcccggagtgatctgcatccattgcaaatacgtattatttatcagcttgtccagattaaaatccagcgccgcctgctccggcagatgatgtgaatgcgtattcctgattttgtgatcagatatgtaccccattaattcctgctcagtctgatttgctgttcccataattgataatgccccctttttttcgttgttccggtaaagcggacattcacgatccgcctcgttacctgctttcaaagcatttataacagccttcgatttccttgtcaatcaatttcttttgacgatgttttgacgcaaaaggcttcttccaaacagaatatgctgctgaaaagcaaagaattggtaaaaatagcgacttttctatacttgaaaaaattcacacagaaatatcgcgcaagctcattggtaaaatcagataattcgaattaaataaaaaaataaaaagaaaacgcttgacaaaacaaagaatataaattacaataaagacaacaaaacaacagagagaaaaaagcaggaggacagtccaatgggaaggtaaatggattgtaaaaggcaaaaagaacaggaggttatacagtgaagcttcaaattattcatcgatagggctaccggatgacgagaaagtctggtagcccttattttgtagaattgcgggagctgctttgcagcggaacaattcgtaggcatcacaagggtcaaaaggtgttttacagggaataaattgtgaaagctgcataaaaataacataaaaaaattatgaaaatgggagaagacaaacaaagcaattgcaatccatataaatatgtgatattttgaacatgctacctgaaaacgttaccgaaaacggaaccgggaacattttatacaaggtatgagaattgaggagacgcatggaaaaaaatatgaccgagggaaattccctcaaacagattttatgttttgcatttccgctgctgcttggcaacttattccagcagctttacaatctggcggattcgattatcgtaggaaagacgcttggaatcgatgcgctggcatctgtgggagcgagcggctctctgaattttctgatcattggcttttgcataggactgtgcagcgggtttgcgatcccggtcgcgcagacctttggtgcaaaggagtattccctgatgcgccggtatgtcgtaaatgcaatggcgctcgcggcggggatttccattgcgtttgcggtcgtgacggcgctgttttgcagacagattctggttctgatccgcacaccggagaatattttagacggcgcgtaccggtacctgatcattatctttatcgggattccgtttactgtcctttacaacctggcagccggtatcttgcgttcgctcggagacagcaagagcccgtttttgtttcttgccatctcgaccatcatcaatatcattggcgatctggtgtgcattctggtctttgggatgggcgtagagggcgcagccatctccacgatcgttgcgcaggccatttccggcatctgttgtgtcatttatatgaaaaagcgttttacgatcctgaagctggaccggcaggaggagaagctttctactcaccggatgaagatcctgcttggcatgggtgtcccgatgggactgcagttttccatcactgcgatcggcagtgtcattttgcagagctcggtcaacacgcttggctcgaccgtcgtcgcagcattcacagccggtacgaaggtggaacagtttacgatggcgccatatgacgcactttccaatacgagcgcgaccttctgcggtcagaacctcggtgcccgcaggatcgaccggatctacaaaggcgtcagacagatgatcacgatcagcgtgctctacagtattctggcaggagcggcgatgatcctctggggcgaccggatggttggcatctttgtagatgcaggggagacagcggtcatttcccatgcgtacaagtttgtccggtgtcttgcctggttctactatctgccgggaatcctcgccatccttcgcagcggtgtgcagggtatggggcacagcggcgctgcgatgttcgctggcctgaccgagatgattgcccgtaccgttatgggactctttgtcattccggtatacggcttcaccgcagcctgcttcaacgaccaggccgcctggctctgctcgacaacctacattgcgattatctttctgaccattgtgaagaaggagcggattcggctaaatcctgacagtgatatggaatgtgtggaaagcgaattgtaaatatatacaaaaacgaaatgataaaattgtgaaaataagagaaaacaaacaaaacaattgcaattcataaaaaagtatgttatgttaggtatagcaattgaaaacgttaccgaaaacgaaaccggtaacagtttaaaaaacataaggagggctattatgttaaagaaaagaatgtcatggctgctggctgcaacgatggttgcatcaatgggaatgggctgtgtgccggctgctgcagaggagagcacgtacgacggaacgattcgctggctgaactacaagccggaggttgctgatgcgatgaacgagatcgctgctaaatataccgaggagaccggtatcaatgtagagatcgagactgcagcgtctggtcagtatgagcagaccctgaccgcgagaatcgacagctcagaggcaccgacgatcttcgttatcgacagtgtgaacatgctgaatacctggaaggattatatttcagacctttccgatacagagctgtattcctacgtgaccgacgatgcttatacgatgaacgatggcaacggcgcgatctacgccatttcctattcactggaagcatggggcatcatcgtaaataagaaaatcacagatgcatacttcgcatctccgaacaagtcaacagagtacacctctcttgatgacctttacaccttcgatgctctgaaggcagtcgtagaggatatgaccgctctgaaggatgagcttggaattgacggcgtattcggatccacatccctgaaggccggtgatgactggagatatcagtcccatctgatgaaccagccgctgtactgggagtggggcggaaatgacaagatcgacctgaatggtgagattccggagttcacattcgagtatgctgagaattacaagaatatcttagatctgtacctcaacaattctgtcatcgagccgaacctcgtaggaacaaagaccgtagacgattctatggcagagttcgctcttggcaaatgcgcaatgatccagaacggtgtatgggcatggaacacgatcaacggtaccgacggcaaggcagtcgaggccgatgatgtttgctttatcccgatcacctgcggcgttgaaggtgaggagaacatgggattgaacgtaggcgcaggccagtacatgtgcatcaactctcagtcctctgaggaagatcagaaggctgctgaggaattccttgtatggctgttcagctctgatacaggtaaagagcttgtttccaagaagctgcagttcgttaccccgttcagcacaatggaagacgcagtgtatgacaacccgctgtttgcaagccagagcgcaatcgcagctgcaggcaagaccgcatactgctgggcttcgaacctgattccggaccagacctggaaggacaatatgggcggcgatctgctgcagtacgcacagggccagatggaatgggatgacgttgtgacagacgctgttgatacatgggcagttgagagagatattacaaatgcagcaaacgctgagtaatacagagttgtagtcaattttgggctgccgttaaggttcttacggcagccctctgtatataaaacggaaactggtgttccggtacagcgttcgacaaatggcggaacccgatgtgttccgccatctgtgaggcgctgtgccagcagaggagaggagaagcaaggaatgcagaaaatttataaaaaatattttgccatatttacattgccaacactgattgcctatgcgatcgcgtttgtggtaccgtttttcatgggactgtatctgtccttctgtaagttcaagacgattggaaatgcaaaatgggttggcctttccaactatctttatgtatttcaggacagcaacggatttctggcagcg

SEQ ID NO: 2576 - DNA, 13626 bp, Unknown
  16S sequences of unknown bacteria
taaattcagcagcaccaggctgattaggatcacgccgagggccgccagacgccgccgggtgaagcgctcgtggaacacagcaaagcccgctagactgatgagcacgatggcgccgacgctgtaggtcggataggcgacgaccgccgggacggaatccaggctcagcagcaggaaccgggaggagatataattcggcacaccgatcaaaatgccaaaaagtgcctcccatttgcccaggcgctgccgcttggcaaagatcagcgccgtgcacaaaagcagcgccgtcaaaaacgtatagaccaggtactgatttttcagcgccgcctggccataataggcatagacctttgccataacatcggtaaagcccccagccagcagcagggcgatgaggccccagcgatttttggccgggccgctggcgctgtcaaagtgcagaaggccgatggcggccagcgccccggcaaagccgatgagctggcgcaggcccggcgtctcccgaaagaggacgacggccagcaccgccgggaccagcacccccaggcgcataaacgtcgccgggaggacgatgccattttgccggatattccaatgcagcagcacaaagctggtcagatacagcagcccgctaagcgcgccgacccacagggccgtcccaaagcccgccgtctgcaccggcagcagttgccccggcccggcatagagggcggccaacaggcagcaggtcacatagttcatcgccagcatcggcatttgattctgcgtgtatattttgctcacgcgcatgacgatagagatcatcgcgttgcagcaaatggccaggatcagataaagcatgacaccctccgccgccgcgccgcccaaacggacggcacagcgtattttttctctgcctgctatgatagcatcttgcagcgggattttccagcgcaaaaaatcgcgccgaatccgtatttttatcctgatatatcccccgggggggcttgaaggcgggcggcgcggcgggtaaaatcataaaaaacgaaaggatgtggtcacatgcatatggcagacgcactggtcgccccggcagtcgcggtgacaatgtacgccgcctccggcatcacagcaggcacctgcctgcacaccctgcgcaaagaagaaaacacggcggagaagctgccgacgatggcagtcatgtccgccctagtctttgccgggcagatgatcaactacaccatccccgggaccggctcctccggccacctgtgcggcgggatgctgctctcggcggtgctggggcctcaggcgggctttctctccatggtcgtgatcctagcgatccaatgcctgctctttgccgacggggggctgctcgccctgggggcgaacatctggaatatgggcttttacggctgctttgtggggtactacctgatctaccgccccctcctgcgcagccgccggggcaagacgccctggaagctggtgctggcctctatcctgggctgtgtcatctccttgcagctgggcgcgttttctgttgtgctggagacgtctctgtccggcatcacggagctgccctttggcgcgtttttggcgctgatgcagccaatccatctggccatcggcttggtcgaaggcgggatcacagcggcggtgctgctctttgtgtataaaacgcggccctcgctgctgcaagaagtcggtgaaccggcgcagccgggcaccggcagcaagcgcaaggccctggcgatcctggccatcgcggcgctggtcatcggcggcgggctctccctgctggccagcggcaatccagacggactggagtggtccctcttcggcaaccaggacgggggctacagcgaaaatctcggtctggcggaagacaactacggcgtgacgagccgcgccgggacgcaagctgagaagatcatcgagaaaaccgcgctcctgccggactacgcctttgccaacgacccggagaaccaggcggggacgtccgtcgccggggtcgccggagtcgcagccgtcgccgccatagcggggctcgtctgcctagccggcagcctgcaccgccgaaagaaacagcattctgaggcgcaatagccccatgcacacagccgcgccgcgtctggcggaccggctgtgtgcactattttgtatgattttcccgtaattcaggtcgtcaggaaggagggcgtgcggcgatatgatgtataacaaggcccgcagcgccggggccagtctgcgcagcatggaagcactggcgggcggccactcaccggtccaccggctgcacccggcagcaaagctgtttgtaacggtcctctatatcggcttgacggtctcgtttccaaaatacagcctgagcgccctggcggtgatggcgctgtacccggtggtcctcttccagctcagcggactgcgcatgggggagtgcttttataaaatgcgctatctcctgcccctgctgctggccgtcggcatcgccaatccgtttctggaccgggcgccgctgctccggctgggcagcgtgacgctcaccggcggtgtcgtctccatgctgaccctgatgtgcaagggcgtcttcgccctgcaggcgtcgtacctgctgatggcgacgacgaagctcgaggccctgtgcgcggcgctgcggcggctgcatgtgccgtcgctgctggtctcgctgctgcttttgacctaccgctatatcagcgtgctgctggagcaggcggcgctgctgtcagacgcatacgcgctgcgggcgccagagcagcggggcgtccatttccgggcctggggctcgtttttgggccagctgctgctgcggtcgatggaccgggccagcgccctgtaccaggccatgcggctgcggggctacacgggggaatttccctacgccgccagcgcgccgttccagctgcgcgatggcctgttcctgctgggggcaggcgcgctgctgatcctggcccgctgctacgacctgcccgtctgcctggggcggctgctggtgggcctgtaagcaagaagaaacatacagaaggaggggacatgccttgctggagctgcagcatgtttcatttcaatatgagccgggcaagccggtgctggaggatctgtcctgccagatccccgacggggaagccgtcgggattattggggccaacggctccggcaagacgacgctgatgaagctcctgctgggccttctcccctgcgacgggcagatcttcgtcgacgggctaccggtcagcaagaaaaatctcccggccatccgccgccgtctgggctacgtcctgcaggactcggacaaccagctgtttatgccgacggtctatgaggatatgtgcttcggcctgcgcaacggcggcatggatgccgctgccgccgaggcccgggtggatgagaccctggcgcggctggacctgacacatctgaagcacagctacaaccacaagctctctggcggggaaaagcgcatggccgccatcgcgacgatcctggccatggagccggaggccatcatcctggacgagccatccaacgcgctggacccgtataaccgccgcctggtcatccagacgatccaggccctgccccagacgaagctgatcgtctcccacgacctggacctcgtctgggagacctgcacccgcgtgctcctgctgacggccggccgccttatcgccgacggccccgcccaagtgcttctgcaggacaaggccctgctggaggaaaatcgcctggagctccccctacgctttcagggcgcgtaacgcgtcggcttttgccgcgtaaaactttaaaaaacggggcagttttacacgaaatatccgaatggtgtacagcaattggcaattttgcacgattttgctatttttatatcgaaatccgctcccgattttgtccaactttttcccagtaaacctattgcttttatgggtaaagtgtggtatcattcagatagtaaaacacgacggcaaaaacctcctgaaaggtcacgctgtgtttgcttttctgtaatcatttctccctcccctttgccggggcagcgcaagcccccctagcacaaggcccgctgctccggcgccaaacaaatttgaaatttacggaaaaattgcttgacttttgagctgccattttgcatgctggccttagtcgagtaaaggtgtcagtccgatagaaatttccagtctgacgccgtgcagatcgcacagcatccgctgtgatttttatttggtgtataatcatatcatgttaattggcattaactctgtagattgtatgactaatacatcaaatcagcagctttttgcaagctgcgtattacttagaattccttccgtggctggatcccccacggtcaggtaagatacccgcaaaataaaatctttacaatgcagcgccggagagcaggccacttccggaagccgccactaaaggagcgaattattatgaacggttatgaacgtacctgtaaattcgtcatgggtgagcccgtagaccatccgccttttatgccgctggtcattgagtgggtctccagacagtgtggactcgaatatcccgactttgtctatcatcccgatgtacgcgccaaggcgtatctggagatcgtcgaaaagtttgacatggaccatgtcctgcccgacgccgacttctccgagcagctggaagacttcggccaggtccccaaatggacggaagccggtttccaggtcgagccgatcatcaacagcgaggaagatctggacaagctgacgctgccggaattcctgcccggcacccgccagggtaaccgcctggagatcctccgccaggttgcagccaaggaaaagggcaaccgttacatcttcggcatttgcatcggccccttcaccgaatactgcaacgcccgcggcatcaagaaggccatgcacgacatgaagaagcggcccgagatgatgcaaaagggcatcgaccttttcttccgcaacggcatgcgctttattgaagcccagctggaagctggcgcggacggcatccagatcgtcgagcccaactgctcgctgatctccccgaaattctatgaagccaacattatgccgctgcacaagcagatggtcgacctcatccagcgcaagaagaacggcttcgcccggctgcatgtctgcggcgacacctccgctctgatgccctacacgctgggcaccggcacccatatcctcgacgttgactccgctgtcgatctgacaaaggtcgcgcatctgctcgggccgcagcagtgcttctgcggtaacttgaacacctccgaagaacttcttttcggcaagccggaaggcttcgccgctgcagtcaaaaagcgctacgatgagacgaacaaccggatcatcctctccggcggctgcgacgtacctccggatacttccgctgagaatatgcacgcgttccacgacgcagttgcagcattaggcaaataaaggaaggagagagaattatggaaaacaacgaaaccaccttaaaagccaacagcataagcaaactagacgttatcatcatggccatctgtgccgccggtcctgtcatgtgcctttccggctctttgggcgatatcatgtctggctccggcaccgcagcagccttggccttcctcctggcaaccgtcgtcttaatcctggtcggctccagcttcggccagctgtccgctcgttataacagcgcaggcggcacctacgcttacgtccgcagcgtatttggtgaacgcaccggctttgtcgccgcgtggctaaatatgggcgtcacgatctgtactggcgttatcggcgccgtattcagcacctatctgcatgagctcgtccccgccatccccatgtgggtcggcattctgatcctgctcatcccgatcttcttcatcggctggcgtggtgttgaaatgtccaccaaggttctgattgttgtctgggtcgtccagatggccctgatcctctaccctgcattccacatttggagcatgaaccccgacgatatcagcaatatcctgggtaactccagtcaggcgttcacccccggtaacggcatgtccggcctgatgctggctgttctggtctgcgtctggtgttatgtcggcttcgaaggccccgcttacatgggcgaagagctcaagggcggcaataaggctgtcaaattcgccattcctgtcagtgccatcggcatcggcgtcgtctacgccatcagctgctgggcctggacgggcagcatggatatgtccaaccctgctgttgcagaaatcgtcaactccggttccggcaccctgatggtcgactactgcaacctggtcggctacaccctgggcggcaagctcgtctccatcgcggcactggtctcctgcgtcggctgcttcatcgccttcgcaacgacctctccccgtggtctgttcgatatgggacgtaacggctacctgcctgcttccactgcaaaggtcaacaagtaccagactccgtctgtgtccctggtggtctactgcatcgcatggctggccgctgcactgtacggcgcttatggcaacatgagccacctgttcaccttcatggctatcttcgccagcgcgacctacatcatgatctgcgccgcgaacatcaaggacagatggagcgaaaagggcttcaagtccttcctgcaggataagctactgcccctgatcgccatcgcgatcctggtctacatgatcgtatcctccgacgcctcctccctgctggcgaccggcatctggctggtaggctgcatcgtggctgccttcatctggtacgccgcccgcaagagcaagaagggcgtgtaaggctctgatcctttcgcaaaccattgtaccgtgaaaacaggaaatatatctccttacaattccctggcgccctgcagctgattgctgcagggcgtcaatttttgtgcttggggatttgtttacaaaaaattgacattctcccagatgggctccggcacccggcggggattgcgttccaagggatgccgtgggggcgtagcgttttagtctgcaattattttctccattttcccgtaattttgcattgaaatcaatcatttttctgaatctttcaagtcaaagtaattgcatatggcagatattgaaagctcggaccttgcccgggcgggcaggttttgcggcgcaggcgcgtgattgacagctatgatataataacggcatagtggatatgctgcacacataggcccattttgcctgcagaccgggttttccggcagggcggatggcggtgcaggcccggtaaaaaagtgcgggcgcttccctatttacaacatttcacggatctcacgtttctacttcctccggcaggtctgccggggcgttcgtttggaggtaatgcaatggctgaccgcaagaaaaaacaagacagtgtccgggtgccccgcacggaagagcggcagcaccggagcgctactcagacggcgctgcacagcgcaggcgccctcattaagctgatcttcggcatcattggaacactgctgctcgttgtactctgcaccggcattattttcagcgtgctgttcgccaactatctgcagcacgacgtgctgactcagtccagctactcactggacggcatcagcctgaaccagacgtcctatatctattatgaggacaagtccgacggccagtggaagcagctgcagcggctctactcgacggaaaaccgcatctgggccgatcatgacgagatcccggagacgctggtcaaggccgccatcgccatcgaggacaagcgcttctaccagcaccagggcgtcgactggaagcggacgatctccgcttctctgaacctctttgtcggcaacgacgccttcggcggctcgaccatcacgcagcagctcatcaagaacctctccagtgacgacgatatcaccgtccgccggaagctgctggaaattttccgggccctggaatttgaaaagaaatatacaaaagacgagatcatgacctggtacctcaacacgatctacctgggtgagggctgctacggtgtcaagagcgcggccaatgtctactttgccaaggggctcgatgagctgaccgtagccgagtgtgcctgcctcgtcggcatcacgaacaatccctaccgctacgacccgtacctgcacccggagaaaaatcgtgagcggcagctggtcattctgaaggaaatgctggaacaggagctcatcgaccaggccacgtataacgaggccgtcgcccagaaaatggtcttccagaacggcagtgccgaggatctctacacctgtcccagctgcggcacggagacgggcgaatactccctgaagacggaaacggtggagtataccgacgccgagcgggaagctttgctggcagaggcccagcggcaggccgaggcaaacggcgagagcacggactccctcattgtccccaccagctataccctgtattactgccccaactgcggcgcctccatcgacccagacgacggcaaggaggcggagcgggattactcctactttgttgataccgtgttccgcgatgtctccgaggacctggcggagctgacaggctatgacctcgagacctgcgaaacgatggtcaagaccggcggttacacgatctacgccaccattgacccgacagtccaggccgcggtggacgctgtctatgaggacctggccaatgttcccacgacgaccagcgcccagcagctgcagtcggccatcgtcgttgtcgacaacgaatccggcgatatcgtcggcatggcaggcggcgtcggcaagaaagagggctccctgacactgaaccgggccacccaaagcatgcgctcccccggctcctccatcaaaccgctgaccgtctacgcccccgcgatggacgccgggacaatcaccccgtactccatctatgaagactccccgtataaggataactggccgaaaaaccagtcaaacacctactccggcgcgacaacggtctccgtcgcagtggcaaaatcgctcaacaccatcgccgtcaaggtcctggcggaccttggcgttgaaaagagcttcgccttcgcgacagaaaagctggggatggacaccctggtggaaaaggaaaatatcgacggcaagcagtatactgacgtcgccctggcgccgctggccctgggcgcactgaccaagggcgtgacggtccgcgagatgacgacggcctacgccaccttccccaacaacggcgtctaccggtatgcccggacgtatgtcaaggtcctggacagccagggcaatgtcgtcctggataacacgcagaagacccacaacgccatgaaaaagacgacggcgtggaatatgacgatgctcctacagaacgcggtcaacgccggtaccggcaccccggcccgtctgacgggtatgaacgtcgccggtaagaccggcacgacgtccgatgatcacgaccgctactttgccggttacacgccgtactacaccgcgtgcgtctggtgcggcttcgactcccaggatgagattgtcctgacaggcaaccggacgaacccagctattgtcatgtggcgacgggtcatgtccaagctccacgaggggctggaaaacaagccattcttcgacactggtaatatgaagaccgtcaccatctgcaccaagagcggattgcttgcctccgcagcctgcgcgctggacatctccggcaacggcgctgtcagacagcagatgttcgccgacgatgtaccgacagaatattgcaccggtcaccacacggtgcaatggtgcactggcgggcatggaatcgccaatgagtattgcgcccgaatgcccggcaactcagtcatcaccggctctgtctaccagggcagcagctatggcacctgtacggtgcataacgctcataccgtcgccgaggcgacgaagccggaggaaaacgacgatggcgacgacgatggcgacgacggggaatcggagcccccggacacgtcggaacacacgcgttaaaacagaaacagaggatttataactatgtggatcgcagataaatggagggactatgaggtgctcgacaccagcgacggcgaaaagctggagcgctggggccgctacatcctggtccggccagacccccaggtgatctggcgcagcccccggcgcgatgcgcgctggcggcaccacgacgcccgctatgcccgctcatccaccggcggcggcaaatggtcggcgcatcacctgccggatcactggcagattcagtacgggccgctgaccttcaacgtcaagccgatgaatttcaagcacaccggtgtcttcccggagcaggcggccaactgggattatattatggagaagatccgcacggcggggcggcccattcgggttctgaacctctttgcctataccggcggcgcaacgctggcggcggcggcagctggggcggaggtctgccatgtggacgcggccaagggtatggtcgcctgggcccgggagaatgccaagtcctccgggctggagggcgcacccatccgctggatcattgacgactgcggtaaatttgtcgagcgggagatccgccgggggcggcgctatgacgccatcatcatggacccgccgtcctatggccgaggcccctccggggagatctggaagctggagaaggacctgttcgacttcgtccagctgacggcgggggtgctttcggattcgccgctgttcgtcatcatcaactcttatacaacggggcttgcacccagtgtcctgggctgcattatggacagtgtctataccccccgctttggcggcggcagctgctgcgacgagctcggcctgccagtgacatcgggcctgaccctcccctgcggcgcgacaggccgctgggaaccaaaaaaggattaacggaaaacacttatggaaacactgcaagtcacagaccttcactatacgtatcccgccacggagggcgaggccgtcacggatattttccaggggctggacctgacgatcccccacggcagcttcgtcgccattcttgggcacaacggctgcgggaaatccaccctggccaaacattttaacgcgatcctgctgcccagcggcggcagcgtccaggtctacgggatggacacgcgggacgaagcgctgctgctggagattcgccgcagcgtcgggatggtctttcagaacccggataaccagatcgtagccaacgtcgtggaggaggacatcgccttcgcgccggagaacctcggcgtcgccccggcggagatccgccagcgggtggatgacgcgctgcggcaggtcggcatgtatgaataccgcacccacgcaccgcatctgctctccggcgggcaaaagcagcgcatcgccatcgccggggtcatcgccatgcggcccaagtgcatcgtcctcgacgagccgacagccatgctcgatccccagggccgacgcgatgtgctgcagaccgtccggcggctgaaccgggaggcgggcattacgattattctcatcacccaccatatggacgaggcggcccaggcggaccgggtcatcgctatggagacggggcgcattctgtgcgacgggacgcccaaggaggtcttcacccaggtggaaaaattgcagcaggcggggctgaccgtcccgcagacaacgcagctgctctaccggctgcggtccatgggctatgacctgcccctggatgcactctcggtcacggaatgcgcgcaggcacttcacacttggctggaggcctgacaaacagattcggaggaaaccacattggcgcctatgcttgccgtcaacgatttgacgcatatctacagtatcggcacgccctttgagcatgccgccatcgaacatgtcagcttcaccgtcgagccgggggagtttatcggccttatcggccacactggctccgggaaatccacgctgatccagcacctgaacggcctgctcaagccgacttcgggggaaattctcttccacggaaaaaacatctgggagagcacggcgacgatccgtcagacccggttccaaatcgggctggtgttccagtacccggagtaccagctttttgaagagacggtctataaggacatcgcctttgggcccaagaacatgggcctggaccaggacgaaattcaccggcgcgtactgcgggccagcggctttgtcggcctgccggaggcgcttttgaaaaaatccccctttgagctctccggcgggcaaaagcgccgggtggccatcgccggcgtcatcgccatggagccggaggttctcatcctcgatgagccgacggcggggctggacccggtagggcaaaagcaaattttagagaacatccgcgcctatcagcaggcgcagaacgcggccatcctgatggtcacccacagcatggaggacgtggcggccatcgctgaccggctgctcgtcatgaacgacggggccgtcgccatgcagggtacgccgccggaggtcttcgcccacgcggaggagctggcggccatggggctggatgtgccccaggtgaaccgggtcattttggcgctgcgccatatggggctggacctcgacgccgggatcttcaccgtcgaccaggcggtgcaggcgctgaccgcgcgcaaaggaggcccccatgcttaaagatatcaccctggggcagtacttccccggcgagaccctcatccaccgactcgacccgcggacaaagctactggccgtcatcgtctttatcgtggcgctgtttctggcaaagtcgtttttctcctatgggctggtgctggtcttcctcatcgcctgcatccgcatttcgcgggtccatctgaaggtgatcctgcgggggctgaagccgctgctcatcatcatcgtcctgacgggacttttgaatttgttctacacccagggcaccgtcctggtgcatttctggatcttcaccatcacaaaagagggcctcatcatggcgagccttatgatcctgcggatcatcatgctcattacgggaacctttcttctgacctacaccacctcccccatcgcgctgacggacgggctggagctgcttctgagccccctgaaaaaaatcaaggtgccgatccatgagctgtccatgatgatgtccatcgccctgcgctttatcccgacactcattgaggagacggataagatcatgtccgcccaaaaggcccggggggcggattttgaaagcgggcatctcatccagcgggcaaaagccctggtgccgatactcgtgccgctgtttatcagcgcgttccgccgggccgatgagctggcggtggccatggagtgccgctgctaccacggcggcgcggggcggactcggatgaagcagctgcgctacggcatgcgggacctctgggccgggcttgtgacggccgtgctgctggccggtgtcatcgtcctgcgcagcattggatactaggaggcgaggaatatgcggaacatcgccctcttgctgtgctatgaggggacagcctaccacggctggcaggtgcagaaaaacgccgtgaccgtcgccggaacgctggaggccgcggccgccaaggtcctgggccaccgggtgcatatcaccggctgcggccggacagacgccggggtccacgccaagcgctatatcgcgaattttcataccgactcccgcat

SEQ ID NO: 2577 - DNA, 2646 bp, Unknown
  16S sequences of unknown bacteria
tagcgcgccgccgcctcggaatactgcgctacaccggcatccgcccgaatgtgcgcctcgattatgcccgtgtcgagcggctgcaggttctcctcgtgctcgcgctttggcgcggagcctttcgccgaatgctttggcgtgtagtgttttgccacgtgactctcctagtgaagcatttccagcgcctggcttgccagctcgcgaatcgcctcgtcttcgctttctgcaagctcttcgagcggctcgatggccgcgaggtctccaaaatgcgcaagcgcctcgatcgagtagcgcaccacccactcgtgctcgtcttcgagcaggtcgagcacgacaccagtcgtctgcttgtctgcgggcaggtgcccgagcgtccacacggacgcggagacgagcgcggcgagctcgtcgccgccgccgccgtattcgtcgatcgcgttgagcagggcgatgcgcgcccgctcgatgcactcgtcggacgtcgcgaggtcagagcccgcaatcgaggcgcgctcgccgagcgcggtcgccgcagtcgcgcggttggcaaccgaatacgtcgcctccgcatcctccggcgcgcccgcaggcaaaccgccgttggagacgagctcgatgagcttgtcgaagctgcgcggcgcggggatctgcccgagcgcccagatgcagttttcctgcacgcgcgcgttcgggtcggagatgccctggacgagcgcctcgaacgcgcggtcgtcgccaaagacgcccagcgcggtcgccgccgccatgcggacctcgtcgaccgggtcgaatagcgtcacgagcgtaggggcgaacccgcgtgggtcggaaatcttggcgagacccatcacagccatcgcgcgggcctgcgggtcatcgtcttttgcaagctcgagcaggagctcgaggcggtcttcggacatggatgaagtgctcatttccgtcaatattcagtattcctgacgaatattacgacaaagcacggcatatttcgtggatttacgatagaatcccttcgtacgtgcgggcgattggcgcagcgggagcgcaggacccttacaaggtcaaggccgcaggttcgaaccctgcatcgcccaccaccatacctgtgaaaggccggcatctacgccggcttttgttgttttgcggagcaccaatgagaaaagtcctgctgagcgccgacagcacctgcgacctgagtcccgagctcaaggagcgctaccacgtccattactatcccttccatgtcatcttccgcggtgtggaccatctggacaacgtggacatccgccccgaagacatcttcgcaggttaccgcgaggacggcagcctgcccaagacctcggccatcaacgtgcaggagtacctggattacttcgcgcccttcgtcgagcggggctacgacatcgtgcacctcaacctgggcgcggcactgtcgagtgcgcacgtgcatgccgtcgaggccgcccgtcagctcgggcacgtctatgcgatagacagccgtaacctctcgaccagcatcgggcagctcgtcatccgagccgggcgcatgatcgagcagggaatgggcgccgaggaggtagctcggcatgtcgaggagctgcgcggacacgtgcactcgtcgttcgtgctggacaccatggactttctcgccgcgggcgggcgctgcccgcagctactcgcctacgtgggcaagatggtcaagttccacccgtcgatcgtcgtcgacaacacggacggctcaatgagcctgggcaagctctaccgcggcaagcccgtccgcgtgctgccccgctacgtcgcagacacgctcggacgctaccacgacctcgagctcgacgacatcttcatcacgcactccggcatagaggggcagctcgtggagctcgtgcgcgccgcaatcgaagagcaggcgcacttcgagcgcatccacgtgacgcaggcgagctgcaccatctcgagccactgcggacccaacacgctcggtatcttgttcaccacgaaaagcgcctgcgcataggggccaaacggcgcggtgagcggggcgtgcagtgctatcctgctcacgtgtgattttcacattcagctgaaagggaaagcatggatttttacgaagaggcgctcaagcgtcatgaggcccatcacggcaaggtcgaagtagtcagcaagctgcccatcgagacgcaggacgacctttccgtcgcgtacacccccggcgtggcggagccctgccgaaagatcgccgagaaccccgacgacgcctaccgctacacctgcaaggcaaacaccatcgcggtcgtctcgaacgggaccgccgtcttgggcctgggcaacatcggcgccaccgcgtcactgcccgtcatggagggcaaatccgtgctgttcaagcgctttggcggagtcgacgccttccccgtttgcatcgacgcgaagacccccgaagaggtcatccaagcggtgcgcttcatcgccccgaccttcggcggcatcaacctcgaggacatcaagtcgcccgactgcttcaagatcgagcagactctcgagaaggagctcgacatccccgtcttccacgacgaccagcacgggacggccatcgtcgtgaccgccgcgttcttgaacgcgctcaaggtagtcggcaaggaaatc

SEQ ID NO: 2578 - DNA, 5330 bp, Unknown
  16S sequences of unknown bacteria
caagcgagcttgcgagcgtcggaggccgcgaagcggctggagccccgaggacacggagcgaagcgaagtccgcaggggcggaacaccgcgcaagcgtcagcgcagggcggtgcgaaggtgtgggacgaccatgctgaattgaggaatgctggcagcgaagctgactgaggggttgagccgaccgagaagttgcaaaagttctttcacagcccctgaaatgtgcaaagcaaatttggcgtggctgcgttgcaaagaaagcgaatttgggctataatggtaagaaagaacaggatggaggacgtcgcgggatggagcatggccaagcgggagcttgttttcgggaagtggacgcgctgaaggcggcgcttgcggcacgccggccctttacgcagggagaattgcagcgcttgcgcgatgaatttttgattgagtatacctacaactccaatgccatagagggcaacacgctcaccctgcgggaaaccgctttggttttggagggcgttaccattgaccgaaagccgctcaaagatcacctggaagcggtggggcatagggacgcgtttttctatgtgcaggatttggtgggccagaaaattcccttttcggaaagcgtcgtgaaacagattcatgcgctggtgctgatggaccggccgcgcgaccggggcgtataccgcaggattcccgtgcgcatcgcgggcgcttatcatacgccgcccgagccgctgctcgtgccagagcaaatggaacggctgattgccgcgtttgcgcaggatgcggtgcggcatccgatcgaaaaagcggctttgtttcacctggaatttgagggaatccatccattcgtggatggaaatggccgcacggggcggctgattctcaatttgatgctgatgcaggcgggctatccgcctgtcaatgtgaaatacgcggaccggcagcgctattatgcggcgttcgacgcctattttcagcaccgccagacaacgcccatgctggccattttgcgagaacaactggaagaaacgctccggcgtttgaatgatatgctgtaggaaggtcaaatagattccagatcggtgacgatgacctggttgcggccagcgcctttggcacggtaaagcgcctcgtcggcgcggaggatgagctcctccagcgtatcctgcgggccggggcggcgcacggccacgccagcgctgatggtgacaatcccattggggccggcgatggctttttgccgcacgcgctccagcagttcattggataggctttgggccttttccgtggacacggcggacatgaacagcaaaaattcctcgccgccataccgggcggcaaagaagccgtgttctaccgcgaaggtggcgagcgttctgccgatggttcgcaggcaatcgtcgcccgcagggtggcccaaagcatcgttatagtccttgaagcgatccacatcgatcatcatcacggctacgggaagatgggattcctggcagcggcgaaagctgggaaacatgtgaacttgcgcgccgtggcggttgagcaggctggtgaggctatccgtccggctggccttttccagctgctcttgcgcttcgccgctgcgcaggcgcaaatcgcagatcagcagcaggaaaaaggaagtggcaagccaggtggtcaccgcgctgaagtggtcaaaaatggccacctcctgcgggcggaacagcgccaccaatagcagatagatgcccgaaatccccgtcatcagcagcgaaatccgctgataggggaagaaaaacagcgtggccacaatgatatagcacagcgaataaaaaagggcgggctgcttgggaaaagggaaaatgctgatggtgatgataaacgccattagcatgcatacgcagaggtaacaggccgcctgtacggtgcgcggcgcgggaggttggcggcggaagcggcgcgtgagcgcaaacaggcccagcagcgccgcatagatcgccgcgtaacaggcgatcagtaggggattgcgcatggtgatcgtcgtccaaatcccatatagcaggaaaaacggcaacaacacccatagcgccgcctggagcatccgcagattgttttgggcgatttgcgcttcgcagcgctgaaaatatccctggtttcgggcgcggaatgccgcataggcgtgccaaatgcgcttcaagacgaccgccttctttctgccggatggtttcttgcaatatctattatacacgcgtgaaggcccaatgggaaggccgatgaggaaaaaagttgcgcgccaagctgggcggcgtcagtgcagcggtctcaatggctcgggcgcaaaatccacttcgcccaccagcgggcggacggcggccacgcgcacgcaaacgcgctggcctgcttgcaactgttcgttcgcgcgctcagagaccaacatggcccgctcgggcagatagaaccaaaagccgggcagcgcgtccagcggcaaggttccttcgcaggtgttgtccagcaaaatgcgcgcgccgcgcgcatatacgcgggaaaccacgccttcgaacgattcgcccacgcggctggcgagccagagcgcgcacagcatggcggtggcgcggcgctccgcgctggcggcggcttcctcgcgctgggaggcaaactccgtccattccggcatgttctttttgtagcgctcccgctgggaaaaatcgcccgctagcgcaagcttgagaatccggtgcgccagcaggtcgggatagcgccggatgggcgaggtgaaatggcaataatcgcgcagcgccagcgcgaaatggcccttgggctgctcgctatagcgcgccttttgcatcgagcggacgaccgcgaattgcaccagcggctcttccggcttgccccgcgccagcgcgagcaaggcgttgagcgaggcgggcttgccgtccgggcagggcggatagccgaaatgggccatcgcctggttgagcgcggcgaggtcttccggcgcggaaggctcgtgtacgcgataggggaagggcaattttttggcgcgcgcataggcggccacggcctcgttggccagcagcataaaggattcgatcaggcgttccgcgtcgccgctcgggcgcgggatgacgtcgagaggttcgccggacgcgtccagacaaagctgggtttcggcggtttccagggacagcgcgctgcgctgggcgcgcgcttcgatcagcgccagggacagctcgcgcatgcgcaggagcgttttgtgcaggttcttgggcacggcggtttcctcccccgcgaacagggcgttgaccgcttcataggtcagccgcgcgcgggagcggatcagcgaggggaaaattttggcggaaagcaccgcgccattttgaatgcgcaggcgcacggtcatggccaggcggtcttcgccggggcgcagcgaacaggcgccattggagagcgcttcgggcagcatgggcagcgtgagccccggcaaatatacgctggtgccgcgcgcgtaggcttcccgatcgagcggggagccaggagcgacatagtgcgatacgtcggcaatgtgtacgcccaattcccaaacctcgccccgccgggtgagggaaacggcgtcgtcaaaatcctgcgcggtttcgccatcgatggtgaacacgcgcagttttcgcaaatcgcggcggccttgctccagtacgggcgcgagcttgcgcgcggctttttccgcgcattgcaccactttgggcggaaattcctgccgcaattcataggcttgtgcggcggccaacagcagcgtttgcggcgacagggccgaaccgagcgcgcgttcgacacgcgccaccagggaatgcccgtgccggggccattgggtcacgcgcagcagcaccgcgtcccccgcgcgagcgcccagcaagtcgccctccacatggacgctggaaggcaggcgggaaaggatggggtgcgcaatggcgcgcggctcgcgcgctttgccatgcggctggaaatccagcgaggccacaaagcgcgcatgggcccgcttttccaccgattccagcgtggcgcgcggccgttcgccacgccggtgggtgggccgaatgaggatttcatcgccatccagcgccacttggtcgggcatatccaggtaaaaatcttcgccgccctgcgtgggccgcgcaaacatcgcgccggaggcggtgcccatcgcgcgggcgcgaatccaatggcccgaggatttctttgcttttctgcccatacggcgctcctttcgctcggtagcttgcaagaaaggcggttttgttcaatgagaaaaagaggatgccacattgcgccgcatcccgccagctccagatggattccgcgcctgcggcctttggccgtcgcggaaattgccctttggcgcttttgcgcccacagggcaactgctggcagaatcgtgcgcgttttgcgcggcatccccacaaacagtatggatggaatttgagccgattatgcagcgggctcttcgctggcctcgggcgcttcggtagcggcgggcgcatccgtggcctcgggcgcgtcggtggctacgggttcttccgtggcttcgggcgcatcggtggctacgggctcttccgtggcctcgggcgcgtcggtagctacgggttcttccgtggcctcgggcgcatcggtggcggcgggctcttccgtggcttcgggcgcgctggtcgcgctggtctcatccgtggcttccggggaagtggagacgtccggctcagcggaggcatccggctcggtggaagcgtccggcgcgacggtggcttcaatctgggtatcttccgcggcttcttcctcttccgccgcgcggttcacctgggtggtgacaatcgtcatcacaatcgcgagcaccacgaaaattgccgcgccaattttggtgatcaacagcagcttgccttcatagctctttgccttgctcttgccgaaaaaggtttccgcgccgccgccgatggcgcccagcccctggcgctggccctgttgcagcaaaacgacgacgatcagaacgatggcgacaaggatcagcagaatgttgatgacgatcattagcccattcatggattttgttcctccccaggggcacaatcgccccgtatattacaagcacggattattataccatgttttttcgtctcatgcaaccgcttttgagaaaattacagaaacatcacgttgtccgcataagaaaaggccgcctcgttggacggcaatgaagtccgcttgaggcggccgcaagaattttgccattatgccgcttgccaatccctccgtcacggctgcgccgtgccaaaaggctccccttggcatcaaggggagctgtcagcgaagctgac

SEQ ID NO: 2579 - DNA, 14983 bp, Unknown
  16S sequences of unknown bacteria
tctgtgccatcacggcagcaatgaaggacggaaccggtctggaggaattcgctgcccgttatccagaacgattttatgatgtgggaatcgcagaatctcacgcagttactttctctgcaggactggcccatggcggacttcatccggtctttgccgtatactctacgtttttgcagcgcgcctatgatcaggtgatgcaggatatggcaatcgccaatgagcatgttttgctggcggtagaccgcgccggcatcgtcggggaagatggagaaacccatcagggaatctttgacatttcttttctttcttccattccggggattactattttatcccctgctacctatccagagcttcgggcctgtctggatcgtgcgatgtatcgatgcatcggaccggtggccgtccgatatcctaaggggcgggaaaaggcttttccagcgggactgcatggaaatgaaaaatttcagctttcaaaggatgtagacattcttttgatttcttatggtcggcttgcggtttcctgttgccaggcggcgggactccttcggcaaaagggagtcgacgtaggtgtattaaaattgacacagctgctaccttattgtgaagaattgctgccgatgtttttaaaaaagaaaagtattttttttgtagaagaagcaatagaacaagggtcaatctctcaaatgactggaaatctgcttttgcaaaatggatatcaaggcaaattttttgtccgggcagtgcccaatcgatttttggcacaggcgtctgtcgatgaaattttcgaagaattaggatggacaccgcaaatgctcgccgcttgggtagaagaatcaatagggtgatgacatgatgaaaacacgtttagacataaaattggttcagctgggcctggtttctggccgggataaagccaaagcgattattatggccggaatcgtttatgtgaatgggcaaaaggcggacaaagctggaaccgaggttttggatgaagataaaattgaactgcggggggaaacactgcgctacgtttcccgaggcggcctgaagctggaaaaagcttttgaatcattcccgattcaggttcagaatgctatctgtatggatattggcgcatctaccggcggattcactgattgtatgctgcaaaacggtgccaaaaaagtttatgccattgatgttggttatggccaactcgcttggaaactgcggacggacgaaagggtagtcaatctggaacggaccaatttccgccatgttaccaaagagcaggtgacggatcctgtgaattttgcaagtgtggatgtctcatttatttccctgaccttaattctcccggcggcttatcccttgctgtctgatgatggtgaaatgatctgcctaattaaaccacagtttgaagcgggaaaaggctttgttgggaaaaaaggcgtggtaaaagattcgcaaattcatcaagatactattgtaaaggtaattgactttgcagttgaaacaggattttctgtactgggattaacattttcaccagtaaaaggaccagaaggaaatatagaatatttagtttatctgaaaaaagaactttctcctcgtctggaaattgatccggaaatgatcagttctgttgtagaagcgtctcatatgcagctggacaaacaataggggggacgattatgcaagggtatatcatccccaatttggggaaggccaactcgcgagcttgcacatttgccgtcgctcgtgtaatggaaaaatgcggtatcactgcagtaatgccagaagcaatgcagcgggaattccccatccgcagcgtactgtttcaaccaaaagagcaagggctaaaaaacagtgattttattattgccattggaggagacggcacgattcttcatatagcacaggatgctgtacgatatgacgtacccgttttagggattaatgcgggacgcgtgggatttcttgccaccattgaacgggaagaaacggagctaattgcaaaaattgcttcgggcgattatcaaatagaaaatcgaatgttgattgaggcctcggttggtacagaaaactgctgggctgtcaacgatatcgtattgacccgcggtgaatattctcgtatcgttgatatcgatatactctgtgatggcaatcccctttactcattgcgcggagacggtgttatcctcgcaacgcccacgggttctaccgcctatgctatgagcgccggcggaccggtagtggatccatccattcaatcaatcagtttatcccccatttgtccatattcgcttttttccagaacgattctattcgcaccggaacggaaattaacgttatgtgccaagcatgtaaacaatgacagtgacctgattttatcggcagatggaagtcttggaatcaaagttccaattggaagggatatacaagtacagcgttcccaaaaagttttcagactaatccgctttgcgggaaaaggattttatgaggttttaaatcaaaaattaatgtggggaggcagtcatgaatgaaatcgaaacgacatcagaaaattttggagttgatcgaatcaaatgccgtggatacacaagaagaacttcttcgtctgttgcgtgaaaacggatatgaagtcacacaggctaccgtctcgcgggatattaaagaattacggctggtaaaaactgcagccaatgatggcaaatatcagtacagcgtttcggcaagtaagcctcgaccagacatgtcttcccaattttataccttttttaataagtcggtttatagtgttgatcactgcaaaaactttgttgttgtgaaatgccacaccggtatggcaaatgctgtttgcgaaatgttggatgccatggagataaaaggcattgtcggtacgctttccggcgacaatactttctttgttatgatgcgtgaagatcagttagcggaagagctggcagaggaattaagcaagcatatgcaaggcaggtgaaattaatgctttcacagctttttattcaaaatattgccgtaatcgaaaaggtacaggtcgcttttgaaaaggggttaaatgtatttaccggtgaaaccggtgcaggtaaatccattgtcattgatgcaattaatgctgttttagggaaccgcacatctcgtgatcttgtcagaacaggcgcacccaaagcgctggttactgctctgtttgaaggaattggcgatgagaccaaagagcagttgctttccatgggatttgagccggaggaggatggctctcttttgctctctagggaaatttccgccgatggaaaaacctcctgcaaaattggcgggaggccctctaccgtgtcaattctacgagaagttgcgcaaagtctcatcaacattcatggacagcatgataatcagtttcttttgttgccggaacaacatctggtatatattgatcaatttggaaaaacagcggcgcttttaaaagaatatcgagtggaatatgcttattatgtagaactgcagcgtaaattacgccagcttcagactgatgaaagggaaaaggcacagcggacagacctgctttcttatcaaatcaatgaaatttcttccgcggcactttttccggatgaagaagaagagttgcaatcggcaaaaaaaaagatgcagaacagtgtaaaaatcatagaagcgttgcatatcgcccatgatcttttgcagggaacagaagaaagcgatggcattttgtctatgctagatcagacacaggaacaatttcagatgctggaggtttattatccgcaaataaaatctgatcggattctggacatgcgttatgaattagaggaagttagggaaaacctgagggacgcattatccgatgcagaaatggatcctgcagagctggatcgcattgaagaacgcttagatcttatttttcgcctgaaaagaaaatatggcggatcagtggaagaaattctggcttttaaagaacgggctcagcaggaattggattctatcatccacgcagaagagctgcaggccaaattggaaaaggaacacggacaaagtgaagcacgtttgataaaattggcaaagcagttaagtgagaaaaggaaaagtgcagccaagcaatttgaggatcaagtttgtgccgaactgacttttttggatatgccttctgtccgttttattgttcatgcggaaacgggagaattggacgaaacgggaattgaccgaatggaattttatatttcaaccaacccaggcgaaccgccgaaacccattggaaaaattgcttccggcggcgaactgtcccggataatgctcagcctcaaaaacgtaattgcagagggagatcgggtcggaacactgatttttgacgaagtagatacgggtgtcagcggtagggcagctcagaaaattgggagaaagctgaagcaggcttccgcaggcagacaaatcatctgtgtcacgcatctggcacaagttgctgcctttgccgatacccatctgctgattgcaaaaatagttcgggatggccgcacttttacaaccgtcaatgcgttaccgcaggaagaacgggtacaggaattagcgcgcatcatgggtggggaaaacttaacaccaacggttttggccagcgccagggaattgattttgcaggcaaaggaaaatgacaatggaagataaaaaacttctgcagcttgtgtcggatattggttttgacatgctttcttatggcggtgaaatttatcgggtagaagaaacggttaagcgaatctgcttcgcatatggaatcgagatcgtggacgtttttgcgattccttctaccattattgtttcgatcacccgccaggaagaaacatacagccgaaccagacggattatttccaaaggtactgatttggacaaggtagaccagttaaacaatctttcccgccagctttgcagggaaaaaccggactacatttctgccaaagaaatgctccggcagatccgcaccggtatagaatacccgctttggatgctttgtggtgcgcatggcgcagctgcgttgattttcgccctgttttttggcggcaactggaaagacggcatgtgggcgttcccaatcggcatcatgattaagctggtttcctatgggatgggaaaactaaatgccaatagtttttttgtcaccgtaatctgcggggctttgtccgctttgatggcgggatttggcgctcagcttcatatactggatcaggtcagccatgtcctgatgggagcaattatgaatctagtaccaggactgatgcttaccaatgctatgcgggatattatggcaggggattttattgcaggattgacgcgaatagcagaggccgtactcattggtgcaggaattgccgttggcgtaatgatgcccctgtctttctttcaatcactgctgggaaaaagcagtgtgcgtggcgactttttaacctgcctgtatgcagcagctggtgtggtagctttcggcatcgtatttaatcttcgcaataagaagttgctgttttctgcaatcgggggagccatcagctggctggcataccttttaacttgccgcttgtttacaacggatattttcggttattttgttgcggcagcggtcatgtcgatttatgcagagatattcgccagaattcacaaaacgccggtaacaatttatttggtggcgggattaatccctctggttccaggaagcggtatttaccgcaccatggaatactgtgttatgggggaaaaccagctattctgggagacaggcctgtatacgttagaaatcgcggcggtgataggctttgccatgatctgtgtttcttccattgttcgcattctctttaccgggcggtctgtttgccgagtttataggaaaataaaagatcattatttatgtgatttgtaaaaaaacttgacaaaaaagaaaaaacttattataatcaagtgcgataggtaaaaagcggtgaagagaagaagtagcaatactgattcaggtaaagagagcctttggctggtggaaaaaggcgctgaatggttttgtgaatacatcttggagctaccttccgaatggttttctagtaggcaagggcgggttctcccgttacagagagaagatatcggcagtaatgcccgtatccggtgaggccacagtgatgtggtgaacgaggtggtaccgcgtaagtttacgccctctgtccgaaacaggacagagggcttttatttttgtaaaggagaattggttatgacagtttttgaagaatttaaacgccgcgggctgattgcccaatgtactgacgaggaaaaagtaaaagaacttttagaaaaggaaaaagtcactttttatattggattcgacgccactgcagatagtttgcatgttggtcattttttacagctgattgttatcaaacatcttcaaaaagccggacatgtaccgatattgctgttgggaaccggtacaacgatgatcggtgatccgacgggcaagactgatatgcgaaagatgatgactgtggatgaaattaactataatgcagatcagtttttaaaacaaatgagtaaatttgttgatatcacgcctggaaaagccatcattgcacgaaatggtgactggctgatgaatctaaaatacattgagcttttacgagatgtgggcgttcacttttctgttaataaaatgctttctgcagactgtgtgaaaactcgtttagaacggggatgcaccttcttagaattcaactatatgatcatgcagagttacgattttttacatttgttccgggaatacggatgtaaaatggagttgggaggcaatgatcaatggtccaatattttgggcggagttgatttagtgcgccgggtagaacgagaagaagtttacggcctgacctttacactgctgaccaccaaagaaggtaaaaagatggggaaaaccgaaaatggtgcgctttggcttaaccctgaaaagacaacaccatacgaatttttccagtactggcgtaatgtagacgatgcagatgttattaattgtttgaaattacttacctttttgccgattgaggaaatcgaagcgatggaaaattggcagggaagcgaactgaataaggcaaaagaaattctggcttatgaattgacgaaaatggttcacagcaaagaagatgcggataaagcgttggaagcggcaaaagctttgttttccggcggctcagacaacagcaacatgccggcaacccaattgccggaagaattgttccaggacggttctgttggaattttggatttgctggtttctacaggtttggcaccgtcaaaggcagaggggcgcagactggtacaacagggcggtatttctgtcaatgaggaaaaagtaatggatccgactgcccgtatcccggcggatctgtttgcaaaaggtgatgttattgtgaaaaaaggtaaaaaggtattccataaagttacaaaataacttgagaaaaggctcgctgctttgtgttttcaaaatagcggcctttttctttttcatcagctgatagcaggttttcttgcttaagtataacagcgtttttcttgaaaaaagaatagatgtgcagtataatttgattaacctttgtcaatatccaaatagggagggattatttacaggtgcaggaactggaatttaccctggagcagcaaatggccgtatttggcattcaggacaaaaatatccgtgtgatcgaacaggctttgcctgtttctatccgtgcaagaaacgcgcatatcgaaatcaccggcgaatcggatgacgacgtaaaaaatgctgccgatgttttgaatcatttgaaaatcctttatgataacaaggaagaaattacaatcgatgtggtctatcgtgtactagaatccgttcaaaacggagaaatttatgaaacgctaagcgccatgtctgatattgtcgtcattgctcactcgaatcggcccatcaagtgcaaaactatagggcaaaaaaattatatcaaagcccttcaaaaaaatacggtcacactctgtattggacccgctggtaccggaaaaacttatcttgccgtcgcccaggctgtggcagacttaaaagatggcaagatcgagcgaattattatgagccgccctgccatagaggccggcgaggaaaggctgggatttttgccgggggatctgtcccaaaaagttgacccttacctgcggcctttatatgacgcattaaatgatatgctgggcgctgagagtgttcagaaatatctggaacgcggcgtaattgaaatcgctcctttggcatatatgcggggaaggactttaaatagagcaagtattattatagatgaaagccaaaatgcttcactgtcaactttgaaaatggcattaacccgtctgggagaagactccaaaatggtattgactggagatatcacgcagattgatttacccaaaaaagaagattctggactggaaaaatgtgcctctattctcagctcaatcgaaggaattgcgattgttcgtttaaataaccgcgatgtggtgcggaaccgtctggtcaaagatattgtcaaagcatttgaaaaagcagaaagcgagaaaaaaacagctgcattcaatcgtcagcaaacccgtggaaaaagaaaataatctgtttggaaaaacgtgcagtactgttttcatgctgcgcgtttttatatcagggtactttcctcagtattatagagaaaaatactggatgaaaagctctggcttatatgctgtttcttccttgggaaaagtagtaaaaaatgtgttttttctggcaaaattatcaaaaaaacctttacgaacgatcatggaaagatgtataatatacatgcattgtagaaataaaaacaaactttctatgtgtgaatagattcgtctgctgaaaatgttttagaattgcaaaagtacaaaggaaatagcagataaaataaatggagaggggaagatacgccatttggcggaaaataatggaaaaactaaaagtgcaaatttcaaatcgacaaaaacaagtaaaaatcccttccgggacaagattgttactgcggcgttgttgtcatgccgtattggcttatgaaaaatttgaaaaaccagcagaagtcagtatcagttttattgacaaccgggaaatcaagcacttaaacgcagagtttcgaggaaaagatattgaaacggatgtactttctttcccacttggagaaaatggcatttttgacaaaaatgaagatactggcgcctatatgttgggagatattgttatctctgtagaaaaagcgacagcgcaggcggagttgtatggccattcttttcagcgggaaatgggatttttgacggttcattccatgcttcacttactcggctacgatcatgaagcgggtggattggaggcagcaaaaatgcgagaaaaagaagaaatgattctggcgcggttaggccttacgagagatacagatgatttggaaaccgtcaccggaaaataggaggatataatgggaaaaacagcctcggcctttcttgcgattgttggccgaccgaacgtgggaaaatccagcttattgaaccggtttgtaggagagaaggttgcaattgtatcgccgaaaccacagacgacccgtacaaggatcaccggcgtgttgacacaggaaaatacccaatttgtctttattgatacaccaggactgcataatcctaaaaccaagctcagcgaattcatggtaaaacaaatcaaggattcggtagcagatgtagatgctgccgtattggtaacggaaccgttgggcaaaatccacccaacagagctggaattgttgcagcgttttcgagacctacggcttcctgccattttggttattaataaaattgatactattcccaaaaaagatatgatgatggaaaagattgccactttttccgaattgtttccatttgaagcagtcgtaccggtcagcgctttgaacggagacggcctccctcaactgttggacgaactgtcgcatcacgcgaaagaaggcccccattattttcctgatgatgcaatgaccgaccagccggaacgggttattatcgcggagatcatccgggaaaagcttttgaattgcttaaatgaagaaattccccatggaacggctgttacaatagagcagatgacagaccgggaacaccaaaatttgatcgatatccatgccgtgatctactgcgaaaaggatagtcataaaaggattatcattggaaaacaagggacgatgctaaaaaagattgccagccaggcaaggcgggaaattgaatcttttttaggtgttaaaattaatctgcaatgctgggtaaaagtcaaagaggactggagaaatcgtcctggcatcattcgcgatcttggttttcgggaatcctaaaggcaatgggcttgtgggccaattggggctcactgcccattttttacaagaaaattttcttcttataatctcccaatatgccttgtttgactgttgagaaattgtatgctactatgacaataacaccaattattgatgtttttttgtatgaaagactgtgttgtcaagggcaaatttatggaagaaatggactcttttcccggtaatagctttttccctgtgtggaaatactgttagtgtatttcaccggtgggaggtttttatatgaggccggaagacgcatggaatcaatttttaaaaactggagcagtaagcgattatatgcaataccgcaaagcctctatgttgctgcggcatttgcaagacgaatcggaggatgaactggccaatgcagatcaaaacgaaggggatcattctcaaagaactggccaatggggatgaagataagcttttgacgatcctgacggaagaccggggcgtgatttttgcttatgccaaaggggctcgccgatttaaaaatccgttggctccttctactggacttttgtgttattcatcaatgattttattttggaatcgagagcgctattcattggaccatgctgacagcattgaacaatttttcggacttcggcaatcgatggaaaaacttgccctagcttcttactttgcggaggtttctacggtgctgggtccaagagagaacgatgatgggcagtttttaaaattattactaaactgccttttctttttgcaaaataacaggattgatcaaatgctcttaaaagccctttttgaattgcgtgcattgagcatttcaggttttatgccagatttgattgcgtgtgcaggctgcggctgttttacggcagataggatgtttttttatccgaatgatggcgttatctactgcgaaaattgcagtacaaatcaaaaagaagtacatatttctttgacgccgggcgccttagctgccatgcgccatattctttattctccaacagaaaagctatttgcctttacaattgggctggaaagtatccactgtttgaatgacgcatcagaacgatttttacaaagtcaaacagagcgaagttaccaaagcttggaattctttcactctattgtttcgtttggttaagggaaggtgacaacattgccgattgaaaaaaaacaccagcaggcgctggagttggataaaattttaaatatgctggctgaatgtgccagctgtgatgacagcaaagaaagagctctgactttagagccccagaccagtctttaccgtgcaaaagaagaaatgaggcagacagcggatgccaataccctttcaaaccgtcatggtgctcccaccgtttataattttaaaaatatcaaaaatatggtcaaacgtgcagaactggggaccagtctttctttacgggaactattggaaatttccaatgcgcttcgtaccattcgcgcactatctgattggagaaagcactgtgaggcggtggaaagctctttggattaccttttcagcggcttaacgccccatccttttattgaggataaaatcaatacggcaatcctgtctgaggatatggtggcagataacgcaagtccggccttggcagatattcgcagaaagattcgtaatgcaggtctcagcgtaaaaaatcagctggataagctgattcattctccgtcttatcaaaaatatctccaggaaagtttggtcaccatgcgagatgggcgctatgttgttccggtcaaagccgaacatcgcgcagaaatcaagggcttggtgcatgacacttcttccagtggtgccaccttatttattgaacctttgggcgttgtagaagccaataatgaaattcgcttactacagggaaaagaaagcgatgagattgcccgaattgttgccgaattatcggctttaatagggcagcatagccaaagtattctgcaggattatgattcggttgtggaaattgatttcatttttgcgaaatcacgtttggcagataagatgcatgcagtggaaccgattttgaccgatgatggcattattcgattgaaaaaagcgagacaccccatgattttgaaaaatatagtggtgccaacagatatttatttgggagagtcatttgatacgctgatcatcacagggcccaatacgggaggcaaaacagtcgcactgaaaaccctagggttatttaccctgatggcaatgtgtggcttgatgattccagcggcggacggaagccagatctctatttttgaaaatgttttggccgatattggcgacgagcaaagtatagaacaaaatttatctaccttttcggcccatatggttaatattatctcgattctggagaaaacagataatcgaactcttgttttattggatgagttgggagctggtaccgacccggtagagggagctgcgcttgctatttcaattatcgaatcgcttcgccgcacaggagcacgaattgtggcaaccacccattatgcggaaattaagctgtttgcattggagacggaaggagtagaaaacggatcatgtgaatttgatgtttcttcactgcggcctacttataagctgtccattggtgtacctggcaaatctaatgcttttgcgatttcacagcggttgggaatccgtgcggaaattgtaaatcgggcaaaagaactggtttcttacgaaagtgcaaagttcgaagacgcagtttcacagctggaacaaacgcgccagagccttgccaaagaattggaggaggcgcagcttttaagggtacaggtgcaaactaccaaaaaggagatcgctgagtataaagcgaatctggataaagaaaaggaaaaagaagtagaaaaagcaagatatgaagcgcggcgaattgtagaaaatgtgcgcgcagaatcggaaaaattattggatgagttgcaagaaatccgaaaacaaaaagattcagaggccttttcccagttggcatccaaagcaaaaacacaaatgcgttcgaacttgaatcgtttgtatgatcttgctgatccggtggcacaaaagcagcaggaagattataagttacctcgaccgctggtaaaaggagatacggtttttgtcactgatttgggttctgccggtaaagtcctatccttgccagacaaaaatggtatggtacaggtacaagccggagcgattaaactgacggtaaagcaatcgtctcttcggttagcagattcggctccaatcaaaaaaaccggaaagcgttcagcaggtggctctgtatcagtaagtgcaaccaagaaaacacagagggcaagtgacgcagaaatcgaccttcgcggtatgaatgcagaggaaggcattatggaaaccgatcgttttattgataatgcggttatgaccggactgcatacccttacactcattcatggcaaagggactggtattttacggaacgctatccatcaacacctacgccgtcataaaaatgttcgatccttccgattgggtgtttatggagagggggaaaccggtgttacaatcgtagagttaaagtgatcccaacggcgtttgtggaatgaaaaatctgaaacaaacaggcctcactgttgtaaggcctgtttaaaaggttgataaaattgacacaagagaaaaagattcggcgattttattgggttttagcagccgcggtattgttcactgtattgataacttggctgattttaacattaacacagcctgttttaaccgactcagccattcatgtttggacaataactcaaacaccggcagaataccaagacaaaataaatatcaatactgcgaccattgatgaactcacttatgccgagggtatcggtccatctacagccaaaaatatttatgattatttgcaacaaaaagggccagttgactccatagacgatttagacagcgttcctggaattggagagaaaagactggaagcgttgaaaaaaattttttatgcaggttagtttaaatgattatcatcaacgaattttttggataaggctgtgttttcatcatctggaatcgggatattgctttcgtccggagacggtttgtcatgacgagttacactatacatcagatttttgggaataatattttttttcggatcaatctgggtgtagtttccacgttttataggttcatcttctttcgttttatggcacatatcgttcacctcttatttttattttttccggtttccaatcgattatccccgataaattaatccaaaaatctgcatgttttttggattttataattgacaaaagggaggaaatccgatataataagacacgtcgctgaaaagcggtaaggagtgggagcatagctcagctgggagagcatctgccttacaagcagagggtcacaggttcgagccctgttgttcccaccaaaagaaatggcctggtagttcagttggttagaacgctagcctgtcacgctagaggtcgtgggttcgaaccccatccaggtcgccaaaaaagggatgtggccctgtagctcagttggtagagcagaggactgaaaatcctcgtgtcgttggttcgat

SEQ ID NO: 2580 - DNA, 12110 bp, Unknown
  16S sequences of unknown bacteria
gattaacgtgctgttatcagcggataggagaatggaagttatggcatatttttacgaagaaccttctcacacttttagcgagtatcttctgattcctggatactcttcttcggaatgtatccccaataatgtgagtctgaaaactcccgttgtaaaattcaaaaaaggggaagaacctgcattgaccatgaacacccctttggtttctgccattatgcaggctgtttccggcgaaaaaatggcgattgcattagcgcgtgaaggaggtatctctttcatctatggttcacagtccattgaggatgaagccgcaatggttgcgcgggttaaaaattacaaggcgggctttgtccgcagcgactccaatatccgccctgatcagaccttgaaagatattttggacttgaaagcaaaaactggccattccactgtcgcagtgaccgatgacggcactgccgaaggcaaactgctgggtattgtcactagccgggattaccgtgtcagccgcatggacccttctaccaaggtagcagaattcatgactccttttgaaagcctgatttatgccaaagaaggcattacgctgaaagaggccaataatattatttgggaccataagctcaacagcctgccggttatcgatgaaaatcagcgtcttttgtatatggtattccgcaaagactatgattctcataaggaaaacccgctggaactgttggatgcttctaaacgctatgttgtcggtgccggaatcaatacccgcgattacgaagaacgcattcccgctttgatagaagccggtgcggatgtgctgtgcattgattcttccgaaggcttttcggaatggcaaaaacgcacgttggactggactcgtgccaaatacggtgattcggtaaaaatcggcgcgggaaatgtggttgatcgggaaggctttttgttcctggctgaggctggagcagattttgtcaaagttggtatcggcggcggctctatctgcatcacccgcgagcaaaagggtatcggacgtgggcaggctaccgctttgattgaggttgccaaagcccgggatgagtattacgccagaaccggcatttatgttccggtctgctctgatggtggcattgttcatgactatcatgtaactctggcactggccatgggagccgatttcatcatgctgggccggtatttctcccggtttgatgaaagccccaccaataaagtcatgatcaatggcaactacatgaaagagtactggggtgaaggttccagccgtgcgagaaactggcagcgttacgatctgggcggtgaagcaaagctttcttttgaagagggtgtggattcttacgttccctatgccggttctttaaaggataatttgactctcacgttatataaagttcgttctaccatgtgtaactgtggcgcccttaccattccggaactgcaggaaaaagcaaaaatcacactggtttccgcaaccagtatcgtagaaggcggcgcccacgatgttgtcctcaaagagaataataaaatatcgaaataatctttttctttgagtttggcgaagaaaagaggttttcatcccccgcttcgtcgggggattttttatgagggcatattgggacatgtatcttctaagcccttgaaaaggagtatttatggcatcctgtatgattcatttatatgctggctggctatatgcacaaaaaaatacggaatttttggatcatccgaacttttatttgggctgtattctacctgattgcgttaatttgggtggatttgcgaaaaaagaaattcgttggcattcccatttgagggcagcagatctttcccaatgggaagaaaatgccttagctttttatcaaaagaaccgggacagcatttccgcccctcttttaaccggatatgtcatacacattctgaccgatattctttgggaccgttattttcatgaagaaatttggtcacaagctcagaaaatggaaccgcaaatacaaaatggctttgatccgggttggaatgagtgtttccgctttgacaaagaacgaatgatttctccttggtggcaaaacgcgatccgtcctttgttggaacaagcttgtccgattcccatcaacggcctgtcggtttctttggaaaaaaattatctgcagtatatcttgcataaatatgaaaaggggcttcctttggccccgccccgcattcttactctggagcacatggaaacgcttgggaattatttgcttcttgccggagcaaaagtctttcacaaaatttcgtaaaaattttcacagaactaaattttaaggaattcttttgccagatatatcgtttacaaaagaacctatgtatttttattgcaaggtaggaaaaggatcgaactgtccctgttttctgacgtttctggtgcggatgacaattttttgatttttacgatactactttatcaagaaaggattcgaaaacatggcaggacaagaagtcgatcgatcaaaaaatgatttctcaaaaggaccggtatggaaatgtattgtcatgcaggcagtccctttgacaattgcgcagttggttcagcttttatataacgtcatcgaccgtatttatatcgggcatatgggagacggaagcagcattgcgctgaccggcgtggggctaacctttcctattgtaacacttattatggcatttaccgcactattcggaataggcggcgtaccactgttttcaatggcacgaggcgccggaaaaaaggagcaggcagaaaaaatccttggcaattctttcggattgcttaccataagcgccgttattttaactgtagttagttatttattctgccgccccattttatttttatttggcgccagtgaagcttcttatggatatgcacagtcatatttaaaaatttatcttatcggcacccttttttcgatgttgacaaccggactgaatggctatatcaatgcacagggatttcctcggattggtatgctgacaacagttttaggtgcagttgccaacatcatactggatcctatttttatttttgtactcgacatgggtgttgcgggcgcagcactggcaacagtcattggtcagatgatatccgcggtgtgggtagtacagtttctagtcggaaaaaaggcggtcattcgcttaaaaaaaagctgcatcaagctggacagaaaaattaccaaaaatattttcttgctgggcacctcgaattttattatgcagggaaccaattgcgctgttcaaatcgtatgcaattccactttacaaatctatggcggagacgtttatgtggggattatgacggtactcaattctattcgagaaatttttatgctcccacttaacggaatcgctaacggagggcagcccgttatcagttttaactatggtgcaaagaaaaacgaccgagtaaaagcaggaatccgttttattacattgatcggatgcgcgtacaccttgatcgtttgggcatttatcgtcatatttccccgcttttggttcagcattttttcaaatgatatgcaaatgacgaatttaggaatcgacgcgttgaaaatttacttttttggctttgtttttatgtcgtttcaatttgcaggacagcatacatttcaggccttgggagatgcgaaacatgcgattttcttctctctgcttcgcaaagcagtcattgtcgtaccattaactctgcttttacccatattgggattcggtgtgaatggtgttttcttagcagagccaatatccaatatcatcggcgggttatccagctatatcacaatgaggatgacagtatacaaaaaattgtaggttcatttgtcagaaaaactttttccatcttataacaaaatcgccctatcaataatccttctactccccttcactaaaacgtgattaggattatttagagaaaaattcaacattctgcgccagatgatgattttgtgaaaataagtcagcaattcagatacaaaaaacatccgcatgaatttatcatgcggatgtttttattttagcgctaaaaacagttttttcatagcggggggcagttcagcttcacgccaatcttttggtccctccaataaagcagctggacatcttgctacttattagcaggctcccatttgcaacggacgggagaaacaatcgcttcttcctttttcaactctttaaacgccttatcaatttctttccggtccagccctgacagtttttctacttcgccggcagaaaccggttttcccgcttcccgcataacttccaacactttttcttttacttccatggtaaaacctcctaaaatctattttccacaggaataaagctgtgggttcacacaaatacgattaaaatagtatgagttaattatagcataaaacggaaaccaatgcaaatcatttccattactgttttttcgattttcgccaagaataaagatattactttttaaatgatgaaacggaggagaatatatggactatctgcagtattcccaggattttcaaatcaattcctattttaatgcccttccgccttacgtacggcaaattatattagacgcctatggtgaaatctccacattaggagaattaaaagaatgtgcagattacatcatgaacagcggaatgtactaattcttattctattactgtacgcttacgagtcagtagataaaccgcgaacagaatcagcgcacagcctagcaactttacccctgataagctttcattcaaaatcaaagcaccgcaaaccacgctggtaattggctcaaacatacttaaaatagcagaggtagaagcacccgtatagcggattccaacctgcaaaaacgcattggctcctaccgacacagatactgcaacgataaaagtataaagccaagacagagctgtcaaatcaaaagtgacctgattggtcattgctccgtacagaaaagtgtagatcgaaacaaagagacaggtatacaaagaaaataccatcggatgcatatctttaatcccccacttatctaccgacatcatataaaaagcataagtcaggccagaacctaatgccaataaaataccgacaagactaccactggcaccaccctggaaaaagcagagaattcctgcgctggaaatcatcaaagcaaggatttttgcacggtcaatatgttctttataaaacagaaaacataaaatcgaaacaaaagtaggataaacaaaatgcagagtggtcgacatacccaccggaatataattataggacatattaagcattacagaagtaaccgttgacccaatcaatgcaataatactgatttttcccaaggtctttgctggaattttgatcgggatttttttgaacaacaaaaaggccaagataatcgggatcggcagcaaagaacggaacattgtcatcataacaggattagagccatgcgtatatgtgtacttggccatcgtcggtgtaataccaaaaataactgcggacaaaatcaccagggcgattcctttcatcttgttcatctgaaaagtccatccttttttaattcattctggatatggcaattgtctttattgaatcgacaggataattctaacattgacaaaatgggaaaacaagtataaattagtagtatatagaaaaaagattgacttgttttcctggagggatagaccaatgaaaaaatcgcggaaattttatgcccttttttgtgcatttacagttattatgctttgtattcctcatgtgcaggccgcgccagtattgaatcccagtttttacgatgtcggattagggttcggtcccggcaacgtttcctcttcttcatccagcggcgaagagcctgcccaaaatcaacaggatcagcaacagcaatccaataatacgccggcatcttcccagcaaacacaaaccggttcatcctccgggcttacgccggaacagattgagcaacagcagcaacaacaaaatcagctgaacaatttaaatcagcagatttctaacctgcagcagcaacaatctgctttgcagcaacaaatcaatgcaaccaaagaccaaaaagagcaggccgctattcaaaaagccaatattgacagtcagctttacagtaccagccagcaaatccagttggttaaccaaaagattgctctattgcaaaacaatattgatgaagccaatcagcagatcggtgatctggaggtcgaaattgacagtcagtatgaacagtttaaaaatcaaatccgcagttcctatatgtctcccgaatactcatttttagaatatttattggggtctgagagttttgcagatttttccgtccgtatggaaacggtaacacgtatttccgaatacgatcagtcagttattaatcagttggagacgcaaatcagcgatttacatacgcttcaggaatctcttgcggcagacaaaacggatcttgagggcagcaccactgagttggaatctttgaaaaatcagctcaactcacagtctgctcaagcacaggattatatcaacgacatcgatgagatggaaaaagcttttctggcggataccgctgcactacaggcaaaacaaaaagcaatccaagcagaaattgaccaaatttatgctaatctggagtctactggcgaataccaaggagatggtacctgggcatggccagtaccgggatattcctacatttcctctgcttatggctggcgctttcaagggacagacttccacaccggtatggatattgccggcagcggtaccagtatttatggcgcacgaattgtcgccagcggtgcgggaactgttgtaaaagtacagaacaatggtagcaatggctatggattattctgtattattgaccacggcggcggttatactaccttgtatgctcatactagcagtatcgttgtttccgttggcgatgtcgtagaaaaaggccaaacaattggctatgttggaaactccggttgggttatcccctctccttccgcctctaatccgaccggcggatcccatttacatattgaattccgcattaatggtgctcatcaaaatccagcgaattttctatattgacagatcaaccccgacgcagagcgctgtgtcggggttatttcgtaaataaaaaatcccctcttgcttttttgagaagaggggatttttttatttcgtgtaattatcaaaatatccttgaaccaatacaataggcgttcctttgtcaccgcttccagatgttaaatcgcacaaggaaccaattaaatcggtcaggtggcggggggtcgtcccctgggaaaccatctgtccagtcaaatcttgatctttattgcggatataatcagaaatcgcatctttcagcgcctgaccgttcaaatgcgcaaagtcattgtccgccagatatttcagctttacttcgttgggttgcccttccaagcctttggtatatgcgggggaaaccaccggatcagcaagctcccaaatctttcctaccggatccttaaaagcgccatcgccgtaaaccataacctctacctgttttccacaggcatcaaaaatcaacttttggatccgttctacgactggatcacaattacgcgggaacaattttactttatcttcggtagccttgttgctgcctaataggccatactgttcgttgcagccgctaccgtccaccggatgatttaaaatttcgtccaaacacaaaactttctccgccccagcagcctgaagcaaccgcttgctacggacccgggtatgaatatcacagcaaaggacgtttttggtgtaacgcaggattgtacgacagtcattagccagtacaatctgcacctcacaaccgcaggaggtaatcaagtctttgtaatattcgatataatccacaccggtgaatacatgtttttgatacccaaataactttcgatattctgcctccgtaagtacatcgctccagggattgattcccttttcatctaaacgatccaaatcgatcagatgatttcccacttcatctgacggatagcttaacatcagcaccatcttttttacacccattgcaatgccttttaagcaaatggcaaagcgatttcggctgagaataggaaagatcacaccgagaacaccatccgggaatttggcctttacatctgtcgcaatctgttttgtagtagcataatttccctgggcacgggctactaccgcttctgttacagcaatcacatcccggtcaccaatcgaaaacgaatcactttcggcggcgttgagcacgctgtcggctacaatttttgcaatatcgtccccttcgcgaataataggggcgcggatgccgcgagatacggttccaacgagtctttccacaatagttgacctccgttcctgtttgaatcaggagaaaatagaattgataaacaaattgattatacatgatttcgacaaattcgtaaagtttttcttttgaatcattcctgtttaccaaaaaactgttcctgcaattttctggcagtgggcgtatcagccagaccaccatccgccgtctcttttaaagaaacgggaagtgaatctccaattcgtttcatagcgataatcacctcatctgccggaatcgcgctttcaattccggcaagggccagttccgccgccacaaatgcatttgctgtacccattgcattacgcttgatacagggaatttccaccaatcccgctaccggatcgcaaaccaatcccagtatatttttcagcgcaatcgcacaagcatgcgatacctgctgcggtgtgcctcccgccatctccaccaaagcagcagcagccattgccgacgcgctgccgcattctgcctgacaaccaccttccgcaccagaaatactggcgttttgggcaatcaccatgccgattgccgatgcggtaaacaaagcccgaacagccgtatcgtcgctgatacgatgttcctcctgcatcgtcagcacggcagcaggtatgattccgcaggagccagcggtaggggcggcgacaattttacccattgcagcattcagttcggaaaccgccaatgctttcaccattgcggatccaaacatttttccacagatatttttcccatcatccaccgaacatttcattttgaacgctgccccaccggtcaatccactggttgaccgcagatccggataagtgccgtcgattaccgcctggcgcatcaccgaaagactttgagccatcgtctcatataccttttccggcgtctgctccagctgctctgcctgttgagccaataccagatccgaaatgcggcaattttgcaaaacagcagtttgcacaagaccattgaccgaaagataatgaatcatcgcaaatcctcctttttattggggtgccagcacggtggagctaataatattaggcaaccgctccaaatcttggtttaactgcgtcgacaccggagaatccacctccagcgtcataacggccaagccgcctttttgccggcggctaagtcgaaaactgccgatattaatattttgtcccgctaaaaactgtgttactgccgctattgcgcctggcgtgtcgttatgcaggataataaacgtcgtagcggcgccagaaatatccacttccatgccgttaaccttatgaatccggatatttcctcccccaatcgaagctccctccaatgaaatgttttttccacttcgtccagtgagcgcaatcaacgccgtattgggatgagcaccgtcaatatgcatctcataaaaagaaatctccattccttgtcgattggccaaaaccaaactctgccggattcgcccgtcgctgggttccattcccatgataccagcgaccaaagccttatcggtaccatgccctttataggttttggcaaaggatccatgcagcccaatttccgcttttaccgcagtttctcccagcaacgcaccagcaatccggccgatgcgcactgcaccggcagtatgagaactggaaggtccgatcatgaccgggccaatgatatcaaaaacgttcatagtaaggctccttgcttgtctggaatttgttttcagtataccgcatcatcggacaaaaatccataaaaaaatccttctgccaaaaatctatttcggataaaaaaacagttaacaatttagtttaacagcattaaactaaatataagccagtttaatgctgttaaaccaagaaggggaaatcaaatggaggattataaattaggcgcaatggagacccgttttgctgaattaatttggtgccacgcacctgtttcttccggtgaactggtcaaaatctgccagaaggagctggaatggaaaaagtccacaacttataccatgctgcgccgtttatgccagcggggcatctttcaaaatcaggatgggatggtatctgcgctgttatccagagaggaatttcacgcactgcaaagtgaaaaatttattgcagacacttttcaaggttctctgcctgcttttctcgccgcctttaccaggcaaaaaaatgaaccgatcaggagattcgggaattggaagagctgattcatcagaaacgggagaaatgacttatgttgcagatattatttttaaagattgtaaacatgagtctaacttcggccttgattattcttttgatcctgattgtaaggattctttttcaaaaagtgccgaagaagtatatttatctgttctggagcgttgccttattccgccttttatgccctttttctttggaaagtatctggagtatgattcccagtgctgaaattcttcccactgaacttctcacatctaccaatcgctatgattggagcatccataccggcattatggaaatagaccaaactgtgaatcctgttttgtatgatacttcgccgtccgctctcgtttccaacttcacagtattgtcttggatttggctggccggcatggttggaatgctttgttacagtctgattgctctgatccgcctgcggcacaccctgattggcgccgtccggctccgtgatcagatttatttgtcggattacgtcgcttctccatttgttgttggtgttttccgccccaaaatttatttgctttccaacctttccacacgggagcagcaatacattctgcttcatgaacagactcatatccgccggtttgatccattttttcgcgtaattgcttttgcggcactttctatccactggttcaaccctctggtatgggcagcctttttattaagcggccgagacatggaaatggcctgtgatgaaatggttatgcaaaaactgggagaaaatatccgcagcgaatatgcccagtccctactggatctgaccaccggcaaacgacttccctttggggtgccactggccttttgtaaaaaagatgccaagctgcgaatccggaatatcatggcttataagaaacctcgccgatgggtaattttgtcggcaatcttggtattggtgttttttgcaccgggctggctttcaatccgaaaaaaacacaggagcatacgatttcttttccagcttatcaggatggaaagacagaatataacgaacaaatctatcatatcgatccctttgcactgcacataagccttcccaaaggatggtccgctgcattgcctgtaaaggaagaacgagacgcatctctcgtcggtttcacaccggtgtatctgatggaaaacggagaagttcaggctatcgtctgttacaatacgtttgagctgtatgacgaagaaatcccgccggaggaattttataaaacggtatatgctccgctgcgcctaggaagtttgtacctctgggacgattatactcccataaattcctcccaaaacaccgaaaccgctctggccaccgtttattataaagaagaagtgcaagggcagtctgcggcacaatggccggatcgtaccgttccgggaatcctcttttatgacaaggaacgccttgtttatcttgcgcttcagtttaccgatgtatccctgtcaacgcagcagattcgcaccatagcgcaaagcattcggatttctgatacaaaataaatcaaaaccactggtaaactagtggtttgctcaaaccccggaggggtcagtacttgttgacccctgaa

SEQ ID NO: 2581 - DNA, 8403 bp, Unknown
  16S sequences of unknown bacteria
cacaaaaccaaagaaaggtgctttagagcatcgtatcaacattattgatacccccggacacgttgactttacagtagaagtagagcgctccctgcgagtgctggacggctctgtaacagttctcagcgccaagggcggtgttgagcctcagaccgaaactgtatggcgtcaggccaacaagtatatggtccccagaatggcttatgttaataagatggatatcatgggtgcagacttctatcatgtaattgacatgatgaagacccgtctgcactgcaacccggttgccattcagctgcccatcggtgctgaacagttcttcaagggtctggtggatctggttgagatgaaggcctatatctacaatgatgatctgggcaaggatatttcggtaaccgagattccggatgatctgaaggagaaggctgaggaatatcatcagaagctgatcgaggctgctgctgagcaggacgaggaaattatgatgaagtacctggacggcgaggagctctccattgaggagatcaaggcttgcctgcgcaagggtaccatcaataacagcatcgttcccgttacctgcggtacttcttaccgcaacaagggtatccagaagctgctggatgccattgtggactatatgcccgctcctgtggatgtaccccacatcaagggcgtgaaccccgaaaccggcgaagaggaagagcgtccctcctccgataatgccccgttcgcggctctcgctttcaagattgctaccgacccctatgtaggtaagctcggcttcttccgtgtttactccggtaaggtagatgccggtaccaccgtttacaactccaacaaggatgacaacgagcgtatcggccgtattctgcagatgcacgccaaccaccgtaaggatatcgatacctgctatgctggtgatatcgctgcggctgtcggcctgaagaataccaccacaggtaacaccctgtgtgatcccaagcatccgatcattctcgagtcgatggagttcccggagcctgtaatccgtgtagccatcgagcccaagaccaaggctggtcaggagaagatggcaatcgcactggcgaagctcgctgaagaggaccccaccttcaagacctacaccgatgaggaaaccggtcagaccattatcgctggtatgggtgagctgcatctggaaattatcgttgaccgtctgctgcgtgaattcaaggtagaggccaatgttggtaagccccaggtatcctataaggaaaccatccgcaagatggctgatgtggataacaagtactcccgtcagtccggtggtaagggccagtacggtcacgttaagatcaaggttgagcccaacgagagcggtaagggttacgaattcatcaatgccatcgtcggcggtgctattcccaaggaatacattcccgcagttgacgacggtatcaagggcgctatgcaggccggtgtactggctggttatccggtagtagactgcaaggttaccctgtatgatggttcttaccacgaagttgactcctctgaaatggcatttaagatcgctggttctatggccttcaaggaggctatgcgcaaggctgatccggtcattctggagcccatcatggaagtaactgtaaacacccccgaggagtacatgggcgacgttatcggcgacctgaactcccgtcgtggtcagatcagaggtatggaggccgtattcggcgctcaggagatccgcgctctggttcccctgtctgagatgtttggttactccaccgatctgcgaagcaaaactcagggccgcggcaactacaccatggagcctcacagctatgtggaagtgcccaagaacattgcggacaagatcatcagcgagcgtacaaagaacaactaaaaaatctgcgtatctgcttgctttttccacggtttattgctacaataaatctgtggcagcaaacgatgtttgtgatttcataatcctataatttaagggaggacatttaaatggctaaggcacattttgaaagaaccaagccccatgttaacattggtaccatcggtcacgttgaccatggtaagaccactctgaccgctgcaattaccaagactctgggtctgcagggcaaggctgagttcatggattacaacatgatcgataaggctcccgaggagagagagcgtggtattaccatcaacaccgctcacgttgagtacgagactgagaaccgtcactatgctcacgttgactgccccggtcacgctgactatgtaaagaacatgatcaccggtgctgctcagatggatggcgctattctggttgtatctgccgctgacggccccatgcctcagaccagagagcacatcctgctggcccgtcaggtaggcgttccctacatcgttgtattcctgaacaaggctgaccaggttgacgatcccgagctgatcgagctggtagagatggaagttcgcgacctgctgagctcctatgacttccccggcgacgacactccgatcatcgttggttctgctctggctgctctggaagctcccaacgacatcaccgatcccgcttacaagccgatcctggatctgatggctgctgttgacgagtacattcctactcctgcccgtaacgacgagctgcccttcctgatgcccgttgaggatatcttcaccattactggtcgtggtaccgttgctaccggtcgtgtagagcgtggtcgtctgaacactggtgatgaagtagagctggttggtctgaaggaagagatttccaagaccgttgtaaccggtatcgaaatgttccgtaagattctggactacgctgaggctggtgataacatcggtgctctgcttcgtggtgttcagagaactgacatcgagcgtggtcaggttctgtgtaagcccggctccatcaagccccacaccaagttccgtggtcaggtttacgttctgaagcagtccgagggtggtcgtcatactcccttcttcaacaactatcgtcctcagttctacttcagaactaccgacgttaccggcgttatctctctgcccgagggcgtagagatgtgcatgcctggcgataacgttgagatggatgttgagctgatctcccccatcgctatcgagaccggtctgcgtttcgctattcgtgaaggcggccgtaccgttggttctggcgtagttatcgctatcaacgaataatctcggcttattgccattaaaaatctgatctgattttctccggtacagttcttcgggactgtaccggtttttttattccggaggaatgcaatatgcgttttctgctgctgtctgttgtggcagtgctcaaaacactgctctgcaaagggatttccctggttctgctcaccgggtggtttgtgcgtgaaaaacgggcgcacagcgctgcgtccgggacagttcctgcccgggtcatgcttagaaacatgcagcgggcccttgtgtggatctatggtatcgcggccctgctgtcctctgcggtgagctgtctcctgctccggcggctccggttccgccacagcttctccctgagcgctgcgctctttgctggcggcgctgctgccaccttctggcggtggagaaggggagaggcaagccggaggctgatgcgcctgctgcaccgggccgaacaggaccgccgcactgcataggcagagggttcagagataacaaaaaacgggaagcctggattggcttcccgttttttattgcttatgattgatgaggggcagtgtgccgaaagactcagcggcaggattccacagccttgagcagagcatcggtgcggtcggtcttttcccaggctacacccagttcctcccgtccgaagtgaccataggctgccagctggcggtagatgggacggcgcaggtccagcatgtgaataatggcctcaggacgcaggtcgaagaccttttccacggcctttgccagaacttcgtcctccaccttgccggtgccgaaggtattcacattgatggataccggatgagccacaccaatggcataggccagctggatctcgcacttgtctgccaggccggctgccacaatgttcttggcaacataccgggctgcataggcagcggagcggtccaccttggtcgggtccttacccgagaaggcgccgccgccatgacgaccatagccgccataggtgtccacgatgatcttgcgtccggtcagaccgctgtcaccctgagggccgcctacaacaaagcgtccggtggggtttacaaagtacttggtctggtcatccagcagttcagcgggaacgatgggcttgaccacatattccagaatgtcggcacggatctgctcggtgctgacatccggcgagtgctggttggagatgacgatggtatcgatacggctgggcttgtcgtccacatattccacagtcacctgggtcttgccgtcgggacgcagataggcgagagtgccgtccttgcgcacctgagccagacgcttggcgagcttgtgagccagggagattgccatgggcatcagttcgggggtttcattgcaggcgaaaccgaacatcatgccctggtcgccggcgccggtgacaaattcatcgctttccgcaccggtcttggtctccagggagtgatccacacccagggcaatatcggcggactgctcatcaatattggagataacgccgcaggtatcagcatcgaagccgtacttggcacgggtgtagccgatgtcccggatcacctgacgggcgatcttgggaatatccacatagcaggtggtggagatctcacccatgatgtaaaccataccggtggtgcaggtggtctcacaggcgacacgggcctgggggtccttggcaagaatggcatccagaacggcatccgagatctggtcacagatcttatcgggatggccttctgttaccgattcggatgtaaacagatactttctcatagagtactacttcctttctgtcagataaaatggtggtgatcccctttgtttcggcaaagaaaaatgcccggtatggcaaccgagcatttatgaaaacctcatctgtcggcttacccgcaggatttggcaccttgcacacagtgcaggttgccgggcatcacagggcctgttccctccgccactcttgataaggggatatttaattgtgccaaaataatatagcacacccagtcatggatgtcaagacatgcatgtcaggaagtttgcgggaaaagggagaacccccggggaatctgtcgcagtctgacaggttctccaggggttcggaaatggaaagggaaggatttttacttgggattacaggaacttcatcacatggcccagcttcttgtaggtgaccacagtgacgatggaaatgacaatgcccttggcaacattgaaggggatggcgccgaacagaatgtaggcagccaggctgtcaatggcggggttgacggcgttgcaggcggaaatgatggcgtcaatgggcatgatgttcgagaagaaggggatcagcaggtagtagtttgccagggcgcccacaatggcgatggcaacggtaccggcaaagcaggccagggcagtccccttgaccgaaagcatcttgcggtggatcagtccggctgtgacagcaaaggaggacaggatcaggaagtctgccagttcacccacgccgccggtggtggtggaaaggacatggaacaggtccttgatgagggtgacaatgattgcctgaaccggtcccatgatgaaagcggtgagcaaaatgggcagaccgctcaggtcaaacttgaggaaaggcgggaaaggcgggaaggtgaattcaaagaacatcaccacagtggaaatagccgccatcagagcggtgtaggtgagtacccgggtacgctgattggtgttggcgctgatgcgcggggtagtggtctgatttgtcatagataagctcctccagtaatgcaacggagcctgcgcggggttattttaccaacaaaaaagccctgccaacccaagcggtcgcaggactatgtgcaaaagcactgccgccagccaaaccatgctgacagcacttgtttctttcatccggactgtaccgtcggttcgggattcacacccgatcatgctggtgaaagctcgcggacttgtgacggaaaattccgtccatcaccgccggtgaggaattgcgcctcgccctgaaacagactttgttgtgtattttgatgtaagaccgaagtctttgactttatcttagccatatctgtgcaatttgtcaagagttttttcatggacaatgttccaaatcccgtctgccggcataggatggtgcagggaggcgaaaggcggatgatcatttggctgatgatggcactgaccgttggcggactggtgtttgccggggtgatattctgggcgctgcgggaaccggcagagagggttctgtgtctgccggtgcgggaaaataccatggaatatgcgctgtggcaggcggaactgcaggtacagctgggattctacggcgctgtggaactgaccggcattccccatgacccggaaacggcaaggatctgctgtctgttcatgcgggggcggccctgggtgcggtttgctccgtaggtttgcaaaagcgctgcgggtgtattatactaagaactaccacagattttttcatttggagcggaaggaatggacagacagcaggcagaggttctggaaggaacggtagaggacattgtctttcacaatgaggataccggctttaccgtcatggaggtggcagccggagaggcgctgatcaccgtggtgggggaggccatgggcatccagcccggtgaagagctgcgcctgaccggacggtatgtgagccatcccacctatggtacccagttcaaggcggcggtgatcgagcgcaccatcccggctacctccggggcgatcctcaaatatctttccggcggggcgatccgggggatcggccctgctttggcacgccggattgtggatgccttcggggacgataccctcaccatcatggaaaaggaaccccagcgcctggcggaagtccggggcatcaccccaaagaaggcggcggagatcgccgaggaatatgcccggatctttggcatccgggcggtgatgctgtttctctcccggtacgggatcgatgcggcagtgtccatccgggtgtggaaaaaatggggcgcctatgcccccggcgagatcgaaaaggacccctatatcctctgtgcccgggacatcggcgtcccctttgagaaggcggacgagatcgcccggcagctgggatttgccccggacagccccgaacggctctgcgggggaatcctgtatgtgctgcggcacaataccggcaacggacactgctgtctgccctatgaaaagctggtgaaggtgtcggcccggatgctcgaggcggagccggagcagatggacgaccccctgaccatgctggcagagcgggaggacatcatctcggataccgtggacgggactgtctttatctacctgccggagatgtacgaagccgagacctactgtgccggacggctgatgaccgccctggcttccagtccgcccgaagcggtgcgggactactcccgggagatcgacgccctggaaaagaagctgggcatccggtatgcatcgctgcagcgcaaggccattcaggcggcgctgggacagagcgtggtgatcctcaccggcggtcccggcaccggcaagaccaccgctctgtgcggcatgatcgacctgctggagcaggaggggctcaaagtggggctggcggcgcccaccggacgggctgccaagcggatgaccgagctcaccggacgggacgccaaaaccatccaccggctgctggaggtggacttcggcgaggaaaacggacgggtcaagttccggcgcaacagccgcaatcccctgccctatgacgccgtcatcgtggacgagatgtccatggtggatattgagatcttcgcctcgctgatgcaggcgctgcgtctgggcagcaagctcatcatggtcggggacccggatcagctgccgtcggtggggccgggcaatgtgctccgggatctcatcgacagcgatgtgatcccggtgatccatctcactgaggtgttccgtcaggcggcggagagcctcatcgtcaccagtgcccatgccattgtagcgggagagatgcccgacctcactgtccgggacaacgacttcttcttcctgcagaagtcctcctcggaggcggtgctccagacggtggtggatctctgtgcccggcggctgcctgccagctatggctattcgccggtgcgggatatccaggtgatctcgcccacccggctgggggcctgcggtacagcggaactctgccggaagctccaggaggtgctcaatccccag

SEQ ID NO: 2582 - DNA, 5091 bp, Unknown
  16S sequences of unknown bacteria
aagtagcgaagctagaccctgtcagcagagctgcagggatggattgcgaatatccacctaacgccgtataggtagcagcagcgttgacgggatttccacaggaatcagatttcatggcttgcaggatgccagctgaaatgctacgatgatacaagggtcaaaaggtattttgccccctatgatacacggattgcttcgcatttcatgctctcgcaatcctaaaacacctcaaatccgctcatttttctacgaaaaatggctacttttcggtgttttgcgggtcaataagtcatgctttttcatgcaagcatgaaacgcatgaccttttgcccctagtatcatcaagtatattaaaaaaggagattcccattatgacggatcaggaattacatctattattagaagacatgtcgctgcaggaaaaaatcgaccagctgctgcagctcaccgctgacttttatggaaagaccgaccgggatgttgtgaccggtccggcttccgagctcggcatttctatggaggatattgaccttgccggttcagtattaaacgggaccggtgcaaaagcactgatgcagattcaggacgcctatatgaacagacatccacatcacatccctcttctgtttatgatggatgtcatccacggctaccgcacgatttttccggctccgatcgcgcagggcgcttcctttgacccggagatgagcaaaagagccgcttctgtcgccgcacgtgaggcatctgccgcaggaatccacgtcgtcttttctccgatggtagacctcgtccgcgacccgcgctgggggcgcgtcatggaatccaccggcgaggatccatatctgaacagccgctttgcagcggcacagatccatggctttcagggcgacgatatgaaagaggatggaaaggtgtgcggctgtatcaagcattttgccggatatggcggtgccgaagccggaagggaatataataccgtacaggtctcggagcatacgttccgtgagtattacctgccttcctatgaagccggaatcaaagccggagccggtatggtcatgacaagcttcaacaccgtcaacgacatccctgccacaattaaccaaaagctcatgcgtcagatgctccgtgaggagatgggctttgacggcgtactgatctccgactacgctgcaatccttgagacggtcgcacatggtgcttcttccgataaaaaggatgccgcacacaaagcactgctcgccggtgtcgacatcgatatgatgaccggctgctatgccggggagcttgcaacgctcgtaaaagaagacacgatcccggagtcactgatcgacgagagtgtcctgcgcaccctgcagctgaaaaatcagctcggtctctttgagcatccgcataaggatgccgacccggaaaaagaagcccgctatatcctctgtccggaacatcgcacgctggcccgcgaagcagctgccgcttcctgcgtactgctcaaaaacgacaaagtgctgccgatccgcccgtcccagcaggtagcttttatcggaccgtacatcgataattacgaaatctgcagcagctgggccgtcaccggacatccagaggactccgtcacgatccgacaggccgctaaggaactgctcccggactctgacctcaccttttgccacggcacgtctcttcttccgcgtgactacgtctttgccggctttgcagagccaaatcgcgccgaagaattttatgccgacgtgtttgcggatccggaaaaggcactggcggatgcagtcgcggccgctaaggctgctgatgtcgtcattctgtgtcttggagagcattacctccagaccggcgaggcgacctcacgcactgagctttcccttccggagaatcagatggagctgttccgcgcagtcagagcagccaatccaaatgttgccgttgtgctctttaacggacgcccgctgcttctcgacgagctctcccgcgatgccgctgcgattctcgaagcatggtttccgggtaccgagggcggtcatgcgatccttgatcttctgaccggtacaaaaaatccatctggaaagcttccgatgacatttccgcggaatatgggacagatcccgatttactacaaccatttttccaccgggcgtccgctgaccggaacagatccacagcgttttgtctccaaatacaccgatgcgccaaacacaccgctcttcccgtttggatacggattaagctatgcagagttctcttattctgatgtgagcctttcttccgattctctgacgagcaaagattccatcactgcatccgtacaattaaaaaataccggtgcatgcaccggtacggaagtcgtacagctctatattcaggatgttgccgcaagcacggttcgcccgatccgggagctgaaaggctttacacgtatcaccctgactccaggtgagacacagaccgtctcctttcggatttccgaggcagagctggccttccaccgggcagacggcagctacggcacagagccgggagccttccgcgtatggatcggcggcagcagtgccacggaaaatggaacgaactttactttacattgagcttttctttaaagaagtctgcaatgatcttccagacttctctctggaaaaagtgcaaatctgcgtgatccgcgccctcgatggcgatcagatccgcatctgcgcccgctttggtcagcgcctcatacatcgcctcgccctgtgtgtacggtaccgtatgatcattggtgccgtgcagcagtaaaaatggcggggcatcctttgtcacatagctgaccgggcaggccttcatcgcctcctcttcatgcaatgccgcgtttttcccaagcatcagagattccggcgcagccatcatctccacatcggaaagacgcggcattttgctgatatccgccgggagataccacgggcaggccgcctgtacagcactgctgtactccagataatcccccttgtcaaattccttatggtcgccggtcagcgctgtcatagccgtcagatgtcctccggctgactctcccatcactccgaagcgctccggatcgatgccatagcgctcactgtgcgccttcaggtaccggatcgccgcctttacatcctcaagctgggccggaaagactgcctcgttactcgtgcggtactgtacgctcgccacgacaaagccctcgcgtgccagatcacagaggtatgccagatgtgcgcagacactcatctgcagccacgcacctccgcagatccacacgatacatggacgtttttctgcgtgctccggataaataatatccagcttcagatcccgcaccgtatgtccaaaccacgcatctgcctgcgcgaacgccacatctgtgctaacgatgtactgcggctctttaactgctacctgaattactttcttcataaactaagtcctccttttgacccctatgattttctcctcatcggtaatctccccgtggctgtcaggacccctgccgatgaatgaattacgcaataaccatttttagtatatcaaattgtcaaaaaaacggtaatttttctttttccttctgattctggcttttcacacacatttacccctctgaccctgtcaacaggggaagtagcagagctttccgtcagcgccggcggcgccgcctacccgaataaaggcgaagactttgtatccctgtgccgaagcgcagacgcagcactgtatgaggtgaaacagaacggtaaaggagctttccgggtgaaaggctgacaatctctcttagaaaataattttatagcttccggatccgctcaagtgcctcctccgtctgctcccgggtgccaaaaccggtcaggcggaagtagcctgcaccgctcggaccgaaaccgacgcccggggtgcctacgacctgtgcgtgggacagcagataatcgaaaaattcccatgatcccatgccatgcggcgtctgcatccagatgtatggcgaatcggtcccgccgaacgcctcatagcccatctttttcagcccctgtaaaatcagcagcgtattttctttataatagccgatgtgctcctttacttccttctggccatgcggcgtgtagattgcttctgcgccgcgctgtacaatgtatggcgcaccgttgtacttggagccaagtctgcgacgccacagatcattcagacggattccaccgttctcaatttcctttggaatcaccgtatagccaagacggacgcctgtaaagcctgcggtcttcgaataactgcggaactccatgcagcatttctttgcgccctcacactcataaatcgtgtgcggcaacgccggatcggaaataaatccctcataggccgcatcgaacagaatcagtgatccctccttattcgcatagtccacccagcgctgaagcttttccttactgatcatcgcgccggtcggattgttcggaaagcacagataaatcagatctgcatggcgctccggcagctccggcgtaaattcattttccttcacacacggaaggtatacgacatcactccactgccctttttcttcctgccaggtaccgcaccgccccgcaatgacatttgtatcaatgtaggccgggtatgtcgggtcacagactgcaatcacattgttggctgaaaagagatcgcagacgctgccgacatcactcttggcaccgtcgctaatgaaaatctcatcaagcccgattgacacaccagacggtgcaaaatcatgctccgcgatcgcttttcttaaaaattcaaatccctcatacggaccgtagccctgaaatgtctcttttttcgtctgctccagcacggccttctgcatcgcatccgtcactgccttcggaagcggcagcgtcacatctccgacaccaaggctgatgaccttctcctccggatgttcctttttataggcatccagcttctgatgcagtaccgcaaacagatatcctcccggaaatttgctgaaattactgttaaattcgtacataatcgcttcctcctttttcttttctatccaacttctaaaaactttttcattacttcctgatcaaataatggctataccag

SEQ ID NO: 2583 - DNA, 32759 bp, Unknown
  16S sequences of unknown bacteria
tgctccccggaacggagctacaagggctagcgggcagcggggagcaaaccgcgccttggaaaagccgaccggccccaggcgggggcgcggaaattgtgtgaagattttgctccccggaacggaagaacaagggctagcggggagaggggagcaaaccgcgccttggaaaagccggccggccccaggcgggggcgcggaatttgtgtgaagattttgctccccggaacggagctacaagggctagcgggcagcggggagcaaaccgcgccgcttgtcctgtttccctttcgccgggcaccggcctcccgagtccattcctcactgcatcaaataaattgtattgtatcacaatttatacagcacaatttctataaataatacaaaaaacatattgaaatccccaatcgaacagagtataattcagatattcggatgaaggaaggcggagccccacatggtggcagcgcccaccggtacggcggagccccacatggcggcagagcccaccggtacagcggagcccgcacaggtccaaccctagcaggtccgactccatccgacagaaaccagacaaaccaaaaacaaatataatgaagagagtaggggaacagaaatgaaagaattattatccaaagcgtatgcgaaaaccggcgaatcctttatcagcacaatcctgaccgcggcagcggatcccaacgtgatttctttcgcgggcggacttcccaatccggcgtccttcccgatggaagcgctgaaggaatcctgcaacaacattatcgaaaaatacggttccgccgtattccagtatgcgaagaccgaaggtctgcaggcattccgtcagtatctggcagaggactacaacagaacctacggcgtgaacctggatgcggacaacatcgttgtcaccaccggttcccagcaggcactggattgttttggcaaggtatttatcaacgaaggcgacggaatcctggtagagaagccaagttacctgggtgcgttccaggcatttgaccagtactgcccggaatactatccggtcacactgaatgacgatggactggacatcgaagaactggaagagactttagagaagtacggcgacaaaatcaagctggcctatctgatcccggagttccagaatccgaccggcttgacctacacggaagaaaaccgcgcaaaggtcaccgaaatcctgaaaaaatacaacgtcgttctgattgaggacgatccgtacggccagctgcgttttgaaggaaccaaaccgccgtacatcggtctgggcaagctcccgcaggcggcgcttctgggcaccttctccaaggtagcaaccccgggaatgcgcgtgggctacgtggtaaccgagaacaaggaactggccaaatacatcgcaatggctttggaagccacttccctgcacaccaacatcttctcccagtacctgctgctggattacctacagaacaacgaccagccggcacacgttaaggatattcaggatttgtacagacagcagtgccactgcatgctggacgccatggacaaatatttcccggagaacgtcacctacaccagaccggaaggcggcatgttcatctgggcaaccctgccggaaggcgtcagcgccatcaaactgttcccgaaagcagcggagaagggcgtggtatacgttccgggcgatccgttctacgtaggcgttcacgatgccaacaccctgcgcctcaacttcaccaacgcttcgccggaagccatcgacaaaggcattcacctcctgggtgacatgctcaaggaagagtgcgccggaaaataagcctaatattttcataaaaatacattcatacatgcagagacgaccgacccaaatgggcaggccgtttttgcatgaggattattcttccggaacgctataatttgtttccaataagatataagggtgatataatcaaaccatgagtaacgaaaaaaagaatctacaacagaatccatcccggtatttccgggtattgacggcggttcttttcttggcggatgtggtgttggcaccatggcttcgagaagggaaccgaagtttttcggtgcgtgtttttattcagggtgtgaaagccgccggcggaattgagaaattcgcactaacggaggccggaaagggaaacaccgaggggattgccaatctcaccatgaactattggtgcatttatctgatcatcgttttgggagcggtgctgctgcttcgggcgtcatggcttcttgccggccgaaaagaacgattcctcagcggggcggcatatgccctggggcttctgtacctgtgcgcctttatgatttttaattattacgggtactccggcggaatggttgtgggtatgctgctggtgttcctggatgccatgcttggaaaatacctggacgagcggcaggcgctgcgcgaagcggaagaggcgctgcgagcgaaagagcaggcggaaaaggaagagaaaaagcggcgagaggcgttcccgggccggtacgggagtgaattctatcgcgtgattttcaagaacttccgggccaacattcgggatttcttgctgttcctggcgggagcggtcctgaccatgacggtgctcctggtcatctggggaatggagcaggggtgcggcggaattcgtctgctgggggcatcggcgcttcagcagcagattgcgagcagcctgaaacagctgctgccggtgttcatgctcctggcggtgctgatgctgtccctgattatcagtggatacctgcgaacccgcatgaaaaattacagcatgtacatcgccctgggaattcggaacaaaaccctgattcgaatcatcgggctggaatacggcacctgcatcctcaccgcgttggcggggggaatcctcctgggactggccaccctgaaaataatcggggttccgattgccgggaatttacttcgaatgcttccgccggccgtgctctgctacctgctggtggttctgatttccactttggtgaactatcatatttttgagttcaaaaatgtccttcgttacaaccgatcttccgccaatgaaccggtgcctcgctacggcgccggcgtgatgatgggaatcggcctgtttgtcatgctgggaagcctgggcctcttcgtccgccgcggctccggggaggatttgtacatcctgggcggcctgattgccggctttggcctgttcctgtacggcgcggccacccgaattctgaaaaaacgcgtcgcccggctccaagtgacggaaaccggcctcctgaccatcctcccatggcgcaaccggtttcgcacgaacgttcgatttttgtttttactgacggcgctgcaaatcatgctgttcggcattttcctgccgcggctggcagcgcagggaattccgccggaaaaaaccgcgccctatgactacgtagcaatggtgtacgattcggatcttccggatcttcagggactaaaaaaagaaggcaccctgcaggaacttccgatgctgcgggcgaccacgccgctgggggcagatatttcccggctgaagaaggattatcggacggtgctgtggccccaggggcagcacattgcggtgtcggaaagcagctaccggaagctttgccgacaggcggggaaaaccccgaagaagctgaatctcagcgcggatggtcatcgggtgcacatcgtgatgcagcaaaacgccgcaagtgaggcgcacaatctggaatggtacagcgggggcggcggcaacctgttccggctggggcaaccgctggtggcctacgaccgaaatcaggtgacccggacctacatcccccacgacgcgacctatgagcggacgaatttgatgggcgctttgcatgccggaaatcaggaaaacatcctggttctgtccgattcgtatttccggtccgtgtattcgcagaagcgacaagcgcgggatccgtcggtgagcattcccccttccgccgtgaaggagggaccggaccggctggtattgattcgggtgaagacgggacagaacaaagcggtggaatcggtactggagaaaattcagaagaggcattcttccgacctgcagtacgatgaatccattcggacctggtacggtgtggcgaaggcggagaaaaacaacgaagcggccgccggttttgcccgtcggatggaagagatgaccgcggtgggattgttattgatggtgctgttcaccttctgcattcgatacagtttggcgggggcggagcagcggaaggagtaccgattgctgggcactttggggatgaacgaccgggagcaggagaagctgttcaatcgggaggctcgaacctatgtgctgtgcagcatggggacggcgttggtactgtcggcgccttttgccgcattgctgccgtttctgcggatgttccgccggagtcagagccttctgtacctgcggaatctgctgggactcggcggcggaacgatggccgtgctgcttctggtgctgatgatgctgacgagatattacagacgagtgaatcgatagatgtgcggcggtgagcagcgccgccgacgagatgtgacggagaggatagagaatgagcagtgtgatggagctaaaggggcttcggaagagatacgaggagaagggagattggattctgaagggaatcgacctccgaattgaaaaacaggattttattgcgattatgggacggtccggctgcggaaagaccacgttgctgaaaaccctggggttgattgagtcggcgacggagggggaatacttctttgaaggcaatgcggtttccggactgtggggaagcgagatcgcggatattcgccggcggaatatgggatttatttttcaagattacaacctgatgggaagcctgacggtacgggagaatatcatgctgccggcgttgctggataaaatggacgagcagcagcggaaaaaccggacggagaagctgattcagcgtttcggaattcaggcatatcgggataagtatccccatgaaatgtccggcggccagcagcagcgggtggcgctctgtcgggcactgatcaacgatccggatgtcattctgggggatgagcctacgggaaatttggattccgtgatggggcagcaagtgattgaaaccctggcggaattcaatgagacggacggaaagacggtgattctcgttacccacgacccgaaaatcgccatgtattgccggaaggttatttttatgaaggacgggcatctgctggattgcttggagagacgtgatgccgagaaggagacgttctaccgggaaatcgcggcaaaaatggaagaattgtagcgcaaaaatgaagaaatcaatggatttatattgaaattcgtgcatttaagtgctaaaatttatgcgtattttttgggatcatgaagaattaacgggggaataatgaagaaaccggcaagaagtgagtatttttttggatgtgtattgctgattatcggcgtgatggtgggccacctgagcatggattttttggatgacggagagattcaatccatgtccgtggagattacgatgagtgcaattttcatcctgttattcacggtgctgatggaaattctttacgttctgtggcggcgaaaaaagaagcaggacgagggccgcctggatattccggccacgacaattattctcttgctggtcatcggttttctggcgtccatttgcatgcgcctgattaacgatgtgacgggcatgagggagtttctcctcagcgaggatttcaagagcttcgtggtgaatgcgataaagagcaaattctaagtgtaaatatatggattcggccgtgcgcgggaaagcacgcgaggaatcgagagagaaatcgagaaaattgacgacagagtgcccagaaacgagggcctgtcgtcaattttttttggaggtcggtcggacgccactggatatcacgaagctgtttttatgagcagattgaagtcggcgaaatcgtgaagttgtttttcccggatggacagaagggatgtggtcgggacggaattgtataaatattcaatttggccggagatccattccaggtccagcccgctgtcggtctcgaaggacatctggaggttgatgccgggaataaaacccagctcccggtagatgtcggttttccagttgaagctgtcgcggtactgccgggaattctccgcgtggaaccagcgtcccaggtgctcccagagaatgacctggccggtgaccgggtgaatcagcaggaaatcggggcaaaggtatttgcccggggcgtattcgacgggatattcgtagaggacgtagaagcccgcggcacagaaacgttcgtacagcaatgcttccacgcggctccgcaccagagtgccgtcaaaggtggtaatacgaagggcctccggatgcctgggcggaatcgtagccttccgttcccgcatcgcctgaatgcgggcttcgatgctgtcggtgttcagctccaggatgtcggtcaacagaggaatgtactgcttcgggaggcgctgccgaacggattctacgtcggtgtcgcaataccgttctgtgaactcccggaggagacggatgttgtcatccaaaatttctaccattttcttgcagaagcgcaggtcacgaatcttgcggacgacctcgtgggtttcccgacctaagtagcgccgcttgccaccgctgtagaaacaggaataataggtctttccttcacggtggctggtcgtcagaaacaaaccgtcgaatgccgcgagttctttgatttttgctttgtactgctttttcagctgttggtgatcttgtaatgcattgagtaaaatatttttgtaattaatcatggacgctcctttcgttgctagtgaatgatgtttctcctaccatgattatgccagaaaaatttttccccttcagtacacacttatcgagaaaaatcgagatttttcaaaatatggaacgtgttgtggcgaagggaaagaaaagtgatgcatgggaacaaaaatcatgacctcatgcatcaatccggaaaatgaaattgatgcatggagcctgtttttacgagcaaaaacatcagaaatggctcgacatgagggaacaaaagggttcttcatgagtatttgtgggataattattagaaaatactccgctttttaaaggtggaatgcctcgaacaaccaacgcagagaggtcggttgttatggataccgagccgttctgttggaaagtgatgcatgcccccttgctttttcgccccgtgcattaactccaattccggagttaatgcatgagcctcttttttcagcgttcctgcatcactttcccgatttccaccggtgatccggggtcgccggcggcaggcctaagaagcccccccggtcacatcaccggctgttcatggaacgcacatgaaacagttacggattccggaaattcagatgatacaatgaccgtaccgaggagggggccgccgggcattccggcagaggtcatctccagtggaaaggagaaaatgaagaagatgaataatctgaacattctgaaattggaaaacgccgtgctgcagaagcagatcgatgtggtacggagaaatatacgcgccgggcagaaccgggatcttacacgggaagaagtagaaattctgagaggtgtgggagaacattacgccaagaagtgggatgttctgtatccgatgctgaagcagggatacggggctgccggctgggtgaagcagatgaaaatggaagaggatgaaatcgtcgcggaactgcgttctctggtgcgcttcccggataaggaggagtgggaagagaaagtggaagcagtgctccggaagatggaacggatgatttacgaggaagactacatgctctatccgaactgcctgcagtttttccggaggggcgaaggtatttggatgaacaggagcgaccgggatgggtatgcgaactaccgggcgctgcggactaaagtcggaaggtaccggagggcgctgcagcagcgaagctttcgataaaaaaagaggggtaaggcattcggcgtccgggcggacaacggatgaggagtgtaaccggtggggaaacccgccggttttttatagggatgaaagcgcgcaacatcactgttaaaacgggaaatctcgagattcatgcaaaaagttcagataaaaaaacagaggtaaaccaatttttagtgcaaaaaatctttagaattacttgaaaaataaggaagatatgttatccttaatacaaatgtttttaaatattggaggagcatgatgaacgaggaaaccaaacgctcctgtgtggactgcggtgtatacaactgccacacgcgggacaaggagtatccggacttctgcctgaccacggaattgacggacgaggaaagagcggaagtgtggaagctgtacgaggagccggagaatcagaaggcgtcggtggtatccgctcagattgaatcggatttttacctgcgatacactcgggtgcaggaaatcgtggcttttgcaaaacggatgggctatcacaagatcggaatcgccacctgtgtgggtctgattgaggaaagccggatttttgcccggatccttcggaagaacggattcgaagtggtaggcgccgtatgcaaggtgggttcttttgagaagaccaaggtgggcgttccggaagaggacacccggattaccggtccggttatgtgcaacccgattatgcaggcgaaaatcatgaaccgggagaagacggatttcaacgtgatcgtggggctgtgcgtgggacacgacagtcttttctataaatatgcggatgccctgtgcaccaccctggtaaccaaagaccgggtgatgggtcacaatccggtggcggcgctgtaccaggcgaaagcgtactacaagcgtctcagcaacgagccgattgcggcgtatccggaggacgtgaacccgaaacagccggaagcttccgcgagatagcgattttatttttggaggagagaggatgctgacaggaaagcagagaagttatttgaaaaaactggcgcagaccgtgcagccggcggtaatcgtcggcagagccggagtgacggatgcggtgatgcagaccatcgatgaatatctgaccgccaatgagctgctgaaagtggccattcaggagggggcagaattggaggccaaggagaccgccaatcaggttgcggatgagctaaaagcagatttcgtccaggccatcggccggcggttcgtgctttaccggagagcaaaggatccggcgaagcggaagattacacagcgcatgcaagacgagatgtagtttcccggtggagactgcgggatcgttgcaggatatttttacttgaggaaggagttagagatgcacaagattgtactgaagaaacagctcagccacgatatgttctggattgagttcgaggcaccttttgttgcaaagaaagcgaaaccgggacagttcattattttccgcgtggatgaatacggggaaagagttccgatcaccatggcgggaacaaataaggagacgggaaccgtaaccctgattttccaggcagtgggaagaagcaccatgctgctgtcccagctggaagtaggcgattacattcaggacgtggttggaccgctgggaaaaccgacccacatggagggcctgaagaaggtttgcgtggttggcggcggtaccggaaacgcactggcgtacccggtggcaagaggtcttgcggaagccggcgtgaaggtggacatggtttccggattcaaaaccgaggagctgattgtgctgaaggaagagtttgaagaagcggtagataatttctacctgatgacggacgacggttctgccggcgagaagggtttcaccaccacaaagctggaggagctgatcaaggccggaaacgattacgatgaagtcatcaccgttggacctccgatcatgatgaagttcgtcaacgaggtgaccaagccttacggaatcaagaccatcgcatctctcacggcgctgatgatcgacggaaccggaatgtgcggcggatgtcgagtttccatcaacggcgagaccaagtatgtctgcgtagacgggccggaattcgatgcggcagcggtagactgggatgtactcattgcccgcaacgcatattaccacgaagaagagaaggaagaacgggatcatatctgccgactgacaggaggtgtaagacactatgaataatcagatgacaaagacaccgatgccgtctcaggaaccggatgtcagaaataagaattttaaggaagttgctctgggatataccgaagagatggcggtaaacgaagcgcagcgttgcctcaattgtaaaaacaagccttgcgtgacaggatgtccggtaaacgtacggattccggaattcatcgcaaaggtagccgagggggattttgccggtgcctatgaagtgatcacttccaccaactccctgccggcagtgtgcggccgtgtatgcccgcaggaaacccagtgcgaaggaaagtgcgttcgcggaatcaagggcgagccggttgctgtaggcagactggagcgtttcgtagcggattggcacagagagcacatcggcaatgataaagtagaaaaaatcccatccaacggtaagaaggctgccgttgtcggtgccggcccggccggactgaccgctgccggagacctggtgaacaagggatacgaagtaaccgttttcgagagtctccacaaagagggcggcgtgctggtatacggaattccggaattccgtctgccaaaggatatcgtggcatacgaaatcgacaccctgcggaagaagggcgtcactttctaccacaacgtggtagtgggcagatccctggatatccaggacctgttcgatgagggatacgatgctgtatttgtcggtaccggtgccggccttccgaagttcatgaacatcgaaggcgagaacctggtaggcgtatactccgccaacgagtatctgacccgaatcaacctgatgaagggctacctggacgagtacgacactccgatcaaaaagcacaagcaagttgcggttgtaggcggcggaaacgttgccatggacgcagcaagatgcgctaaaagaatgggcgccgaggttcatgtaatttaccggagaggcagagatgagatgccggctcgtgccgaggaaatcgagcatgcagaggaagagggcattcagttccacctgctgaacaacccggttcgcattctgggcgacgagaacaactacgtaagccagattgagtgcatcaaaatggaactgggcgagccggatgcttccggacgtcgcagaccggttgccattgagggttccgagtttactttggacgtagacggtgtcatcatggctctgggtaccagcctgaaccagctcatcgtggataccaccgaaggactggacgaaaacgcacgcggcggcattcagattgatgaagaaaccggtgcttgcaccagagaaggcgtgttcgccggcggcgatgcggtaaccggcgctgccactgtaatcaaggccatgggcgccggcaaactggcggctgctcacatggacgagtatatgcagaaatagaatgacgagtcctttaagtggacttcgcaggctgccccagggggatctggggcagcctgctttttttgtctcggcagaccgttgggcattcgggccgggagacgtggtgctcgtcgacgaagaaataagggctagcggggagggaggcaccacgccgggtttgcctcgggccccttcgatccgggggacgtggtgctcgtcgacgaaggaataagggctagcggggagaggcgcaccacgtccggcccgccgtcggccccaattgttcgaggggcgtggtgcccgccgacgaaggaacaagggctagcggggagaggcgcaccacgtccgacccgcctcgggtcccttgggctctggggacgtggtgctcgtcgccgaagaaataagggctagcggggagaggcgcaccacgtccgacccgcctcgggtcccttgggctctggggacgtggtgcccgtcgacgaaggaataagggctagcggggagaggcgtaccacgtccaatccgccgtcggccccaattgtccgagggacgtggtgcttgtcgacgaaggaataagggctagcggggagaggtgcaccacgtccggcccgccgtcggcccatcgcagccccaaccggccgaggagagtaaattaagtagatcgatatacagaaaaatcattctaaccaaactagcaattatttttaatcccgaaaaaccgaataataagtttaagattccccttttcagtacccattcatgccggatgaaaacaaacgtgtactgaaggggaattttttatgtgccataatatccccacagcaaatgcaaagtcatcaaactaagttctaaggagggaaaaatgagaaaagaaaaacgggccaacggcccccacacagtgaccggcggtccggccaattacaccggaggtccggccaatcacacatcacacagaattcgggcaggcctgctggccgtctgtctgactttgggcgcggcaatcccaagcggcgcatgggctgcaggaatggaccctcgtcaggcggtttccggtgacgaagccaccctgacaatgggcaaaatcctcacggccaaccacgccgggaaatttccgggtactttgcgggatgtgaagtacaaactgacggcggtacgcggttttgacaacgctaacgaaagcaccggcgccagcggcaagcccattgcggcggagaacatgcctatgccggaagcgtccgcagcagagcatcatcaggtaaaagtaaccggcaccaatgccgagattacggtgggagattttcagacggcggagcgggacagcgacacgaagaagaccgcgtgaccccggtgaaaatcaagttccgccgggccggctattatctgtataagctcacggaagaaggctccgacccggagaaggtgccgggtgtcacatacgatgaccacagttattttgtggccgtttacgtaacaaacaaaaccgacgatgcgggaaacacgggggatggcgtatatgtgcacaatattacctcctatcggaatgaatccggcaaggaaaactatcagccgaacctctcggatatctccggaatcaccgacaacggcggaaccaatgctacggaaaacgtcagggaaaatctggcaaaagtcggaacatccgacggcgaacatccgaaccggctggaagcctatcgattctggaatgacgcccacgtccaggacctggtaatcaccaacaacgtaaagggaaatctgggggaccgaaataaagccttcgaatttcaggtaaaactgtccgggttggagccgggaaccgcttacaccacggaggaagcggcggcggatacgggagaccgaaccgacgacggggtgaatgtggtacgggcatcggtgggaataattcaaggaaagaccctcatttccgacgattccggaaaagcggaattcaccgttcgtctgaaggacgatgaaaaattcgttctgaacgggctgccggtttccgcatcgtatcaagtaacggagcaggccagcgaccatatcgcttcctaccgaatcagcggttccggaaaaacaccggaaattcagaacaagatgaaggacaacgacatcaaggacaaagcgctgagcaccgaaacggagcgcgtggatgaggcggacggaaccgtcacggtggcctttatcaatgagcgaaatctggcaaccgttaccggcgtagcggagagcaccggaccggcggcacttttggctatcgcggcagccggcgctatcgccgcgcgccgccggaaatatgaatagatccgaggagagccgggagctggatcgttggaatcgccgggtacggcgaagcatccgggcggaccgcatcgtctcatggatgctgaaatggttcgtgctgaccttgctgcttatggtgggcttttcctactacgacatgtaccggtttacccgggcgggaatcgacggagtggcgtatcgggatttcgcggctctgcggcagattaatcctgatgtggccgcctggctcactttggacggaacccatgtggaccatccggtggtgaagggaacggataatttcgaatacttggaccgggacttctacggaaaaacctacgccggcggcaccctgtttctggacgagcaatgccccaaggatttcgcccaagaataccagctcattcacggccaccatatggccggaggtgccatgttcggcgacctgaagaagtatttggacaagaatttcttccataaaaacaaaaggggtcagctgctgacaccgaagggccgatacgatttggagattatcgcagcgggcatattcgatgcctatgattccaaaatctacagcataaacggaaagaagaaccgtcccatggaatccttccgccggtgcaggcgtaaacggccggtccgcgggaagttccgggaccggctcctgtgcctgtccacctgctccggagatatggacgaccggagaatcgtggtgttctgccgaatgacgggaccggaagagtctcacacggaaggaaggaaagaatgacagaagaaattgcgggaaaaaagagaatcgtgaagagcatccggaagggaatcctgattcgtgcgggaaccttcgccttgacgctatggattgtttttacgttcgtattcggaatccggattgcagacagaaacgatatggcaccggcgattcgggagggagacctggtggtgtactatcggtgcggagattttgccaatcgggatagcgtggtgtatgaagcgaacgggaacgtgtacctggggcggattgccggatgcgagggggcggtcatcggaaaaaccgaagattgccgcctgaccatcgatgggcggattcagccggtacagccgggactgggaatttacagcgaaacgccggccggagatctaaaggcaggggttaccgtggaaccgggacggttttttatcctgggagactgccgagaggaatctgcggacagtcgatgctttggaacgattgaaaaggaccaaattcgggggaaggtatttctcctgtggcgacggcgcaacatatagaaaggagagaagtatgacgagaaaaatagcgacgctttggctcgccctgattctgtgcatgatgtatgcggtttccgtgggtgcggagagccgatggatgacggaaatcaaggtgagctacagtgcagtggacagcccgggagatgcggagggtgtttttcaattgcgggggaccacggaagatactcccatgccggaaggagcagcggggcaccggatttgtgtgccggcgggaaagacgtgttcttttgggaaaattgtttttcccggccccggtgtgtatatctatgaagtcaatcgccggaacaacccggaaggcgtcaccgcccgagattcctcggtgtaccgggtaacggtggtagtgcgaagcgacggagatgtgcagcaggtgattgagacgaacggagagaaggtgacggaaattcggtacgaagatcggtatgagaaggcggccttggtggagacgggggatgtaaaatccctgtttctcccgggcgcgggttttctcggcgcgctggcggcactgttttgtctgcggaagaatcgccgaaaacgaaagaaggattgcatgcgcacccttgtcggtacgctgcttctttttaccctgttcacaatcggtgcgggcgtgcccacatacggtgccaccaaagatcttcgggtgacctacgaccgatttcaagagctgccggagaattacgcgaagattaccgggctgcccttgcaggaggcggagattaccaccacgaacggaaatatccacaagtacaacggatacgtagggaacaatcagacggagaagcgggattttgtggcgtactacggaacggtgaagttcggaacgcggaatcgaaatgacacaagcaatgcggttacgaaggccaatgaggtaaaaggaaatatcaccttgcgctggaggaaccgggcgattctttcggacaacaccaaggccgacgtgaaggtcgtggtgagcggttggactttttctctggggaaaaatcagaattcaaagattgggaacaacactaaggtgtacgtgccaattctccagtcctcaggaccgaacagcaaagccacggagctgtgcaccgcttccccgcgtacgaagtacagcgtgaacaacggaaccacggccaattcgttggcgggagcctgcatcaccacgaagtgcaatgtgaagattcaaatccttcagtcgggaacggatacgccggtggacgaagcgaaatatccgcggctgctcttcgggttccgggatttggatgtagaggataccaccatcgccaaagggaagagtgcggcggaacggtataacggaccctacgcagagggcgtagagctgatttccggattcgagagcccggtggcactggcgaagaaaaccgatgccaacaaagcgatgcagacgctggaaaaggtgataacggtaggagagaacctgcgggtctgcggggacggcgcgaagatggaagcctacaacaaggccaccggaaccagcggcgacaacggaacctattactccggttttatttccccggtgcagcctcagggctttagtttcaaatggacgggttccatcagtatttccggaaaaatgatggggacggcgttgtggacgcagccggaggtggcggtgaaagccactcgaggtgagggcggttccattcagaaggaaggactcaccacctacatcatcaacagttccaccacctacgattacaccccggccaaaggctaccgggtaaaatccctgacagtggagggggagccggtggatttcaatccggcgggcggaacttatcgctttgaccgcctgtacaccagtccggtacacccgcgaagcgctaagacgggtcgggagctggagaccaaaatctacaccatcgatgtccaatttcaacggattgaacataagatcaccaccaaggtgaccggcggaaccatcgatcccgacgtggtggtgggagaaggagatgatgagaccatccactatcgcccgaacgatgggtatgaattggagaaggtgaccgtagacggcgaggcggtgaacgtaaaagaatatccgaacgaatatacttttaccgacgttcagaaggatcaccacattgaagtggtgtaccgaaaaattccggtgggcaccctaaccctgcgcaaggaagtaaccggtgctttgggtgaccgaagcaagaagttcgaattccaagtgagcttgtccgggctgaagccttccgccgaatacgaggcggagggcatcgaagcggcggatgcgggagagcttacggaaaaaggtttttcttcggatgaaagcgggaaagcggaacttcgtctgaaattgaaggacgacgaaagcgcgcaattcaaagaacttccggcgggtacaacgtatcggattacggaagcggccagcgatcacatcgcctcctatcggcagaaagccaccggtgaaaaaccgacgcatcaagccgtgcagcgggaaaatgccgatgcgggaaaggaactcgccacggagacggaagtgctggatgaagaggatggggacattgaagtgattgtcaccaacaaccgtcccattgccacggtcaccggcgtgggaaacagcgacgcaccgtattatgcggccggaattgtcacgcttcttctgtgtggcggatggattttcggtgtggtactatataaaagaaaaaagtatcactaaaaagattgcgggcggagccgggattgggccgaataccgcaattccgaacagagaaagaagcgcgcagtggaagagaatcagcagaagacgcaatacgtatatattctacggtgcggggacggcaccctgtacaccggctggaccacggatctggagcatcgggtggccatgcacaattccggtaaaggggccaaatacacccgcgctcgtaggccggtgcggctggaatattatgaggaatacatggataagaaggaagctttgcggcgggaatgcgccatcaagaagatgacgcgcagcgaaaagcttcggctgattcaagagtcggaaaaagagtaggacttacaggcagcgcatgctcttttcggataccatccatgatacaaacgattacacagaagcttctctcggagaaatccgggagaagcttctattagtagaacagagtttcgaaatatagagttttcctataataaaattttccaaatagataaaactgattttaaatatacagaaatggttgataccatggttagacaggggatgacgaattattacttaggaaatgaggttggcgttatggataagaaacgatggattgcatgggcactggccctattcatggttgcgactccttgcatgacatttgcccaggagatttccggagcagcgggttccaccaatgaaagtgaatccaatgaaccggtaaatccggacaaggcatccgaaccggattgcggggacgcagttgaaaatgagaaaggtgattcttcggtagaatccgtaaagggttcggaagaaggcgcgaccggagaacaggattcggcaaaagaaaaaaagaccgaggaatctgcggatgccgaagcttcgaaagaagcggcaaaggcggcagagaacaccggctccaaggcggtcagcgataaatggacaacagcggatttcacctatggggaatacgaaaagctcatgtacggttgtgactacagccggcagttttatgttcgcggaaaagtcatcaccgggttttccaagcagggtgaagagaaactgaagagcaacaagaatctggtaatcccggcgaagggaccggatggaaagaatatcgtgggaatcggcgagagcgcatttaaagaaaagggcctggaatcggttcagttcccgacgggaatgctgactccttacgacgatccgctggcaaagaccgacgaagaacgggtctcccgccgcggaaacttcgtgatcggcgagagctctttttatggaaataagctgaaagaagtcgttctccctacgggcgttatttccgtattggcaaaggcctttgaacgaaatcagattgtaaaagtaaaactcccgaagaccatctggtggattgaaagccaaggctttgcggacaataagattaccgatgttcaattccctgtgacgacggactttatgatggaacttcacggcatgccgtttgcgtttaacaacatcaaatcggtgcgcctcccggacttcaccgaggtggtgaacaaatttgcgtttgcatacaacccgggaatggcggatgcaccgaaggtaaacccgtggggcaaagaaaacaagctggaagcagatcttcggggcgagacacggacttccggcctggtatatatgtacaccgacaatccggggctgaaggataagcttcagaacagattgcactccgtggaaggcaagaataccaatatctattctccgtaccagaagctggttgtgtgcgacggatcggaagccaatcaaaatccggataagacattatggaatgcaaaagacttcgtatacgacaaagatggcgcggttaccgggctttccgaaagcggcattgccaaacgaaaagtgaacaaggacctggtaattccaagcaagacactggatggaaaaaaggtagaagaaatcggttccaccgacagctataccggtctgtttgcgacggaagatgaaaagttcgattccgtgtatatgccgaataccattcagaaaatcggcgaccgggcgttctgcaacagcggattgaaggaagttgcattctccggaaccctcacaagcatcggcatgttggcgttctccaacaacgagctgacatccgtggttctgccggacagcgtgaagtatatgggcaacggtgctttcagtaccaactccaatattgaacgcatcattctttccaagaacttagagaaaattccggatgcggcattcggttgcagcgacaagtatcactatatgccgaacctgacggaaattgagattccggataccgtgacgaaaatcggcagtcgggcttttgccggaaacaacattcacaatatcgtgattccggagtccgtaaaggaaatcggcgagtacgcgttctccaccaagaactatctcaacgagtcgtgcatcgtatccctgtcggaaggcctggaggtcattggcgacaatgcgttccgaaacaaggcaattgcagagattgatttgccgagtaccgtaaaaggattgaaactcaacaccttccgcaaggaatacacttccgatggccataaggtgaacggaagcgtcacaaaggtgtatgtgagaaacgcagagcagtattacgataaaaagaacttcccggatccgaaggaggaaacggaagcgttccacaagctatatctggcggatccgatgacctggacttccgatgactacacctattccaaggaagaatccggagcgaatgaaattaccggattctcaccgctgggagagagaaaactgacggaaaacaaggatatcgaatttccggagaaggatgatgaaggaaatgcggtgaccggcgtggccgcagaagcattccgggaaaagggaatcacatcggtaaaatgcccgtatgcggggggattcactatcggtgagtctgcattccgcggcaacgatatcaatgaattggacttaggctccggtatcaccgaaattgggaacaattcctttcgggaaaatcgtttgacaatggttagcgttccggcttcgatgaagcgaatcggtgaaagtgcgtttgaatccaaccagattcgggaagtaagcttcgaggatactggtgataattctccggtactggaatctcgctgctttgccggaaacaaaattcagtcggtagaaatcccgaaggccaccacttccatgaagggaaatgcgtttatcggaaataccggcaaggaaaaggtagaaacgggaacaacggaagagcagtccggcggcgtggtgtacgtatatgcagccacatccggaagcgttccggatggtctggaaaatatttccaacgggaaatccaacgtgcagaagctgattgtcggtcgaatcccggcagcagaggcaccgtggggcaccagacattttacgtataataatgtagtcggaaatatcgtcaccggtctctccgaagagggtaaggcgaagctgaagaacaactccgaactgattattccaagtcggattaatggtacgacggtaaccggaatcgcaaacgggacggaaggcatcggaattttcggatacacagaaggcggaaagacttacgttccgaagaaggtgattttgccgagaacactgaagagcattggggattacgcctttgatgcatcggcagagggcgtatccggattgacggaaatcgaacttccggatcagctggaaaccatcggaaactacgcgttccgaaatagcagcgcaacggagctgcagattccgaagtcggtaaaaacaattggaaagggtgcgtttgaggtgaccgacaagaatggggcggcactggaaaaagtatccctctcgatgggactgacatccattccggaaaatgcatttcggggacagaaactgaagagcgtgacactgccgaagaacatcaccgaaatcggtagcggtgcctttgccgataacaaggtggaaaatctggcattgaatgaagaactgaaaaccatcgggaatactgcatttgagaatcatcagctgaagaagctggtgctctccgataacgtaaccgaaatcggcgattttgcatttgcggtaacggacagcaatctgaaaaagacgctgaccgaactgaagctgaatcggaaactgaagagcatcggcgaaaatgcttttggcagaagtgcagtgaaagaaacagaactaccggacagcgtggaagtgctgccggcaaatgcatttaacggaaacaccgcggtcgcagaggtttggacatcttccgataaacaagcttccggcgagacaccatatgaaaaggtaacggcgaaaggcgacggacatcagttgaaatacgataagctggtgggaaccggctgggaatacagcgatttcgtgtacagtgaagacggaaaaaccatagtgggtttgagcaagtcgggcaaggacgttcgcatgagcaatcaccatctggtgcttccggataaagcatccagagaggcaaaagaatacattaccgtaatcggagaggaagcttttgccttctctgacagagaagtaactgttggcaaatacgattgtacatcaccaaatggattccagtccgtgaagttcccgaaatatctggaacgaatcgaagcaaaagcatttgagtacaacaacctgcggaaccatgacaaggacggaaatgtcgtgaatacaccgacagaaaccaccggtgaagaccacttcctggcagaccagaaatatctcacctatgtgggcggcagcgcattccgcggaaaccacctgtgcaacgtggcgcttccggatgcggtaaccgcagtgggcgatggcgcattttccatgaacaacatctacaagctgaagatgtcgaataagatgacggtaattccatccggtgcattctccatgaatatccggatgagcagcatttccattccggaaggtgtgaaggaaatcggacagaccgcatttgccggtgctcgtctgaagagcctgaccattccgaaatccgttacaaaaatcggaagaaaagccttccatctgcaccagatgaagtccctgaccattccgggaaatgtaaaggaagtgggcgaaagtgcttttgaaggaacctacaaggcggcttctctggagaagctgaccatcgagaacggcgtgaagaccatcggcgaaagagcgttcaaggaaggacatctgtccaccgtggtcctgccggattccgtggaaagcatcggaaaggcggctttccagaacaacaccggaaacacccgaatcagcggacatccggtactggtgctgaccaataacagcaaattgctcaaggtgaatacggcggatgagaacttccgagttcagctccgcagcctggcgaagaacggaaccaaggtttcgggtgtgaagaacaagacctacagcggaaaatctcagacccagaaggtttccgtaaagaactccttgatgacgctgaacagcggaagcgaatacaaggtaagctactccggaaataagtcggtgggaaccgcaaagatcaagattaccggaaccggaaattacaacggaaccatcaccaagacctttaagattaatccaaaaggcagatcgctgaagagcgtgaaaaagggcaagaagtctttcaaagcaacctggaaaaaatcttccaagacttggacgaccggatatcaggtgcagtacagtacttccaagaagttcaagaaggcaaagactgctaccgtgaagtcctataagaagacgaaggtcacggtaaagaagttgaagaagagaaagacgtattacgttcacatgcggacctataagaccgtaaaggggaagaagtattactccggatggtcgaagatcaagaaggtaaagacgaaataattctgccaaacacgcgatatgacaacggtgcagttctgcctaaaatctgcccgaactgcaccgccgcatatattaattaagaaagttaaaaccaatgaaccatgaaaggagaattaccatggacaaaaaacagtctctggcctttctgctctcggcaatgatggtggcaacaccgttcagcgcttttgcggcagaggatggaacagttcccgcagacgccgatgcttcggcgaaggcagcgaccgaacagggcgtagaaaacaatcaggcaaaggggaaagcttccgtgcaggaagatgcccagttggacgaaaacgaactcccgattgtaccgggggaaggaaccggcgaagagaagaaggatgaaaccccggcatccaatgcatgggaagcggccgatttcacatacggggagtgggcaatcgataagaatgatatgctctgcccgtctaatgactccgaggcctatttgaagaccacggtatgggtggtaaccggcctgtcggattccggaaaagcgaagctggagaacaacaaggacctggtgattccggcgaaggattcggacggaaagaaggttcagggtgttggtaaggaggcatttaaaaaaatgggtctcacctccgttcagttcccggagaacgtaaagacggccaatgacaccaattgggacagcagcgtaaaggaacggggagacttctttatcggaaatctggcattccagggtaacaatctgaaagaagtaacccttccggaaggtgtgttctatgtagcgacaaatggattttcaagaaatccgaacctgaaggaagtgacattcccatccaccattaagttgattggaaattccgcatttgcagcttgtgccatcgaaaagctgaatttctcggaaaacacggatttcccattggcaattgataacattgcattctttaataataagatcaaatccgtatggctgccggacaagaccgaaaaggttaccaacatggcgtttagaagcaataccggagtggagaacggaatcgtacacctttacattccaaagaccaagggtaattacgtggacaacaacgcatatcagaagccgttcgtcggcgatgccattccggccgaagcgtgggcggagaagccatggggtaccgcacacttcgccttcgacggaactaccatcaccggtctttcggaaagtggaaagattaagattcagaacgacaccaacctggtacttccggatcagaatgcagccggtgaggatgtaaccgcaatcggcaacggaaccaacggcgtaggcacctttggctacaaggcagccgacggcaccgtatacgctccggattccgtaaagcttccggcaaagctggaaagcatcggaaattttgcgttctccgccgtagtggatacgaaaacctctgaggtgaagcacggtgtgaaggaagtggaattcccggaaacgctgaagaccatcggaaataccgcattccagaacgcaccgcttacagaagtgagccttccggacagcgtcacatccgtgggcggcggtgcattcaccaacacggagaaggcaaccacacatatcgaaaaggtgaagctgtccaagggtatgaccgccattccggccggcatgttcaccaatcaaaaggtgaagaatgtagagattccggaaggaattaaaaccatcggtgctcgtgcatttgccggaaaccgcgtggaaacactgaaaatctccggcaccgtagaaaaaatcgacgattacgcattctggaacaaccagatgaaggaactggaaatcccgggaaatgtaaagacaatcggtagatatgcattccagagaacgcaggactacatcaaggcaaccatcaacaaggtgatattgcacgaaggtctggagagcatcggaaagagagccttctaccagacgctgacttcggaatgcaagtccatcgacctgccgacaaccgtaaaggttctggacgcagcggcttttgaaggaaatgcgaaaatcacactgatttctctggtggaagatcaggcaaatgcgaaaggggattacacaaaggtcgtaccgcagggtaaggcccatgaaatcgtcctggttcataaggtgacatttgatgccggcgaaggcaaggccgatgccgaaaccgcaagaactgacaaggacggaaagctggcagagcttccggacgcagtaagagacggatacaccttcgagggctggttcaccgccgcagagggtggcgatgccgtaacggcagataccgtattcgacaaggataccaccgtattcgcacactggaagaagaacgttgtaagcgcaacaccgaacgtaaagctgagcacctccacctacacctacaacggaaaggtgaagaccccgggcgtaaaggtttctgtaaacggcactgtactgaccaaggacaactactctgtatcatacggaaagggcagaaagaacgttggaaagtacaccgttaaggtaactctgaagaacgattacgcaggttccaagaccgtatccttcaagatcaatccgaagggaacttccatcaagcatctgaagaagggtgtgagagcattcaaaccgacctggaagaagcagaccaagcagattagcggatatcaggtgcagtactctaccaagaagaatttcaaatctgcaaagattaagactgtttcttcgaagaagaagtccacatgggtgattaagaaaaaagctcataagagatactatgtaagaatccgtacctacaagaaggttggaaaggcaaaatactattcaagctggtcttccgcaaagagcgttaagacaaagtaattcattgaacaacttgttgttctgaaaaattcgaatcgagttcctcggcttcggaaggttccggagccggggaactttgctatcaaggggaatctatggtatcatggtacttaaaaaggggtttaaaatcgggtctatggatttaatcttataaaggaagaatcgtggaggacgaatggagaatcgagaaaagctgactgtgatgcgctgcgttcgaccggaggagaaggaacgggtgctgcccctggtatccgatgtttttgaaatcgagcaaggcatcccacgggacatggatgacattcctgcagagaaatcaccccagtggtggtgcatagagatttccggcaggatcgtggggggaatcgtatcctgggaagaaccggaaggaccgcatgtaggacgctttgccgttcatccaagctttcggcaccgccatctgggcaccgacctgctgcgcggggttttgagtgcactgtttgctctgggggcttcggaggtgtacggagacgctcgggatgtgacgctgaaaatacttttgaaaatgggcgccgaagttatcggcgagccgtacgagttctacggcagcaactgcacgccgttccgggtgaagaaaaatgagtttatcgaatcccagcggctgaagtagaacgccaaaagaatcgggtaaaataaaaatcgcagagccggaaacttccgaccctgcgaattctctttttttatcggagcgttgcgggaacgtcttaggatgtacttgccgtatcccggaagctgcatatcagtgtaagattcatgaattcttacgagccggagtgattagttaactgatcggatacttttacttcatatttcatagcttataatccttgcgtatgtcggcgaaagcctctttcgcatttttcgtccgtccggcctgcatatccgcatatcctttttccaattcctcattgaactctgtttctgaaagtgtattaatattgacgggctttgcaggtggaatttttacttcaaaaggtaatcctctttgcaagataatctgtttgtaaaaaatattgatggcgttggaagcaggaatgccaagtgcagctagaatgctttcagctttttctttgacatccggttcaattcttgcatacaaatttgctgactttttagccatataaaaacacctcctttcatgagtgatgtacgcttcttataaacattataagtgaatgtacgcacaaaagcaatgcaactttcacctttgcaaaagtaaattcaggtgcaggtaaaataaaaatcgcagagccggaaacttccgaccctgcgaattctttttttttatcggagcgttgcgggaacgtctcgcgttggattatccttcgatgtgaaccaactgcttggtttcattctgcggaagcgcttcggcctttggaacggtcagactcagaatgccgttgttgaatgcggcactgatgtcctcgcctttcacggcgtcacctacatagaagctgcgctggcagctgccggtaaagcattccttccggatgtacttgccgtcttccttgtcttctttgttctccttgtgggaagcggatacggtgaggtaacccttgtccacggaaacttctacatcgtctttgtcgtatcccggaagctgcatatcaatctgataggattgatccagttccttgacatcgcacttcatgcttgcggacggcatgtagcttcttcttgccggagcgttaaagaaatcatcgaaaaagtcatcatttgtaaaatcatttgtaaatacactaggcagtaacataattaaatcctccttttactgacgttatatacaatcgaaggagaaccggtggagtctctcggggagaacactcctggttggaactcatctgttctcttgttgtaacctctttccgattacagctatgttataactctttttgttagcactgtcaataggtgagtgctaattataatgtgaagagtctgtgacgatgaaaaatgaaaaggcgaagagccggagcaggattcccgctccggctcttcgccgctatctcttcagtgttaattgagggctgaaaaactattctgccgagaactggtcttttccgacggagcacagaggacactcgaaatcctccggaacgtcttcccatttggtgcccggtgcgattccgccttccggataacccttctcttcgtcgtattcccatccgcatacattacatacgtacttcatgattgtacctccttttatcgattaataattctccgcatgaacttcaaagtagctctgcgggtgactgcataccggacatacctccggcgccttggttcctaccacgatgtgaccgcaatttcggcattcccataccttcacttcgctcttctcgaatacctgagaagtctcgatattcttcagcagcgcccggtatctctcctcgtggtgcttctcgattgccgctactgcacggaatttctgcgccaattccgggaaaccttcctcctccgcggtctttgcaaaaccgtcatacatgtcggtccactcgtagttctcgccggcagcggccgcagccaggttcgccggagtgtcgttcaactctgccaattccttgaaccacatctttgcgtgttctttttcgttgtccgcggttttcaggaagagggccgccatctgttcgtagccttccttcttcgcaacggatgcaaaataggtgtatttgtttctcgcctgagattctccggaaaatgcttcctgcaaattcttttccgtctgtgttcctgtgtacttattcttagccattttcttcctccttgttgaaattgtgctatttcgtccggcactccgggcagattcctttaaaagaaatatcgtaatccagaaattccattccccgaggtccccgaaccttcgacatcaaatccgaaagcacgtccatcttcacatcgaagacctcaccgcatcggatgcaccgcacatggtagtgatccttcagggtaaaatcaaatcgatccgggccgtccgggatttccactcggcgaatctcgccttcctccgccagaatccccagattccggtagatagttcccttgccgatgtgggggtgattcttccgaataaattcaaatacctcttcggcggtaacatgacttttcatggtgtggatggcttccaacaccagatttcgttgtatggtattgcgtcgtttcatcgagcctccttattaggaattattctttataagtataatataccacaagagtaaagttgtcaaggtaaaaataaactattttcgtacagaatgcccaaagaaaaattgcaggttcggaacagcctaaatttaaaactagagtgatatagtttttttatcggtggttttagtcctttttgttctaagcatattgcgctcaaaactatttctgataggatggaaccatgaaatttcagaaacatacgcgcgcgctcatcgttgttgtgaattcaatataattctagtatttgccattaagatttgacaggaactatatttgattttaaaataaggagaagagaaatagatgagtacgagaaggaagtacaaaacttacaaagaattgtcgtttaccgatgattttttgttctgcaacattatgcagaacaatccggatatttgcaaagaattggtggagttactgctggaccgaaaggttggcaaagtggcttacagtgaaactcagaaatccatcgatctcgctttggatcagaaaggggttcgcttagacgtctactttgaagatgacctcagcaccgcatacaacattgaaatgcagacctccaataccggaaatctgccgaaacgaagtcgctattaccaagggaccgttgatttaaatatgattagctccggagccgaatacgatgagctgaaaacgagctacattattttcatcaacacctttgacttgttcgggaaaggatttccgaaatacactttcgaaaatgtctgtcaggaatcatcggatcttcatctggatgacggtgcgattaaagtgttcatcaatgctaaaagcacgattccggatatgtcgccggaactgcaaggctttctccgctatctctgcggggataacccgaatacaccgctcaccaatcgaatccagaacgaggtcgttaaatcccgaaataatgtacgatgggagagggtttatatgttgctggaagataaattcaaagcttatttcgcagaaggtcgtgcagaaggtcgcatagataccatccttgaaatgtttgaatcaggataccttccactggaagtagtcctcaaagaaaccgggactgcgacagaagctgaactgcaagcttttgttgaggagcgaaagaaggcagaagattgcccaatgcagaataattaaataatacggataatttgaagagcggaatggaaattggtcattccgctctttccctttcgagagtttgaattgctagaagaaagcaggttccgaaaaccggaacctgcttcctcatgtgataatataatgaatgaaacttaggttggcaaaggtaccaatagtcccatcactatgtaatgcaaggccggaaacgcaatttgtcagtggaaggttggacgcttccggcgaggcgatatatttttatgaacatcaatgactacagcgagtctgcaatcttgatgttggcgcggatggcgttgcagctgtcgttgaacttgtccagttcttcctgcgtcagcgggaattccacgacgcgctccacgccgtctttgccgatgatgcacggaacgccggcgtagacgtcgcgctggccgtactcgccgttcaactcggtgctggccggcatgagaatcttctcatcatgcagaattgcttttaccatgcgtgcggcggtggtggaaacggagtattcggtggcatgtttccagctgaaggtgacccagccgccgtggcgacccagctgctctacttccggtcggtcgaaatcccagcgagggtcttgtttcgccatctcgtcgatggacaggccattgacggtgacacaggaccaggcagcaaacatggaattgccgtgttcgccgaacatgaaggcctgaatggaattcggatccacattggtcttttttacaatctgggtaaccagtctggcggaatccagtccggtgccggtgcccagtacgcggccctttgggaggccaaggccgttagcgatttctcgggtaacgacgtcgcacgggttgctgatgttgagaaccacgccgtcgaaaccggctttgcgaacgcggtccacccaggtgtgaacggctggaatcgtgaacttcagctctctggaccgatcgtcggatcccaagagcaactcaatgtgaccggcgctgttaacgattaaatcgcaatcggccaaatcctcatattctccgatggacactctggtgcggtgcggcatatgaggaagcgcatccagcaaatcctgatattcactctccactctggcggtgtccgtgtccgccagcaccagctcgtccacgatgccctgaattgccaagctgtacgcaacatgagctcctacgtgaccgacaccgatgattcctacttttcgattattcatttccttatctccttctatccctgtttaatatatctttttgaactcgcggaggagttcgcgcccttcggatgatctgcaatcccttcggactgttcgattgttttgataaactatattatactcaagaatttgtggaatgcaataaaaaataagccatgtacacaaaatagaacaaattctttgtgcacatatacaaatattagcggcgccgcccgccggcgggccgcagtaaggaaaagtgggcgggacttggtgcaaaggaaacggaataataggggttagcggggctccttgcaccaagtccagcgccgcgcaccaacgaaaagaggatgaaacttggtgcaaagggaacggaataataagggttagcggggttctttgcaccaagtcctgagccgcgggccggcgaaaagaggatgaaacttggtgcaaagggaacggagtaataagggttagcggggttctttgcaccaagtcctgagccgcgcgccgacgaaaagaggatgaaacttggtgcaaaagaaacggaagaataagggttagcggggttctttgcaccaagtcctgagccgcgggccggcgaaaagaggatgaaacttggtgcaaaagaaacggaataataaaggttagcggggttccttgcaccaagtccgccgccgcgcaccaacgaaaagaggatgaaacttggtgcaaagggaacggaa

SEQ ID NO: 2584 - DNA, 6376 bp, Unknown
  16S sequences of unknown bacteria
cgtcaggtgaaggcgacttcaaggaaagtgcaacagaaataaaccgcagggctttcgccctgtaaggatggaaaggcgaggtaagagctcaccgatatcgcggtaacgcggtatgccatgtaaaccccacccgctgcaagattgggtacctgccacatagggctgtccgtccggcaggataccgtgaatatcgcttgaacttgccggcgacggcaagtctagatagatgaccgtacacgacagaactcggcttacagacagactcaaatcccttttttaaaaggtccggttttttaaccggattttgtttttttcggcatcaaaaagccccgaacggataagtttcacaaaatcagtttcacgaaagcgcttttcatgccgtatttaaaaagcgaacaggaggacaaagcgaatggaagttgcccgttatttggaaattttacacatatttgaaaggttgaaaaacaatacccgacattcttatacttccgcaaatcgaaaagaaagcgtagcggaacattctcatcggctggcggtgatggcgtatttcgtcaaagacgagtttcccgaagtggatattcaaaaggtcgtcctcatgtgtctttttcacgacatcggagaggcttttacgggagatattccctgtttcgaaaagacgaattccgacgaagagcttgaatctcaaaaagtgagcgccttcttaaattctttgccgttgccctataaaacggagcttgaaaagctgtttgaagaaatggaagcgctcaaaactgacgaagcaaggctatataaggctctggataatatggaagccgtcgttcagcacaacgaagcggacatttccacgtggcttccgctcgaatacgatttgcagctgacgcacggggaagaatcggtatcgcatttcggatacaccagacggcttaaagaagagtgtaataaaatcactttggataagattaaaaacgaaaaataaaagaaaaggaagagggaggctttgcctctctcttttactatgtctggcacaatatttatgacagacatagtaaaaaatgccttggaattactatttcagacataaatattacgtgtggcgtagtaattattttgtcctttaaaaaatgtgcgcgaaaaagcgagaaaagttttgaaaaaagaagaattttagcggcatagtacaaacaatccccctcatacgatagagtacttttatttttacgggcaaaagggcggacttttcgcggagaaaggacgctttcccgttttttgtgaggcggtgggcgtatgtttttggattttctgtgggcaattataggcaaaattgtattttttacaggggcgatcggaggaaaaaactcttttcccaagcctctttcgaaggaggacgaggaaaagtatctcgctttggcggcaaaaggcagcaaagaggcgaaagatgtgctgatcaagcataatatgcgtttggtggctcatatcgtcaaaaaatacacgggcgcggcggaaacggacgacttgatttccgtggggagcataggccttatcaaggccatcaacacttacgagccggggcacggcaccgcgctcgcgacatataccgcgcgctgcatagaaaacgaaattctgatgcttattcgcaccaataaaaagcataaaaacaacctttccctttccgatcccgtggggacggacaaagacggcaacgaattgacactgatggacttgttgtttgaaaaagaggattgcgttttcgataaggtggaaaaatccgtccaaagggaaaaacttttgcggcagataaaactgattttgagcgagcgggaatacacggtattatgtctgagatatgccttaaagggcggagtgcctctccctcaaagggaggtggcgaaaatgctgaaaatttcccgttcttatatttctcgaatcgagaagagggcaatagaaaaactgcgctcccgtttgcgtcccgaagactttttcgaatgaaaaaggaacgggaaactttttcgggcgcgcggtgtacagggaagtgaaaatcggagcagaggatcatgataaaatttttcaaaaggatcttgctttccgccttctcgtttttagggcttttcctatgaggagataagcggaatagaagaggaatgcacaggctgtcagcgccgagatatagacgacggaattgacctgccagccaaagcgtttgacgatgtcccggcaaatgaccaagggactgggtttgggacctataaaaaacatattgacgtcgttgccgggacagcgatagcataaaaggttgattccgaaagcgactgcgcacagacaaagatacacggccgctgcggggagaaaatctttcaggcgcgcgcctgcccgccgcgaaaagaaaaggtaaaggccgagaaaaatcagcgtcatatgccaagtaaaggaatgaagggtcagcgtccaatagggaaggcacatactttcgggagaaaaataggaaacgaagcctcccataaatccgtaagaagcggtaaacgtatagagcgcctgtttgagctttccgtttttcagccaaggaacgatcaggcagagatacatgggaatactgcaaagctgaaagggaaatctgtcgaaaggatattcgcccttgccgatgtaaaaggtatagaaaagctgtttgtaaagctccgcgagagaaagaaaaattccgattcccaataaaagccgtttgttggctttttcgcccgtatgccttaacaaaaacgccgcgatcgttaccgcaagaagtccggcaagccaaaagacaaggtgaaagacaccgtacggtttcggcggtgtcatttcccatgcggtccattccagaaagcggaaaagagtgttcatgcttggcgttcctttttatcgtattcgggcgctttgcgcagaaaaaaactgaggtggtacaagttgttttaaacgctgaaaaatgcttagccttttgctttcgacaacgtttccgtcgcgaagctgcgctttgccgcgactcccgtgaagaataaaacgacgtccggggaaattttctatactctgtcgtttataaattcgaacgatgagggagaggtggatacagtaatattatagcacgcctttgagaaaaaaacaatataaataaagaaaaatagaaattgcggaaaggaaaagagtcaaggtgaaaaggggaaaactctctaaatatttgtaaaaatttttaagaaaaggaaaaaaagagcgtttttgctgttgaattttttttaagaatgtgatatactgtataaggttttaatccgtaaaaaagattcggcttatatttcggtaacaaaattttttggaggaattcataatgacaatatcacaagatgttgcacagatgttctgcgttgcgaaaggcgcgggcgttgctcgtcatgaaaattccgcgattcccgaagaagggaagtggattcatgcgaaagaaatcaaggacatcagcggtcttacgcacggcgtgggctggtgtgctcctcagcagggcgcctgcaaacttactttgaacatcaagcaaggtattattcaggaagcgttggtggaaacgatcggttgctccggcatgacgcattccgcggcgatggcggctgagatccttcccggcaagactcctttggaagctctgaataccgaccttgtgtgcgacgctatcaatacggcgatgagggaattgttcttgcagatcgtttacggtcgttcgcagtcggctttctccgacgacgggcttcccgtgggcgcgggactcgaagatctcggcaaggggcatcgctctcaggtcggcactatgtattccacgcttcaaaagggcgtaaggtatctcgaaatggcggaaggctatgtcacccgtcttgctctggacgccaataacgaagtcatcggttacgaatttgtttcgctcggcaaaatgaccgatttcatgaaaaagggaatggagccgaacgaggcgtataagaaagcgataggtcactatggcaggtttactgccgaacagggcgccgtgaaattcatcgaccctcgtgaagaataagcaaggaggacaagctaatgtcattatttgaaggttatgaaagaagaatcgaaaaaatcaacggcgttttgaaagaatatggcatttcttccgtggaagaatgtaaagatatctgcctttcgaaaggcgtcgactgcgataaaatcgtaaggggcacgcagcccatctgctttgaaaacgcggtctgggcgtataccgtaggcgcggcgatcgccatcaagaaaggctgcaaaaaggccgccgacgcggctgcggctatcggtatcggtttgcaggcgttctgtattcccggctccgtcgcgcagaacagattggtgggcttaggacacggaaatctcggttccatgctcctttccgaagaaacggaatgcttctgcttcctcgcggggcacgaatcgtttgccgccgccgaaggcgctatttctatcgctcagaacgcgaataaagtcagaaaaaatcccctgcgggttattttgaacggtcttggaaaagatgcggcgtatattatttcgagaatcaacggctttacctatgtggaaacgacgttcgatcatgcgacggaaacggtgaatgtggtctacgaaaaggcgttttccgacggtccccgtgcaaaggtcaaatgctatggcgcggacgacgttcccgaaggcgtggcgatcatgaagttggaaaaggtcggcgtttccattacgggcaactccaccaatcccacgagattccagcatcccgttgcgggcacctataaaaagtggtgctatgaaaacaacgtcaaatacttctccgtggcttccggcggcggtacgggcagaactctgcaccccgacaatatggcggcgggtcccgcttcctacggtatgacggataccatgggcaggatgcattccgacgctcagttcgcaggctcctcgtccgttcccgcccacgtagaaatgatggggctgatcggaatgggcaacaatcccatggtaggcgctacggtggccgtcgcggtcgccgtggaagagagcatgaaaaacgcgtaaaaccttttgaaatgataaaaagcgggcttctctatgcaagtagagcagcccgtttttattcgctcgctataaagaacttagaaggaaaaaataaaaaggcagaagtcaggagcggattttttcttccgattttatatctcgtcgagtatattgattttttatccgatttatgatataattaaaaaaactcgggaaagaatacgcgaggggaggaaatactcatgtataatccgcaattggaaacgtttatctcggtggcgaaaagcggcagcttttcaaaggctgcggaaatgttatatatcacgcctacggcggtgatgaaacagataaacgcgcttgaaaaaagcgtgggcgtcaagctgttgaacaggtcaaatcacgggcttaggctcacggatgcgggaaagagttttttgcaggatgcgaggtacatcatcgattattccaagagggccatcgaaaaagccagggaaattgacagcaaaaataaaaggaaatccattcgcctcggtacatcgcttatgactcccgccaagtttttgctggatatttggacggaaattcaatcgcttgaaccaagcttaaagatagagctgatcccctttgagaatacccccgaaaatacgcaggatattcttaaaaatttcggaaaacacatcgacgtggtggccggaatctatgacgaaggatggccgcttgaaaaaaattgtcaggcaacttatttgtacgataaaagtatttttatagccgttcccatttcgcaccctttgagcaaaagagaggcgattgcgaaggaagatctgaaagatttgagtttgatgctcatcaaaaagggctggaacagacatatcgacgccttgcgaaaggatttgaccgttctgggggtcaatattgtcgattttgagtttttcggcattcccgcttttaatcgggcagccgcagagaatcttcccgttgtcatgatcgacgggtgggaaaacgtccatccgctgctgaaactcattcccgtacaatgggagtattcgattcccttcgggcttctctatgcaaaaaagccgtccgctcacgtaaaggagtttgtcgacagcgtcaaaaaagtgactaaataaatccaatcgatctctatgaatccgtcgcgtgatagtataaacttttagtatatgcgtataaactaattagaaaccataaatccgcggaattcaattgacaaaatagataatgtgaggttataatatagatattatagattgaatgtccggcaacgcaaaaaaattcgcgttgccggcggatattttcatatccg

SEQ ID NO: 2585 - DNA, 3291 bp, Unknown
  16S sequences of unknown bacteria
ccacaaacttcgttaaagctgatttttacaaaacccctaaaaagtttatagagcctgaaaatgtaggtataagtaaaggtattgatattaatactatttcaccgggacgaatttcgtccggttgatcagcggatgctccaaatgaatggcgccctccgccgggcattccataacgcaggctccgcagtaaatgcattcccccggatacattacaaccggcgattgtccttttacctccgatggaaccagaacatcaatcgggcatgcattggtgcaggaattgcagccgatgcaaagttctttattatatgtgatcggatttgcactgcacggtacttccaatgcaaacagctctttattactcataatacttcggtgcctcctcctcgatataatcccggttatatttctcgtacatttcctctacgtcgccgtaatagtcgtgcggaatttctccgcgaacggcctttccgttctccagacggatggtaaggaatttcttatcctcttccggatccatttccggataatcgcttcgctggaagcacagcggtgcggagcttgactttctcatcttgcatgcttcaagaatcatcttggatacatccaaaatatccaatacttcgtgggttctcatgagatcgtgcggattctcacagtgcagcttcggtacgatgtcctcgctgtaggtattcagcaaatccaggccttcattcagcaactcttcgcatttcacctctgcacagtagttctgcatgcactttgaaatcgcaaaattcagttccttccaggaatatccttcttcggtgtaaagcggtgccagcaggcgttctttttccgcttctgcctgcgccttatcatactccacaggagcgatttccgaagcgtgcgccgctgcttttcgtccggcataataaccggtagcggatgccgctccaccgcaatccattgcgtacagctgatctccggccgcatacacaccttcgatattggtcatcaagttccagtcggtaatcacaccgcccggcgcaccgaacagctgtctctcctgtcccaggaaattcgcagactgccagccggttccgtagctctgaagcatgtgtttctccggatcgaatcccttctcggtatagtacttgagtaccggaatcttggttcttccttcttcaccaaccatcatgccccaaataacttttctttccatctccggcattttgctcagatcggcatagaatggcagcttgtatcctcttttcgccagttcttcgaacggcattgtttccggtccccggtattcgtatttcgcttcgtcgattacaccgcccttcaggaagaatttctgtccctttgccgggttgaaacgttccgaaacgctcttgagttcatttccgtctctatccagatacggaatctccacgcctctggcatccaccattgtggccccataccaggtattgtgattgtttccggtgctgtacggcggatagcttcttcctgccgcagagaattccccccgaacggatttctccatcatggtgaattccatgccggcacgatagcccatcgcatgtccgcttccgatactgttgaacggacggaattcacaaagccccggaagatccgcattgaacagccatactctggccggacgggacatcgccagaatggtggattttgccgaaacgctgtagaacttgccggttcgcacattcataccgcaggcgcctgcgccgataattttatccccctccttcttcgtcagaagagaagtggcctccgttctgtccagaaccttcacgcccagcttctgacactccttatagagtgccggcttgaatccggagccccagattctcaaagtataacggttcgtgtaatcgtaagcatacatcagcttcgtctcatcatcacggaactccgcacccttgaactcatcttccgtatcgcggatctttccgccaaagctttccatatccagcaggcgatcccagccttcccggcattcgatgtagtgggcaattccgttgctgtaatgatcctgctcatcgatataggcttccgcaacctctttcggcgtcacctgacttcccggattggtacacgcagattcccagtgatcgaatccgcttcccgccgaaccggaacgcttcgtcgcacccttttccatcaggattaccttctgtcccttacgagctgccgcaattgctgcgtagcatcccgcaagaccgccgcccagtaccagaacatcgcattccaaatgctcttcccggccgatttcatttgcataaggccatttatgtaaactcatcgttgcaaacctcctaaaaactatatttctcgcaattacatttatccggatttcgatgttatgattatatcatcggattttgcaaaatacaatatttaattatataatttttcttctttttgcaaaaacaaatgacctgccgaatgggattccgacaggtcatccgttaagagagtttaaaaaaatgacaacaagcatgttgacagtacttttatttcgtactttcccattcgtcgcacagcacgcacagcaacgcctccggcagaatgcgaattactttgccttccgcttcatcgccgattttatcgtacaggcgtcccgcactgtacgattccccaagaacggtcggaacgctgtttgccacatatccgatcacacccaatcccggtaccttcacctggattgcttcgtgatcgtatttgttatccggttcttttttcagcatcacccgatctcctttttcaaacagctccgttccgtatcggtagctggttccggtaatcgtaaaataaatcttatccatttcaatccctccaaatgcttctggtattcgttccttaacttgatcatattgtaacgccgaattgaaggtgtttaaactacttttgtgtggaagtgccattattggtaaaatacttacccaattctccggaaaacctgagcttgtttccacattaaaaaatcaccctctgaaatccattgatttcaaagggtgtatggtgcgcgacgagggacttgaacccccacggtctcccgctagaacctaaatctagtgcgtctgccaattccgccagtcgcgcgcaaaagtattctttgtaaaaagtaaccccgcttttgcaagcggggtagtggtgaccctaccgggactcgaacccgggttaccaccgtgaaagggtggtgtcttaaccacttgaccatagggccttagaaaaaccggcgacttcctaatttcccaggcagcttcccgccaagtatcttcagcg

SEQ ID NO: 2586 - DNA, 32759 bp, Unknown
  16S sequences of unknown bacteria
gatttgaacctacgaccttcgggttatgagcccgacgagctgccagctgctccaccccgcgatatctaaattttattaaaaaagatccggcttctgacataaaaaatcggatgcatattcatcatccagaaaaatcagacccgattcagaatggtgccggggaccggggtcgaaccggtacgatcggtaaggatcgcgggattttaagtcccgtgcgtctgccaattccgccaccccggcgaattggctccaagggtggggctcgaacccacagcctatcggttaacagccgagtgctccaccattgagctaccttggaatacctgtgttgtagtgattattaccgccgacaacaatagttattttaaacgttttcctgcatcctgtcaagcttttttttaactttttcaagttttcttccgagaccgattacaaaaatccgctgtcaacagcgtctccgctcgctgacttttagaattatacgatcttttctctcttccgtcaatcccttttttacattttttcgggacttttttacaatctgctcaaaaccgtcgaaaaacaggacatggagccctttgacaaagagacttctgcagtccggtataccggactgctgccggcgaaaaacatcattcttctcgcttggcatttctcctgacgacttctatcttttttttatatttttccgcattgacctcgtcgcccaaggcgttatatacgatcacgagctcggccataatctctgctccggaaggatattcgtatagagctttcttcagagaacgcagcgcttcatcgtatcttccggtacggctgtatcctacgccgaggtagtaagaaagaggccaccagctctgcgcgatttcctcgtccttatacgcctccaatatctccagaccttccttccagcgcccgtttatcacattcatatacccctgttccatctttaccgggatctccagctcagacaggcgttttgtgatctcggtatattcctcgcccggctctccgagagaaagaaattttttccattcccgctgggcggcttcatattttcccgcattgacataagcatagccgaggaaataataagtcatcggaaaatccggttttgccgatttcagcttcagcagagactccagaacttccgctttaaagtcggcgatgtatgttccgtcctctccttcgctgtagagatttctgcataccagcatataattatagagcgcatccggatcattttcattgagacaaagcgccgcacgcagaagaatcgccgcatgctccagattctccgattcagcctgagcgatggcgagcgccaccaggcgtttgccgatgtccttattcacatatttcaaaaaattgacatactgggatcgatagcgaaaatcggagtctatgccgatcagacagaccattccctcgataaaatacagaaattgtattccttcctctccggccagttccttgagatgttccttttttatcggcatcggaacgttcctcatgaaatccagccgttcccgcttgacatactcgggcatcagctcgagaaatacaaattgatcgagatactccgaaaaatatttatccagtctgttgttcatccttatcctcccggtctcttctttcttccgccgctttttcaccgcagcgggcggcatgcccgccgtccgcgcgcttcgcttctgcggttcgttatccttctgtcccgccgtatctgcgcctcctcctgaaatatcataaatcctcataagctcagccccacgcggcacgtcttgcgacaataccagccggcagagttttcaggcagcagtccggagatttttctgaaaccgcaatagaaccgaacgccgcgggaaatcgtatctcagaatccacacggcgtcgttttcataacaatatttcgttctggcgaaagcgagtccttgtctttttgccgcagcgcgaattctacagcatgcggaagcgctcatctttccacatttcactgtgattctgcgccacgcgcagctgctggatcatccgctccttatccgccggcagatctcccttcagcgatacataattggaagcgtgattgctgcggaaaacgcactttttcttgacattgatgttttccagcatgagctccgcttccttgagtacctcttccggcgtcagaagctcaaattcacctttcagatattcttcatgcagcggcgtacccggaacgatcataagcgtcaggaagctggcataggtcggctccatctctgaaatcatcgtaccggtatcgatagcattctcacgccacatcgctcttcctccgataccggacaggaacgtaagcgacgtttcgatgccgagagcttccgcttttcgaaccgcttcgatcagttcctctctcgtttcgcctttattgatctttttcaggatttcaggattgccggattccacgcccacatagatgattcccattccgttggctttgagttccagcagttcttcatccgtcttgcgaaggatatcgtgagcccttccgtagatacccacccgctgacattccggaaacaattccctgatcctattcagaacatccatcagataggaatttttcagcaccagtgcatcgccgtccgcaagaaaaattttctcgatatggcgatagtactttcgcgccatctccagatcttcataaacctcttcgatcttgcggattctgaattttttatctttaaaagacccgcagaaagtgcacttgttgtgggcgcagccgatggtaatctgaagaatatagctgtacgcctcgcttggcggtctgtaaatatctccttcgtatctcattgtgatctcctccgtcttcgccgcgctgctgacccgcagccggcggcgtaaattgataaaacggctacatcttttccggcgcgccgatgcccaagagtttcagaccgttggcgatcgtctgcttcgcagcgtagaccacagacagcttcgcctgtctctccgcctcatcgtctaccagaatgtgttcgtcgtgataaaacttattaaaatactgtgcaatatctataatatgtctcgtaatcacggaaggttcgtatttctctgcggcttctctcaccgcctcagggaaacggtagatcagtttgatcagttcgtacgccgtatcgctgctcacataactcatgtcgagcggcgcaactccggaaagcgctgcttccgctgacgcgccggcgtttcggagaacactggcggctctcgcatgagtatactgaacataaggccctgtctcgccttcgaaattgagaaccttatcccaggaaaagacatagtctttgatccggttgttggagagctcctggaaaacgacggcgccgatccctacttccttcgaaatctcttcgagatcctcatccggcccgtttttctcgatcatgacctgtttcgtcttttcgacggcgctgttgagcacatccagcaggaaaaccaccttcccctttctcgtggacagcgttccgtcctccagactcaccatgccgaacggcacatgcacacattgttccgcccagtcatatcccatgagttcgatgatcttgaaccactgctggaagtgaagattctgctgggaagccacgacataaatattcttgtcaaaattataatgctccttgcggtaaaccgcagctgcgatatcccgcgtgatatacagagtggaaccgtccttcttccgtatcagagccggcggcatgccgtactcctccagatcgacgatctgcgctccctgagattctttcagaatccccttttcgtccatcatctgaacgatgcggtccattttatcggaataaaagctctcaccggcgtaagaatcgaattcgattcccaaaagatcatagacataagtgaactcctttaaactttcctcgcggaaccatttccagagctcatactcttctttttccccgttttccagtctcgtaaacgtggcccgggcctcatcttcgagagacgggtccttttccgcctcatcatggaattttacatagtattccagaagagttttgatcggctcacgtctcacatcctcttccctgccccaacgtttataggccacgatcatcttgccgaactgggttccgtagtcgcccagatgattgatgcgtaccgtctcatagcccagataatcaaaaatcttataaatcgcatttccgattactgtcgtccggatgtgaccgatgtgaaacggctttgcgatgttcggagaagagtattccacgatgactttctttccccggcccagatcgctgcttccgtatttctcttttctgtccaaaacttcagaaacgacagcggccgctacttccgctctgttcaggaaaaaattcacatatgcgctgacgtttttcacctcggaaaacatactgtctcccgccagtttttccgccagttcctgggcaatcagattcggcgcttttctcatggttttcgccagcttaaagcaggggaaagcgtagtctcccaatttgctctcaggcggaatctcgatcatcgattcgatgtcgcccgtttcaagaccatctatcatcccggaaagaagctccgcgatttcctttttctgatcagtcatattatctatctccgtatttctatctctgtttttccgcttctcgtactgaaaattcatacccgcgcaaaaccgaatctactttaacgttaccacggtgacgccgtctccgccggaataataatctcccggacgataactgtccacgtgggcgtgctgccggaacagctgtttcaggccgtttctgagaatcccggcgccttttccgtgaatgacagatacctgcggaagacctgacatataagcgtcatccagatacttatccactttcatgaccgcgtcatccagcgtcagtccgatgacattgatttccgtagagatattcatcgtcttctgctgatacattctcgaatatttcggctgatcgaagcgtttctgcactccgtttttatctattttcgtcagatctgtcagcttgatttttaccttcagcggcccgatctgcaccaaaagctcgtctctgtcatccggcagggacgctaccgtgcctttctgacccagagacaccacgttgacccggtctcctatcttcaattcgccgcgctccgcaggctttgcgttgaccgcgggctgaaagacctctctgtattcgtcgcttttcttcatcagacgtctgcggatgttcagctgcttgctgcgggtttcctctcccggaccttccttctgaagctcccgcagttctcttttcacttcttctgcgaattctttggcttccgctatcatctcaccggcctcccggcgggctttttcgatgatctttctgcgcttttcctcggcctgctcttgtctgcgggcgaattcctcctcctgtttcttcagccgcagcttcagttccagcgcctgatctctttccgcctcggcatccgacatattctgctgaatcgcgctgatgacattttcgaactcgatatcatcggtgcccaggagatctctcgcataatcgatgatctcatcgtccaggcccagctttttcgaaatttcgaaagcgttggaacgccccggcgtaccgatggtgagacgatacgtaggactgagagtttcgatgtcgaattccatggaagcgttttccacgcctctggtggcgatcgcatattttttcagctcactgtagtgcgtcgtcgccatcgtcatagcgcccagctgagagagcctctccaaaatggagatcgccagcgctgcgccttcggtaggatcggtaccggcgcccagctcgtcgatgagcacaaaggtatttccgtcggcgccgccgataatttcgacaatattcttcatatgagaggaaaatgtactgagactctgttcgatgctctgttcatctccgatatccgcgaaaaccttctgcatgaccgggatctcagagccctcctgcgccgggatatgaagtcccgcctgagtcatcagaatcatcagtcccacggttttcagcgtcaccgtctttccgccggtattgggaccggtgatgacgagagtccggtaattttttcccgcgctgatatcgatcggcaccgctttttccggatcgatgagaggatgacgtcctctgcggatatccagtattcctccggtattgatccgggcggaacatccgttgtaccgaacggaaagacgtcctttggcaaagatgacgtccaactttgtcagatatttctgattatttatcacctgacgcacggattttcccgcttccgccgacaactccgccagaattctgcggatttcatcctgctctttcatctccagttcccggatttcattgttcatatttacgacggcctgcggctcgataaataatgtcgcgccgctggaagacctgtcgtgaataatccccgggaaacgtgatctgttctcctgcttcacgggtatgacgaaacgcccgtctctcatggtcacgatatcgtcctgcagcagtcctttgttagcggaagacgaaatcatcgcatggatccgcatcctgaccgcttctgtctgctgggaaatctttctgcggatatcccggagcagcggactggctccgtccgccatctcatcttcagagaggatacagcgatcgatgtgatcgcagagacgtctctcttcgctgagcatttccgccagtcccgtcaccaccggaaactgatttcctgccagcggtccttcggcgacagtcaccagaagaaaattctttacctgagaagcggtctgcagactggacttaatatccaataactccctcatggacagcactccgcccttttccgcatatctcacgcttcgctttacgtcgcacagtcccccgaaaggaggcgcccctgccgctgaaacgatagccgccgcctcgtctgtctctttcagaagatcacggatgagaaagtcgtccgtcagaggcacaatttctccgacagcctttttagccatcggagagactgcttcctgcgcgagcaggtcttttattttgttaaattctaatactttttctgctttgtcattcataattcactttcgaaaatttaaatttcctgtttcctcagcttatccagttcatttttcagctgaagattttccatttgaatatcgaaaaagctgttttcaagttctttgtattttttcatcagttcatcggcatctgcagattctgcggattgagatgcttttactttctcgagatcctctttcgtgatatcgagttccatctctttttcctccagttcttcccgcgcgttgctcagagcttcttccgcccgtttcagtccggctctcgcctggttcgcctgggatttcgcctgctccatttccgctttcgctctgctgtactccgacttcgcctgaagcagatcggagcgtacgctttcgtaacggcctttcatctcttccagagcggaattagctttgctcagctccacatttttcatattgtagatccgctgcagctcctgaagctgctcgatactgttctgcgcgtcttctttgtactgcttaaaactctgctttgcgtcttcccacatctgaatataatgattggcgtcctttttcagatcagtgatcaccgattccagctctgcagcccggtctttttccgcaaaataatcgtctgcgatattcactgcggtgagcactgccagagatgacacgggaagcgccggcagccccgcggcaagctcatgcatcagagtatccacatgatttgccaccacgacaatctgctctccggagctgtttcccgcgatcgtatattcctgatcatatattttgactgtaactctgctgctgtctcccatgaggtctgcctccttttctttcaaatacagccgcgatagcctgctacatttctctctgaacggcgcccagccggtccctcagcgcttccagaactttcgaatgaacggcgtttacttcttcgtcggtaagtgtcttttccgcatctctgtaagtcagtgcgaatgcggcgctctttttgccttcgcccacctgtctgccgcggtacacgtcgaagagtgccacgtcttcgagaatcttttccccgttttcaaagattacatcctcgatagcgcccaccgtgacgtcttcgcttacgatcagagagatatctctcgtaaccgcaggatacttcggcagcggcttatagacgacgtctgacttcgtatgaagcattatgatggagaacaacagctcgcaggagtaaactctcgtgccaatgccgtagcgctcggaaacgtccggatggatttcgccgatcgttcccaaaagttccccgtcataaatgatgttggcacatctgcccggatgatacatcggcaggtttctctccgcttcgtataccggctgtccgagacccatcagggacatcgtctgatcgatcattcccttgagagcgaaaaagtccgcatcttcaccgtacatgccgatgcacagaccttccgcttccgcgggctgaccgtcgcagttaatcgccacattattgaaaattcttccgatttcaaacagctttacgtctttatttccttttgtataattcttcgcgagaacatccatcatattcggcgtcagcatggttctcatcacactgctgtcatcccccagaggattgatgagttttacaaagtttctctttgacagatccgtctcagagatattcaccttatccacacttctcgggttgacgaaagaataagtcaggatttcactgactcccatagcggtgagaatagttctcgcttttgatctcgcttcttcctgctttgtcaggcgcgccacttcgctgcccttcggcagagaagtcggcatcctatcataaccgaacatacgtgcgacttcttccacgtaatcctcttcgatttccagatcctgacgcaccgtcggaggagtgacggtgatcgtatctccgctgacttcacacttcatttccagactttcaaagatttttaccatatcttctcccggaatatccgttccgagaatgtgattgactctggaaactcttacatccaccggatttgctttctgcgcttcaggatatacgtctaccgtaccgcctgcgatcttgccgcagcccagcagttcgatgagatggcagacccgctccgcagcctcttcgcagagatttgcgtcgattcctttttcatatctggaggaggcttccgttctcagggccagcttcttggaagtgctccggatcgaatccccgttgaaatttgccacttccagaattaccgtcttcgtatcttctgtgatttcagaattgagaccgcccatcactcccgcgatgccgatctgtttttccgcatcgcagatcatcagagcgccctctggcatgattctctccacgccgtccagcgtcgtaaacttatcgccctctttcgccgcttctacgataatctttccgccggcaaccgcggtggcgtcgaaagcgtgaatcggctgaccgtattccatcatgacgaaattggtgatatccacgatattattgatcggacgcatacccgcgtgcatgaggcgtctctgcatccaccaaggggactgctccaccttgatatctgtgattacgtgagctgtatagcgaggacagagatccggcctctttatctccacttccacataatcgcttacatcgcccgccgtttccttcacagaagtatccggatagttcagctctgtgccgaagaccgccgccgcttctctcgccataccgatcatggacagacagtccggacggttcggcgtgatttcaaaatccaccacgtgatctttcagttccagcgcttccgaaatatccgttcccggagtgatactatcatcgagaatccagatgccgtctctgatcagagtattgatcactttatcctcgtaccccatctccgccgcagaacagagcattccctccgactccacgcctctgagcttgcctttcttgattacagtgccgtcgggcagctttcccccgtgaagaataacgggaaccattgccccttcaaagacattcttcgcacccgtgacgatctgaagcgtattctcctgaccggcgtccagcgtacagaccaccagcttgtccgcatcgggatgcttctctattttgaggatttttcctgccacgatcttcgtgaattttgtgccgtaagattccaccgtctcgatattggagccggagagaatcattctgtcgcagaattcatcgacaggcacatcgatgtccgcataatctttaagccaatttatggaaactaacatgaaattctacctctctgtcacatatattaaaacgtcttccgacctccttccgaaagtttcagatccgctttcgaaaaaagattccggccgttccatgttttctattttttgttccggatcccattacttgaactgctttaggaaacgttcgtcgttttcgtagaacagccggatatcatccaccgcgtatttgagcatagcgatacgctccacaccgattccaaatgcgaaacccgtatacctctccgtatctatgcctcctactttaaggacgttcggatgcaccataccgcagccgagaatctcaatccagccgctgcccttacatacgctgcagccttcgcctccgcatttaaaacaggatacatcgacttcggcgctcggttcagtaaacgggaagtgatgcggccggaatttcgtcagtgtatccggaccgaacatctgcctggcgaattcgcccagagtacccttcagatctgccatagtgatcccttcgccgacgacgagaccctccacctgatggaataccggagagtgcgtagcgtccggcgtatcgcaccggtacacgcgtcccggagaaatcaccttcatcggaggttcctttgtgagaagcgttctcgcctgtaccggcgaggtctgcgttctcagaatcgtattgtccgtgatatagaaagtatccgtcagatctctggacggatggttcggacctgcattgagagcgtcgaagttcatgaagacagtttccacttcaggaccttccacgatctcaaaccccatattcataaaaattttagacatctcatcgatcgtctgcgtaatcggatgctttacacccagttcctttatccggcccggttcggtcacatcgatgacttccgcagctaatctcgcctgctttttcttttccttgagctccgtcatcttctcatcgagaaggttctctatttcccctctgacttcattcgctctctttccgacctcttttcgctcttccgcaccgaggcttcccatggaacggagaatttccgtcagctttcccttttttccgagcactttgactctgatctcttcagccatttccggggaagccgcttcgctcagctgctttttcgcttcctccaaaatcgtcataagctgtttttgcatgtatattcctccatctattattatttatccgatatcgttttgctttcgccgccgcagatttgcggatgctcccgctctgccgtcacctgagcctctgcctcaccgattcgtacatgatcacagaagccgccgtccctgcgttcagagattcgatggaaccctccatcggaatattgatcagcagatcggcgccctgcagaaacacatcgcaggcgccgttggcctcattgcctataatcagcgccgtagaacgtgaaatatcagcgtcgaaataatttatttccgctctcggcgaggtacacaccgtctgaaagccgtggctgccgagaagcgagagaacctcccgcggctcatccccataggcgaacttcatccgataaagagaacccgcagccgcccggacagtcttcggggaaaaaagatctgccgttcccttcatgacgagaatcctgcgaaacccggcagcatccgccgtccggatgatcgttcccagatttccgggatcctgcagacggtcgagaacaaggatgtttgacggatctccttcaaagaaacgcccgacatgacagtcgggctgtttcaccgccgccgcgattccctgcggcgtctccgtatttacggtacggtcaaaaagaactctggaaagaagaaaaagatcgcatccctgttcggtcaggcgctctgtcaacgcccttccttcggcctcttcggcaaagtcctcccggataaaaacactgtcgagttccgctccgtttttcagtgcttcttcgatcagattgattccttctgcaacgtatcgatttgtcttctctctgtattttcttcgatagagcctggagaagcttttcagcttctcgttctgcaacgatgtgatgcgctgtaacataaacattccctaagatatattgagacaaaaagccggctcatcaccggcttttctactttccctaaaatttattgtttaccgctttcatcgcgttctttaaaaattcaggaacttcaatgtcatcgtctgcaggcagttccggctgagcttcgccgactgtttcggcagccgcttcctccaccttcaccgcagaagcggacggagacgcatgatgaacggaagtctccggttcctgcggagcttcttctgcagcgtcgtcatcgtcgaagcctgtagcgattactgtgatccgtatttcatcttcgagatcttccttaatggatgctccgaagatgatattcgcgtctctggcagcggccttctcgatgagatctgcggcctcgtttgcctcgagcattcccaagtcgtatccgcccataatattgagcagaatcgcctttgcaccgtcgatcgaagtctccaaaagcgggcttccgatcgcttccttgaccgcatcgataacgcggttttcgccctttccgacgccgacgcccatatgcgcgatgcctctgtcactcatgacagtcttgacgtccgcaaaatccagattgatgacgccggattcggcgatcagatcggtaatgccctggacgccctgtctcagaacatcatccgccatgctgaacgcttcctgcatcgtggtattcttttctgaaatctgcagtaatttgtcgttgggaacgacaacgagagaatccacatattttttcagatactcgattccgagttctgcatggtctcttcttctctttccttcaaaggtaaacggcttcgtcacaacacccaccgtaaggatgccgctttctttggcagcttttgcgatgacgggagccgcaccggttccggtgccgccgcccatgccggctgtgataaaaaccatatccacgccgtcgaaatatttcgtaatctcttcgaggttttcttcggctgctttcatgcctgtctcaggatttgctccggcaccgagtcctctggtaagtttttcgccgatctggaccttagtctcggctaccgatcggttcagcgcctgcttgtccgtatttacaacgatataggaaactcccttcagtccggcctcgatcatgcgatttacggcgtttccgccgcctccgccgactcctactaccttgatctgggcattatcttcaacattcacttcaaattgtaacattatgtagtaacctcctgttacttagatacaaaatattttatcataacactatacttatcgcaacaactaccatcaaaaatgaatcctctgtttttcctgtctgccgaaaaacggcgaaagtgcgcggaacgactgcagaacagccgcccgatcgttcttgcggctctaacgaatcaccggattaaaggacgcatatccgtcgccgctgacattgatcaccccgcggctcacctgtttctgtcccaagtcgtagatcgccgctttcagttcctccgtattttccgcgatattgatacattccccctgacacagcagtgtgtccgtaatgttcgccttgaccgaagtggctgtgagcatctcgatccgcttgaaatacagtcccgattcgttcaccttatttatcatattgaggagcgctgtaaaatcgcacccgtcgtttaccgcgggaatttcgccgatctcatattttgaaacgctgacccctgtgagtacggtcgcccccctcacatcctccgcataatcgatggctctgccctcctcgtccaggattacatatttcgatttatatttcaccgctaaagtcggaattttttcttctatttttataacataagtatccggaatcttcctgtcgattcctgccgaagcgatatacgcattttttttcagcttcgccttcacttttctgctgctgatactgaagagattgtccccttcttttacgccggtcatctcgataatctcaccgtcgctcatcagctgattgccctccacctcgattaccgaaatatcgaaaagaggcgagcgcagcagcaggacaaaagctgccgccgcggccagaatgagcgccagccgcagcatataatgttttttccttcgctttttttttctttttttcttcggttccggagcattcccgaattccgcatccccgccgccggattcaaaatcttcctccgcgtcaaagggtatatactgtgtattgtagtcggtatccatgccgccgtatatatctgtcgatgtccggaagctgtcgttttctctgtcgttattcatttcagacctctttaacacgtgctatatccgctcccaaatctctgagtgtcatttctaatttatcataccctctgtcgatgaggcaaacattttcaattacagtatcgccttccgccgcaagtccggcgatgacaagagccgctccccctctcagttcttccgcttttacccgcgcgccgtgcagcttttccactccgttgacgcaggccttgttttccgaaagggtgatatcagcgcccataaggcgcagaggcttcaataccttaaaccggttttcaaagatattttcctctatcatgctgactcccgaagccgccgtcatcgccgccagaaactgggactgaagatcggtgggaaatccgggataaggttccgtttcaatttttccggatgcggacagtctgggcggtgcgctgaccccgattccatccggctgaatatcgatttttacgccgcttcgtctgatgcattgaagaaaggattccatgctcgccgacggcgcgtttttcacaaagatttctcctcccgtgactgccgccgccaaaatcagcgtcccagcttcaatccggtctgacatgacagtccattccgctccgtgaagctgtttctttccggagataataatcacagatgtccccgctccgctgatttccgctcccatcgcattcaaaaaatcctgaagttctatgatctccggttcccgcgccgcattgcggatcacggtaaccccttctgccatcgcagccgccatcataatattttccgtcgctcccacacttggaaacggcagtctcaccgatgcgccgcggagctgtttgaccgtgcagacgatttttccatccttttcctcgatctccgctcccattctgcgcaaagcctccagatgaatgtccacaggccgtttaccgatgtcgcagccgccgggaaatcccatatgaaccgaacgcttcagcgccagcataggtcccagaagaaatacggaagagcgcagctctctcaccagatcctcgtgaagaaaagcttcttccgatattccgggacagactcgcactcgtcccccgttgaaatccgtccggcaacccgccgcttcgagaatccccagcatagcgtatacgtccgacagagccggacaattgtgcagaaccgtctcgccgcttcccataatagaagctgccagcagcggcagcaccgcatttttggcgccagccgtattcaccgtaccgctgagccttctgccgcctgatatatgatatgtgtccaagacagcacctcctctgttcttcagtatatgcagaagaagtgctcactgtgcgcctatattcagattcccatgatgtcgcacatgacatcggccgcatccgtacgtccgagatttctcgaattgttctccatacgttccacccgggctctgtcgttcatcagtttcccgatcagctcggaaatcattcccggcttgagatccttctcctcgatgagaatcgatgctgcacgatccgacgccactttggcattgaaaaactggtgattatttgtcacataaggcgacggaatcatcacggacgctctgccgcaggcagcgatctccgatactgtgagcgccccggatctggtgatcgccagattacaggcgctgagatatgccggcatattgtcgatatatttcagataagtgaccctgctttccgcgggatcagcattctccacgatctcatcgtaataacgcttgcctgtgacgaaaaaaatgcgcagtccctttctgtctttcagttcctccgcagcgattttcatctcatcgtttattttttttgctcccaggcttcctccgaaactcagaacgacaaaatcctccggatcgatccccaggagtctccgcgcctcctcccgtgacgtctcggcaaacgattttctgaccggatttcccaccaccacaggtctgtccttcgtcttaaaataaccggccgcatcttcaaaagcgataaatacgcgatttacttttctgctcagaagcttattagtcagacccgggaaagcgttctgctcatggatataagtccgaatccccatagaagccgcagtgcggaccatcggtccgcatacgtaaccgccggttccgatcaccagatcaggctgaaattccctgatgacagctctcgcctcattcgttccttttttcagatctcttaccgtctgaacatttttccagagttttttgcggttgagtccgctgacggtaataaacttcagctcataaccgtaccggggaacgatatctttttccatgccgtgattcgttcccacaaaaatgatctccgcatctgtatctcttctctttatctcttctgctattgcgatggccggataaatatggccgcccgtgcctccgcctgtcataatcactttcataattcgctctccattattttatcgaatgtcttgaaatgtttaacattacccccatgctgcccataaataccagcagtgagtttcctccccagctgacgaaaggaagtgaaatccccgtcggcggcatgagagatgttacgatcatcacgttgagcaccacctgaacgcccagcataattgtaatgcccgatgccaggagtgtaccgaacatatccggggcattgagggcgatatgaatgcatctccagatcagaaggagataaacgatgagaagtattaacagaccgataaatcccagctcttccccgatgatggcgaggataaaatcgttctgcggttccggaaggtaaagcgtcttctgcatgctctttcccaggcccacgccggtcagtccgccggaacccagagccagaagagactgaactacctgatatcccgtcccctgcggatcggcaaacggatcggtaaaactcagaatacgcttcatacgatagccgctgtcgtccgtcacaatcagcgctgcgaaagccgctaccgccaggccgaaagctccgcctacataagcccagctcataccggcgataaacatcatgccgaaaacgatgatgatcagcgtagccgccgtggtcgtgctgggctgcatagcgatcagaacgcccgccacgcccgctaccagaagcggcggcagaacacctcttacaaaactccgaatcgaatgacgcgggtgactgagccaggccgcgacaaacaaaatacaggccggcttcgccagttcccccggcatgatcgtagcgccgcccacaccgatccatcgggtagcgttattgatcgtcactccgagaggagtgaataccagcagcagcagcacgataacgacgcccagtacgggaatggccatcttctgggttttatgataatcgaaaacagccataaacatcatggcggcagttccgaccacagcccatatgatatcccggatcagatagtaatacggcgtaccttccttgctgatcgcatagtagtagctggcgctgaataccatgatcacgccgaaaattaccagcatcatgacgagagcagtcagagcaaaatctcccggcttaagcgggatgctttttcttcggctgctcttcaaacgctccggcttctgttcggtcccgttattttccgatgttttcccggcctttccggccgacgcaagtattctgcgcttcatttctattcctccgaacgccggtctgataccggctcatctgtctctgttctcctgttctgccgtcagagttctctgacacattttttaaaatcatctccccggtcttcaaagttagcgtatctgtcccagctggcgcaggcaggagacaggagaaccgtatcccctggagccgcaagtgcaaaggcaacgcggacagcctgctgcatatcagatacggtatggatcttcgaaaatcccgctttttcagcagcttctctgatcttcggcgcggtgtcccccatcagaaccagctctttgacatggccgtcaaaattcccggtcagctcgccgtattccgcacccttatcataccctccggcgatgagaatgatatttttaaaagaaagaaccgccttcaccgcagcgtccggattcgttcccttggaatcattgacgaaaaaaacgccgtttttttcaccgcagcgttcgatccggtgagccacgccccgaaaagtccgaagagtccgcgcgatagactccgcgccgattccggcgaagtatgccatcgctgcagccgccagagcattctccaaattatgcggtcccgggatcagaagctctttgacgccgcagatttcaacgacggaatttccgtcagcgacgacgatgcttccgtcttttacgaatgccccgaatttcagctcttttcttctgctgaaaggcacgggcacggcacggcataaagataccacgccggcgcagatctcatcatctgcattatagataaaatattcgttctcaccctgattagcgaaaattttcgccttggccagagtgtaattttccatcgttttatgccggtcgagatgatccggcgtcacattgagcagtgcagataccagcggccggaaattccttgtcgtctccagctgaaagctgctgcattccgctaccatataagtatcgtcgtcgctgtcgagcgctttcgacatgaccgcaacaccgatgttgccgacgacttctgtcttttttcctgcgtttttaaaaatttcccccaccagagtcgtcgtggtggtcttcccgtttgtaccggtgatagcgatatactttccttttccaaagcgataagccagctccagctcaccggtgatctcagcgccggctctttccgcttcccgtacgaaatccgtatccacaggcactcccggactcagcaccaccatgtcaaaattctcgacagaatccggcctctcaccgaaactgcaatgccacttatttttttgcgcccaggaagctttcgcgtcgctgtaatggctgtcgaacacgcttatatccgctttcagccgtttgagcgcctccgctgctgcgattccggattttccgagtcccacgatgagcgctctgccgttttccgtattctcgtttcgattttcgaccatgtgatttgttcctcttttccgctgccgtgttccgatgtttcgctatttaaattttacagcataaatgtcgataatatgcagagtaaaagcgtgatcgtccagaatacgattacgacttttgtctctttccagccgcccagctcgaagtgatgatgaagcggcgccatgcgaaaaatccgtttgccccgcgtcttgaagctgaccacctgaatgatatcggaaaccacctccgccacgaaaatacctcccgcgaccggaagaatcaattcgatattcatcataaccgctgcggccgccaacgctcctcccagagccaaagatccggtatctcccatgaagactttcgccggataacggttaaacaacagaaaaccgaaacacgctcccgctatggccgcgctgaaaatgctgctgctggtatagccgattcccgcgccggtaatcgccagaaacagcgccgtaatcgcagtgcatccgccggcgagaccgtcaagtccgtcggtaagattgacggcattcaccatagctaccagaacaaaagccacaaacgggatataaaaccatccgagatcgatatattccttcacgacaggtacataaatgctcgtcccgaaggaggacactttcgactggtataccgccagaatgacagcgatgacaatctgaaagatcagtttctgaagagcggtcagaccgagatttctcttctttaccacctttataaaatcatcgcagaacccgatgagaccacacagtacaaaggataccagcagaatgcccatttccgaccccacaccctgacgaatcgtcatggaaatacaggtgatgactaccgccaggataatcatcagcccgcccatcgtcggagttccagctttcgtctgatgcgctttcggtccgtcctctcgtatgctctgtcccgctttgatccttctcagcaccgggatgaataccggaccgagaatcgccgtaataacaaatgcgaccaagatcgtaatcaaaatactataatccattccactctcctgtctcagtcaggaattcggccactctgtccatagccatcccatgggagcccttcacgagcaccgcgtcgcctttcctgattatctcatgtgctcttttcataaaatcctgtgaattttcaaaatagaagacccggtctgcgaccatcttctccgccgcagccgcggcgatatgacgggcatgctgtcccacagccacgagaagatccacgccgctctccgccgcataacatccgatacttcggtgatattcatccgaggcatcccccaactcaaacatgtctgcgagaaccgccactcttcgccgggcttttcgctctgtcagcacgtccagagccgctctgacggaatccgggctggcgttgtaagtatcattgatcacctgaattccatgggtttccgtcacattcagacgtactgcattgctctcgattccggccaaagcccgggctgactctttcagcgagataccgtattcgagacccgccgcagccgccagcgccgcgttataagcattatgaatgccgggcagaggaaggacaaaccggcaggactcttctttatgagagagatgaaattcgattcctttctctccgaggctgacgatttccgaaatccttatccccgcattcccgtccgtatcctttcccgccggaattttccggaaggaaacgtttctctccttcaatgcggaaagtttgtcgttatccgcattatagaccagcgctgacgagccgtccataaaatcagtgatttccattttcgctttcattatgttttcgcggcttcccagatttccgatatgagaagttccgatattcgtaaccgctgccgtctgaggacggacgatatccgccaggagatgaatttccccgctgtggttcatccccatctcaaaaatccccgcctccgtctcctcttccatgcgaaatgcggtgagaggaacgccgatatgattattgaaattttcaaagttacagacggtccggtatctggaagaaaagatccggtacatcatatccttcgtggttgttttcccgacgcttccggtgaccgccacccggatcagatccaggccggcgatataattttttgccatcatctgcatcgccttcaacgtatcttccgcaaaaatcaccgatgcgtcagtatgattttcccgcaagtgaagcgccattgcctccgaggacagcagaaatatcctgcacccgttagcatatgccgcgggtgcgaaatcgttcccgtcatttttctgccccggaagtccgacaaagatgctcctctcccctgtcaatctggaatcccgttccactgtcacagcaatattgtccgcaggaccgcagaacaatacgccgcccgcatatgacgccgcttccgcggctgtgatttctctcatgatcagatctcctgttcgataatctgctgcgcggtctctctgtcatcgaaatgctgctttacagtcccgataatctgataatcttcgtgaccttttcctgcgatgatgatcacgtcccccggctgataggcctttatcgcttctttgatcgcctttctccggtcttcgatgacaatgtattcgcagccggtagactcgactcccggaacgatgtcgtccagaattgcgaaaggactttccgtacgcgggttatcgctggtgactacacagtaatcggaattcttacccgcgatctctcccatcaccggccgctttgtgcgatctctgtctccgccgcatccaaacacggtgatgattctcttttctgcgaattcgcgggcagtcttcagaacattttttaaagcatccggcgtatgagcgtagtccacgatcaccgggatccccttgctgttcggcacgctttcaaaacgtccggctacccccctggttttttcgataccgccctttaccgcttcccacgggattcctgcttccagagccgcacccgcggcgccgaccgcattttccaccgaaaaggttcccggcgtgttgatccgaagttttcccagactttcaccgtcacggaaaatctccgctctggtaccgctgacggatttttcccgcaccagcgcccggtaatccgcattttcgtcttccgccgcacaggactttaccggccttccttcagctttcagctcatcgaaaagacgtttcccgtaaggatcgtcgatattgatgacactgcactttgacgtctgcagaaacagttttttcttggcattgtaataatcttcaaaatctttgtgaaaatccatatgatccggcgtgagattggtaaatacgctgtaatcgaaagagatatcctctgcgcgggaaagagccagagagtgagaagagacttccatcgcacagatatgcgtatcatatttctgatgcatctccgcaaacatacgctgcagttcaaaggattccggggtcgtattgatcgattcgaaacgctgtcctccgtatacataagcgatagtacccagtacgccgcactcttttccccactcgtccgcaatcgccttcatcaggtacgtaatcgtcgttttgccgtttgtcccggtcacgccgaataccagcatctgatccgacggacggccgaagaaattggcggaaacagccgatagcgcctttcttccatccttcgtaaggatcacgggaattccgatatccggcagcatctcctctgcgacgatgaccgcggctcccgccttctgagccgccgcggcaaaagcgtggccatcgctctgaaaacctctgacacagacaaagagatctcccggctgcgtttttctcgagtcgtaactcacaccggaaatttcaatattttcctgtccgttctcacatgtgatatccgtatttttcaacaattctaaaagtttcatatcatttcacctcgatttcggaatctgatttcctctgctccccttcgaaaaagttccttttgcaaaaaccggaagaaccgccgtctctgctccgccgcagttttgctgacggccgcgcggttactgactgtacagacaaacggagtttcctacggtgatctgatctcctgctttcggatactgatctataacctcgaactcttcatttcccgaagggcaggccaccgctgtcagtccgagcttccgcagagtctccgcggcggaaatgtaactcgctccaaccagatccggcacagtcaccttttccgcaccggcttccggagcctcgccgtccgcatagatcggttctactttgagatatttcaatgtattggtcagaatcgattttactcccggtccagcagtcaggtttccgtaatgtacgcctttcggagagtcaacgatgacgagaaccgcaacctgaggatcgtccatcggcgccattgcgaagaaggaggaatacgtatattccgtatacttgccgtctaccgctttctgtgccgtacccgtcttgccgccgacgcggtatcccggcagataagccgctttaccgccgccgtcttttaccacgccctccatcatcatgcagatctcactggcggtctgttccgacgctacttggcgaactacggaaggttcaaattcttcaatagtattgccatcgtcgtccaccagttctttcaccagacgcggctgcatcatctttccatcatttccgaaagaactcagcgccgttatcagctgaatcggagtacaagcgatgccctggccgtaggaaatagtggccagccccaccggaccggcggactgtttcgactgcagaatggacgtagcctcgcccggataatcgattccggtcgtaccggtaaatccgtaactgtccagatgctcataaaatttatcgatgccgattctctgtgacagagttacaaataccgggttgcacgaattttcaacgcccttcgccagattttccgcaccgtgagaggccggatatttatggcacttcagcttctgacccgccacgttcagccagccgctgcagtaaaagctgtcattgacactggtaagcccttcatccagcgcgatggctgtcgttataagtttgaacggtgaaccgggctcatatgtatcgttgatcaacggatttctccacatattgttccagtattcgactttctccgtatcgctgagcccctccagcgcctcctgttcggtttcgagaagaggagttctcggatcattcagatcgaaatcaggataggaagccatcccgagaatatacccggtcttcggatccatgacaatcgccatggccctgtctgcatcggtatcgagagtaacctgctccagtgcgttttccacataatgctgaataacctcgtcgatagtcatcacgatattgaatccgttttccgccggataatacttttccacgccgttggtcagattccgtcctgaagcgtcggcgtttttgatccatcgtccgtcggttccgttgagatactgatcgtagtaaagctcgattccggacataccgttgttatcgtcatttgtactgccgatcacatgcgaagcgaatgctcccatcggataataccgctttaccgtctccgcgatctgaaggcccgtgattcggctctcatccccgcctttggccatctcttcgcggatcttcgctactttttcgtcgtccacatactttttcagtttctgcagcgatgtatcgccggtgataatctcatagacctcatcttccgtcatgtctccgagaatatcggaaagaaccgaggccatctctctggcataacccgatttttctttttccgccgctttcacttctgacggacgcacccagacagtgctcatcgactgattgatcgccagcggtttattgttcgtatcatatatattaccccgcttggctgtaatcggaacgtctctggtctgctgtctgagagcctgagatgaataatcatccgctttgataatctggatttgtcccagacggagagccagaacgacaaacatgataatgatcacggagaaaaagaaaacgagtctctttttgctcgtcatcgcggagatttttttttgcttcgccatattccatacctctgctgtttttcttaaataaagtataagacgcccgatgttctgctgtcatgaggcgccttaaataatcgctatattactttatgcggcaactttaccgattatgttgctgcgtcttcaggaagcgacaggtcccgccagcagatgcttcgccgcagccgaaacgttcttctccgccgctgccgccgtacccttctgtgacagggacaattctgctatatacgattcgacctccgcgctgcccaccagtgtgttcgtatagacatactgctcgctggtcggataaatcataccgagatttgtctcggcatattcctctacatagtccagcccgctggaagaattcagctgaacgtgcagattgtcgatgtccccttcgagcacgctgatctcctgattcagcgaattgatgctgtaattgatgctcgaagcgcacgcctgcaaaaatataaccgctatgcagcagatcccaatcacagcgatcaccagaagaatgtgccctttttcctttgcagtgactcggatcacgggctccttgacaggttcacgctttgggcgctctttttccggctccagatcgataccgtattttacatagctttcctgatatttatgccattcatcagctgctatcattttacactacccccatcattcattcctacttctctcaacaaaaatttcaatatatcatatcctttccgccacccggagcttcgcgctgcgggaacgcggattgttttcgatttcttctgccgacggaagaatcggttttcctgtaatctttcgtatctcgggttttttgccgcatacgcacggaagatttttgggacaggtacagggatttgcccggtaggcaaatttttctttcacgatgcggtcctccagagaatgaaacgtgatgatacacagacgccccttcggcgccagcacatcgatgaaggaatccaccgcttctttcagctgtcccagctcatcgttgacttcgatgcggacagcctgaaacgttctcttcgccggatgaggtccttctcttctcgccgccgccggcaccgccgccttgatcacgtccaccagctgatccgtcgtctcgataggatgttcttccctggcttttacgataaaatcgctgatccgggaggcccatttttcctcaccataagagctgatgatccgcctgagctcttttttatcgtatttattgatcacatcataagcggaaaatggctcctctgcatccatacgcatgtccagcggagcggactgcatataagaaaatccccgttctctgacatcgagctgataggaagatacgccgagatccagcaatcccccgtcgatacgcccgataccgtattgttcaataacccttttgacagcggaataattgtcgtgcacgaaaatcttcctgcatgagaattccctgagccgctcctgtgcggcgcgcagtgcgtctttgtcgcggtcgatgccgatgagaagtccgttttcattcagctttccgcagattccggccgcatggcctccgcctcccaacgtcccgtctacgtaaactccgtcgggacggatattcagattgtcaatcgcttcctcataaagcacagatacatgtgaaaattccatatttaaattcccagaccttccattttttccgcgatcaactcactgtccagctcagggctctcattatagctttcccaatccgccttgctccagatttccacacggctgtccacaccgatggataccacttctttatcgatatgcgcgtgtctgcggagatcggatgaaatattgagcctgccctgtttgtccatttcacattccaccgcatttgcgaagaaataacgtgtgaaagctctgccctctttactcgtcagaggcactgccttcagcttatcccgaaaattgacccattcgctcatcggaaacaaaaaaagacaattatccagtcccttcgtcaaaacaaacccctcgttcagctcttcacggaacttagacggtataatgattctcccctttgaatctatattgtgataataagttccgctgaacatctgcttttctccgattcagggcggcccttttccgccggctttcccgttttatccgccgatctcgtcctgtctgcactctgtcatcctccgcagaccaacggatccggcaaaagcggcaaaaaaagattcgccttctccactatcgattttatacatccactatactccatttcaaaccacttttcaataaccgctccccaccaaaaggtatttttacatatatttgcgcaaaaatataatccagccgtttttcaaacgcagcagatcatacaatatgtggtattttatcgtcatttatacccatatattgtctacatttggtatttcgacaaattccatttcacccatatttttccgctgttttttcgatatttttccgctgttttcaggtcattttctcgctttttgtgtccctgcactccactcttactcggccggagaactccacccgcactccaccggaatcggataatgcaaaaatcctccacctgagaaaacagcgaacaaacacccgcggaaaagaaaaaagcggaaatgacgaaatcaaacggccaacgccggcaaacaccggagcattttcgcataaaactctccggcggtccgcaggaacaaaccgccggaagtttttcagattcctatttccgcatgccgtcctcaagaggacgttttacaaattactttctctgaaaacagacagataaaacgattaaaaaacatcctttcctgtattccagaccggaacagagcgccgatcggcccgcagcatcaaaaatacgaatgttttctggcgagatgaagaaatacccattacccatataagaaatgcccatataaaaaaccctcaaagcggaacactgtccgctttgagggtaaaatacctggtatcccgtaggggagtcgaacccctgttgctaccgtgagagggtagagtcttgaccacttgaccaacgggacataataactcataacagaattattatatcccggctcattctatatgtcaatataatacagaccatttctcacaaaatctgtggaaagaatcctttcactgcaaaaaagatcaccggtactaacagagacggcaataaattcatcgttttaaatgctttcagatggagaatcgaaagcccggagcagagaatcagaaagccgcccacaagagaaatttctgtcatcatagcatccgacataaaactctgcagatacagagctgccagataaatacctccctgccacagaaaaagcacgacggccgacagggcgatgccgattccgtaagtagaagccagaaccatggaagtgaccagatccagagttccgttggtaaacagaaacgtattatttccgctgacagcactttcgatcggaccaagaatcgacaaggttccgatacaaaacagcagaatcgccgtggaaagtccctggcccagattctggtttccggattttccggtgagccggttgaaagcgccgtcgatatccagctttgttccgatcagacttcccagtgcgagactgatgataaacagcaccggatactcgctgtccggcatatttttagcaatggcgttgatgcctacccctgcggcggccaaccccatcgcgtcaaacaacaccgcccggtacttctctttcagtcctctgcggaaaaaactgccggctgcgcttcccaccaggatcatggcggtattgtagatcgtaccgatcatcgaatcacccccgctttacacattaaagaggaagtgaatcacatcgccgtcttttacgatatattcttttccttcagagcgaatcagccctttctctctcgcggcgcccagatttcctccgcactcgaccaactgatcgtaaccgatcgtctccgcccggataaagcccttctcaaaatcagaatgtatcttccctgccgcctgcggcgccttcgttccctttgttatcgtccaggctctgacttccggttccccggcggtcaggtaggaaatcagattcagcagagaataagaggattttatcagcttatccagtccggattcttcgattcccaggtctttcaaaaattcctctttctcctcgccatccagttccgcgatttccgcttccagctgcgcggagacgacgatcacttcggacccctcactgtctgcaaaccggcgtacctgctccacatattcgttattttccgccgccgcgtcatcctcggatacgttggctacatatataatcggcttataagagaggagattgagagacttgacatagtccttctcctcttcttccagctccagtgttctcgcggacagaccctgtgccagcgtatcgctgatacggttcagcagatccagatctttctgcaggctcttatcccccttgagatttttcgtcgtacgctgaatcgccttctcgatcatttccatatcggataaaatcagctccatattgatggtctcgatatcggaaagaggatcgatctttccgtccacatgaacgacattgggatcctcaaaacagcggactacgtgaacgattgccgcgacctcgcggatgtgtccgagaaacttattgcccagaccctctcctttcgacgcgccctttactaaacccgcgatgtcgtaaaactcgatcgtcgtataaatcgttttcttcgccttataaatatcagtcagaacctgaagacgttcatccggaacggtgaccacgcccacattgggctcgatagtacagaagggataatttgctgcctctgcgcccgccttcgtaatcgcgttaaaaagtgtactctttcccacattgggaagtccgacaatacctaatttcatattttcttcctcatacagccgcgcagcccggcgcagccctctcctttccttctttgaaatctgtttccgcgcacttcttccctcatttccgcaggaagagagcactcactctacatccgcagtccggcgcagctttcttttccgattcagaacgatcagcgctgcgagacagatgacaaaagccgtaagactgacaaactgcgctgttttaaatggaaatatcaaaaaatttcctatatgaattacaccttccacctgcgtcggatcatatcccgcctccatcagcggatacaccagttccttcggccctgtgagaagactgtccgtacgcagctgttccacaaagaaacgttcgagggaatagagaacaccgtacagcagcgccacctggcctttaaatttcctccgcttgtccacagcggaaagcacaaaaaacagaaacagacaccagacggactcatacagaaaagtaggatgcactttctgtccgtcgatcagaatcccccagggaagatctgtcgcagaaccgtgcgcctcttgattaaaataatttccccagcgcccgacagcctgcgccagagcgatacacggaaaagcgaagtccagaacatccataggatgacattttttctttctgcacacgaggatcgccgccagcgatccgaaaatcaaaccgccgtgaatcgccagtccgccggcccgtatattaatcacgtcaaaaagactgtcataatactccagattaaataagacataccacaatctcgccccgacgattcccactggcaccgatacgagaatgatatccagagcgtcgtcagagttgattccatgcgccggcgcccgcctcagaccgataaatccggccagcagaatccccgtacagatcagcaccgcataccagcggatatccagtccgaaaacggaaaaagccaccgggtcaggtgtaaaactcatatatactcgcctcctgataatgtgttaaaatcatgaatgacttgtttcccgtttccgcgcttcaggaatatcatttctatcccggccgtaccggaaagaagtcataacattaattattgtaccacaagcgctaaactctgtctgcattttttccggcgcggctccaacccgccgccggatccctgacagaagaagttctctgttcccgcgccgttttaccgccggaacccccggcgtgacagaagatatctccatcctacacttttaaagacacaggagccgatctatgattttaaaattaatcgcagggccgctgatcggaatgatcatcggttatttcacaaactggctggccgtaaaaatgctcttccgcccccgccgggcgaaatacatcgcaggacgacgtctcccttttacgccgggcgtcattccccgcgggaaggaacgcatcgcagaatctatgcgggatatcatcaacgaccagcttctgacagaggaagccgtgaagcagcacctcgcctccgaggagatcgccggctctatacgccgggcggtaagggcatctgtgaaagaccttttttcagacagccggacatggaaacaatatctctccggcgccgccggtgaagaacgctttgaaaaaatttcccggcagagcgaagatctcctgacagaaaaaatctttcataaaatacaggacatgcatccgggaaaaatcgccgcagatatagtctccgaaaagatagacgccgcgctcgcagattcgtttttaggaaaaatgttcggcggctctgtgacggcaaatctgtctcaggcggtggaaaagactgtgaacgattacgtccgcgaaaacggccgcgagatcattcataatctgatcctcgaggaaaaggaaaaactgctgaacaaaacgatcagcgaaagtgccgcagcactggagcaggcgggaatttccatcgaaactcggattcttaaattctatacggagttcgccgtggaaaaatccggcgctctcctgcgcagactgaatatcggaagtatcgcggaacaggccatccgggatatgaacagtgaacagttagaacttctggtattttccgccatgaaaaccgaactgaaatccgtcgtcaatctcggcgcgctgatcggctttctcctgggtctgctcaatcttctgatctatgcggtctgacgtctttctattccgggagtaataggtcatcatgcaaagagtc

SEQ ID NO: 2587 - DNA, 32759 bp, Unknown
  16S sequences of unknown bacteria
agccgaaaggacttaaagcctgcctacacctgcggaacataccaccgacgcggtataaaaggctgtacaagccaccacatctgtgtagaaaagctcgatgaactgctcaaaatctatgtggaaaagctgatggaaaattccgcgtccatgatagatgagctgaaccgcgaccttgccaaggagaacgacaatattgccgaaactgagcaatccgccgaccaccttgccgagatactggacgacctcatggaagaaatgcgtattaccaaacgacagcgtatccgcgaaatcatgaaaaagtcggaacaggaagagatgattgaagcgacatacgatgaaatggaagcggaactgcaaaagaaaatcgacgggctgaaccaccaaatcgacatcttatccgacaaacggaacacctatattcgagtcaaccgcgccgcaaagactgctctggaggtgttcgacgacattcttcacaaggacaagctcgaacgcaacgatttagagctgctcattgaccggattctggtttacgaagaccacctcgaaatcaagctgcaagcggacattgattcactgctgcactgcggaacgatagaggaatgcagaaaggagatttccgcggcaaattttaattccggcacgggaaacatcaaaaatacaataagccagtcctcaaaaaaccacggggacaaggttttccgtgtcaatgttatcagtaacggcgacccgctggagatatacacagaccgcgaaggggaagtcatattcaagaaatactcgcccatcggagagctgtcttcctttgccgcgcagtatgccgagacgctttacaagacctgcaatctcgaagttgtgatatgcgacagagacgctgttattgcctgcgcgggtgtgccgaagagagagtacatcgacaaaaagctcagcgaagaagccgaaaacgccatcgagacgcgacagctttactcatcagcagctggtgacggattctctctcatagacggcggcgctcctgtcggttgtcttatgccgattatcaccgagggagacatagcaggctgcgttgcgtcaatccacctctccgacagcggcagacttgagcctgagcttgaggcaaagctgattcagaccgcggcaggattcttaggcaagcagctcgaaagctgaacactaaagctatcttccttgcctcgcaagcagctcgaaagctgaaatttacagttatcttcctctccttgcaaaacgaaaaaaatacaccgaagtctcactgcaaggtaagattccggtgttttttctattcagttaaatcaaagccagccgagatagccgagccagtttttcatgagtcctgcccattgaccgacgtgcggtgcttttttggcaaatcccataccgtgaggtccgtcggggaacacatgaagctcgtggtggattccgtgacggcggagcgcacttgcataaaggtagctgttaattacgttaacgcaatcatcttctgatgtgtgccatataaatgcggtaggagttgtgtcgcttacaagaaggtcgggcgaatactttgcgtagtctttatcatcgccgcaaaggttttcgtaacttccgacgtgcgcaacatttgtctcatccggcatatggataacaggatagcacagtattgtagcgttcggcacaggcgaaatcttatcgatgtcgtcttccccctcgaaatctatcgcgtcggtgtatgtcgaagtgagagccgcaagatgtccgccggcggatgaacccattatcgcaaccttatcggggtctattccgaacttttccgcgtttgctctgacatagcgcactgctcttctcgcgtcaaggagaggaagcggaaaatgatggtgcggcgcaacacggtattcgcagacaaaggcgtccattccaaggtaattgaaatattctgcaaacgcatttccctcgtgtcccgacgctctgaaacaatatccgccgcccgggagaatcactacagtggatttagtagttttttccgctgccgggaaatacttcagcactggttcttcattgcacgttccgggagttttatcccacaattttaatacttccatgatgtcgctccttatttacttatataaattactcttcttcgtcggatgtaacaaccgtgataccaagctcttcaagtgccttcgggtcagccggtgcggggcattttgagagaagctcggacgcattctgtaccttcgggaatgcaacaacgtctctgagattatcgctgccggtcatgagcattgcaagtctgtccagaccgagggcggcgcctccatgcggcggagctccgtacttatacgcgtcaacaaggaagccgaactttctgtcgatttcttcctctgtaagtccgagacggcggaacatatgctgctgaagctcggggtcggtgattctaatcgagccggaggaaatttcgataccgttcaggacgaggtcgtagcactttgctcttacctttccggggtcgctgtctatatattcaaggcattcgtcaagcggcattgtgaagggatggtgcatagcgagccatgttccgctctcttcatcccactcgaagaacgggaattccgtaatccagaggaagttgtaacggtcggggataatgccgagctgctttgccatcatctgtctgagcgcgccgagagtgggaagagttacgctgtccttgtccgcaacgataagagcaacgtctcccttttcacagccgattttagccatgatagcttcaagctctccctcagccatgaacttggagaatgagcagttcggtacgtcttcaacatatctgatgtaagcaagaccctttgcgccgattccctttgcgtgagccgtgagcttatctatttccttacgggtgtaaacatgagccgcgttctttgcaactatcgctctgacactgccgcctgcctgaaccgcgccggagaatacggagaatccgctgtccttaacgaggtcggatatatcctgaatctccatgccgtatcttgtatcgggcttgtcggagccgtagcgttccatagcttctttatatgtgagtctcggaagcggaagcgggatatcaacattaagaatttctttgaacagacgcgcgacgtaaccctcgttcatggacatgatatcctcttcgtcaacgaacgacatttcgaggtctatctgggtgaattcgggctgacggtctgctctgaggtcctcgtcgcggaagcatcttgcaagctggatatatctgtcaaatccggatagcatgagaagctgcttgtaaatctggggagactgcgggagagcgtagaagctgcccttgtggattctcgacggaacgaggtagtctctcgcgccttcgggagtgggctttatcatcataggagtttctatctcgatgaagccgttttcgtagtaatactcacgcgttacacgggcaatttcatggcgcatgaggatatttctctggagagacggacggcggaggtcaaggtatctgtacttgagagagatctcgtcgcggacattgttgtcgtcctttatttcaaagggaggggtctgcgcggcggagagtatcttcatgctttcaacataaacttcaatctcgcctgtgggaatattcttgtttatcgcaccctctcctcttgagcggacaacgccctgagccgtgagtacatattctgctctgacgccgaaagccttgtcgaatacttcacggtcggtcttgtcgtcgaacgcgagctgaacaatgccggttctgtctctgaggtcgataaagataaggctgccgaggtcgcgtgttctctgagcccatcctgcgacggatactctcttgccgatgtcagccgaggtgagagttccgcagtagcaggtgcgcttgtcctgttttgtgaatgtttccatgttatctttcctttattttataatactttttctatttcgattacgtcttcaagtatgtgctttgctccggctttttcgtacattgcatggctgaaacgtcctttaaccgcacaaggtatcatgccgagccgctgtgctatcttgagtgcgacattggaaccggtgcagactatcgactcttccggcttagctccgaaatccgccatagccttttcaaacgcctctccgtagtgctgagacttgattatcgagtggaaagcacccgcgtcaagtccgttgtccgtgagaatctttttgaccttgtccggctcaaaatcggagatgagcacaaggttaattccggttcttgaaagggtctcgagaagtctctcagccgactttaccgccgtgctttcgtgaactatagtcccctccatgtcgaatatgataagtttgattttgctgtcttcgtacataatcttattttcactccattgcctgcccatgtttttctcaaatttttttacaaaggcatcggaaaactcctccgcgcttatttcataggcattcatcatgtcgaacaggtacataaacgtgtccgctacctcctcaataaaatgagcgcgaaccgtttcgttttccattattccgtctgcgccctttttcttaattatagcgatagcttcaccaagctcgtctatgctccaaaggatggaaaacggcgctttctccggcgttctgtcgtctatccagcctttttcgactgcgaggtcgtactgcatttttaagagctccgatattttcgcgtccacagcgtctttccccctacttgcacatgatacttaagtatagcaaattccgcgtgaattatcaagagctgcgcgacatattttcaaaaacttttcctttttcttctcattattgctattgtattttcgcttttcatatggtaaaatatcttattaaagaataaagcattatgaggagtatattaaaacatatggaatataaaatttcaaataaacttgccgcgctcaagccatccgctatccgtgagattttcaagtctctctccgacccgactataatcagctttgccgccggaaatccctccccactgtccttccctgccgacgaccttgctgctcttaccgctgacatatacaaaaacaacgccaccgccgctctccagtacagcattaccgagggatatcctccgctgcgaaaagccgtagccgagagaataaagaataaattcggtatcggcggcgagcatgacgaaactataatcacctccggcggtcagcagggcattgagcttctctgcaaggctctctgcaacgaaggagacgtcgtagtgtgcgaaaatccctcgttcatcggcgcactcaacgcattccgctcaaacggtgcaaaaactgtgggcgttccgctgagagacgacggaattgacgtagaggagcttgaaaaggtgctcgcgacaaccgaaaacgtaaagctgctctacctcatccccaccttccagaatcccgccggaatcacttcaactctcgagaaccgcaaaaaggtatacgcgcttgcgaaaaagtacagcgtcgtaatccttgaagacaacccctatggtgagcttcgtttcgcgggagaggacgttccgacttacaaatccttcgacacggaagagcttgtcgtttattgctcgtcattctcgaaaatactctccgccggtatgagaatcggcttcatctgcggtcctgagaaaatcgtcacaaagatggtagtcgcaaagcaggtcgaggatgtacacacgaacattatgttccagatgctctgctacagatacatgacagagcgtgacatggacgctcacattgccgacatcaacaagctctaccgtgcaaaatgcggacttatgctctccgagcttgacaagaatatgccgaaatgcgtgaaatacactcgtcccgaaggcggtcttttcatctggtgtactctcccgaacggtgcggactcatctgaatttgtaaagaaagcgcttgagagaaaggtagccgtagttccaggaaccgcgttcaactgcgatacggaagctccgtccgactcattcagactgaactattccacaccgtctgatgaagatatcgtgcgcggcataaaaatactcggcgatctcgctaaagaaatgttcggcgaataaaagcgaataatttatcaatatacggaggaatattatgaacatatggcatgacatggctcccgaaaaggttactcccgatgcttttcccgctgtaatcgagataactaagggaagcaaaaacaagtatgagcttgacaaaagcacgggtcttttacggcttgacagaattttgtacacctcgacgcactatcctgccaactatggctttatccctctcacctatgccgatgacgacgacccgcttgacgttttggtgctctgctccgaagaaatcattcctatgacaattgtcgactcttatcccataggagtaatcaaaatgatagacaacggcaagccggacgaaaaaatcatcgcgatatgcaagactgacccgtattacaactgctacgattcgatttacgagctgccgtcgcacatttttgacgaaatgaagcacttcttcagcgtgtacaaggcgctcgagaacaaaacgactgcggttgacgagcttggcggcaaggaagaagctaagagaatcatcgaaaaatcactgaaaaactacaaagaaaaaagacaggaacttttgaatatctgattatgtttatagataaaattaaaatttacacaaaagcaggaaacggcggaaacggagtcgtatcgttcaggcgtgaaaaatacgtcgcaaagggcggtcctgacggtggagacggcggaaacgggggaaacataatcttccgtatcgacgaaggctcaaacacactccttgcgttccgttacaagagaaaattcgttgcacagaacggaggagacggcggcggcgcgaaattccacggtgcgaacggtgaggataccattgttcttgtacctcgcggaacccttatcaaggacgcggaaagcgaaaagataatccacgatatgtccggtgacgaggattttgttctctgccacggaggtcgcggaggctggggaaaccgtcatttcgctactcctacaagacagataccccgtttcgcaaaagccggacttccgggagaggaaaaagaagtcatactggagctgaaaatgatagccgacgtaggtcttgcgggacttccttctgcgggcaagtcttcccttctcgcggctctgtcgtctgcacgtccgaagatcgcggattaccacttcacgacgcttgagccgaacctcggagttgttagcgcaggagaggaaagcggatttgtaatggcggatatccccggacttatcgaaggagcatcggagggcgcgggactcggtcacaacttcctcagacacatcgaacgctgccgtatgctcattcaggtggtggacgtatcgggtcaggaaggcagaactccgcttgaagactttgaaacgatatccgcagagcttgaaaagttctcgcacgaccttgccggacgaccgagaataatcgcggcgaacaaggcggatcttctcgtaaacggcgaggacgaatttccgatgatacccgaagtcagcgaagagtgcgcagagcttgaaaaacgctgtcacgagcttggctacgaagtcgtgtatatctcggcttaccttaaggaagggctgaaaaagctcgtcaacaaggtagcggcaatgctgagcgagctccctccggttaaggtatacgaggacgaaatagtacccgaagaagaaaaaatcgacactgacggcgtagaaaacgtaagaatattccgcacggacgacgctttcttcaatctcgaagggcgctgggtagaggcacttgtcgacagagtaaacttcatggaccgcgaatctatgatgtactttgagcgttccctctcaaaatccggtcttatcgacagactcagagaagcgggatgcacggacggcgacatggtaagaatcggtgacatcgagtttgaatttgtcaactgatttacgcgccgcctgcgaatatctcgaggacatgggtgtgtgtctgagcgaggattttcgcgccgcggctgtgtctgacgggaaagctctcgtaaagccgataggaaaaagcttaggcgaagcggcattctgcgaggatatgagcttacttgagcctgaggaaaagcggcttctctcgtctggaaacggagcggttatttcgtccgatattccggatttgtgtgcagacaccgcaaagacagcgcaagccatcacacttttcacgggactggacaaaagcgtgttttctctgagtgacagcagactgtatgtatgcgccggttcactcacgaaagccgcggaagttttctcccgtgtaatgagcaagctcgacaaagtacggcgttatgtggcactgtcgagaaaaagcgccgatatcctctcgtcattctttcagagataacaaaaatgcgtattccgatgatattgtcggtttacgcattttctttatttactttgtttcgtagaacagaaccacgccttctctttgcgcgagctttatcgtaagtccgccgcggagttcttcggaggtcttttcaaaggtttcgccggtcgtggagttttcaaaaacataggtcttaccgtcttccacgtggagctttgcggtgaattcttcgtcctctgcggagatatttctgatgaactggacaaatccgcgcttgttgtcggagtcgtcgaactgacaaacgtaccagtcgcctgtgttcctgcggcattccgtgagcgggtagtagtctccgtcaagtgtcagacgtgcggcgcgtctccaaatcttctcggcggctatggagcgtttgaattcgtcgtcggaggcgttgaaccatgtcatgtaggtcacagcgggaaccattgcgttctggaacgagaattcgtcgttttcaacccatgttccgccttttctctcgacttcttccctgtcccaagacatattgtgggagcggaaatacggtatccattcgtgcatctcgcggaactgcttctgcttgacttcgtgcttgccgtatcctacatctgtataatggagcggaactgcgcgtctcattgtgtcgaggtcgtttcttctgccgcctgatgcacaggagtcgatccaaagtccggggttgcggaatataagctcgtcccagtatctgagatatccctgaacgtggaggttttcgcgcgcgcctattctgtcctcttcttcgactgcaagccagcagggtttcgggtcaaagttgaagtcctggcggtacactctaatgtgaccttcttttatgatggagtctacgcggtccgtaatccattctcttgcttcgagattgccgaggtcgagcagcttgtgatagtcgtccttgctcggggagatgagccagtcgggatgctcttcgtaaagctccgttccggcggtaactctctcaggctcaaaccatacgagcagcttcacgccgttcttgtcgcacgcttctcctataggtccgaatccgttcgggaatctctcagcgtccggcttccatgtaccgatgtgcggccagttgtagtcgcatttgtaccatccggcgtctatccaccatatatcgggcttaagtcctttttctatgtagtcgtgcagtgcgctgacctgattttcttcggttgcggcggtgtgctccggctttccctcacagctccagtggtgcaggcagagagcgggttctatcggctgaccgttttcacgcggaatgatgtgcgccatgtaccatcgtctccaaagattgcgggatctgtcttcgtctccgtcggtgaacataagagtaagggttggcgtgcgcattgtttcaccgggatgaatcttcatgtggcatctgagctgtccgcagcggtagtcaactccgtcgtcggtacgctttaccacagccttccacatctggctccagcctacagcggcgcggcagacaaatttgtcaaacacgagcttcatgtaagggaacgcacctctgcatgagtttccgtcggagggtttcagctccataacggtgctatcgagagtgtcacggaaccattcgtagccgctctcatcgcaggtgtcgccgtttccgtatacaaaagcgtcaaactctccacgaatctcaccgcctagcatgatgtcggagataatgggagtgtcttcgtttccgttgttcgtgaattcaacgcgccattccgacacggcgtagtcacggtattcgagatgtgtagcctttatctcaagaccgcatttttcgcatattcccgtgtaggtgtagcgtgtgatgttcgcgtcgactatctctcttgtatagctgcgcttcatcgtgtcggggattccgtgtacagtcttttcgccgagcttgaaggtcagcggaatgtcgtacatcacctcggtatggtttgacggatgaacaaagcctttttcgagcagcttcatgtccgccttcgtggttttctgattcatattcttctcctttatagaatatttaaagatactctgaattaatcggatttttgcgataaaaggttaaaatataggggcttttatcgcaaaattaaccttaaatcagaggcttcttaattgttcgtttttgacgtctttttgttaaatctcgtaagctgacgccgcagagccttatttttttcgcttgtgagagcagggtcgtccgccgttatctttttcgcgtagtacgccgctttttctatcatatccgtatcggtacacgacgccgcgagacttaggtctatctccccgctttgacgtataattccgctgtccgagaaaaagtctcccggtccgcgctgttcaaggtcgtattcggctattttgaatccgtcggtcgtgctctttatcgctccgagcctttctcttgccgccaaatcctttgcgtccgaaacaaggatgaagtaagactttatatttccgcgccctactcttcccctgagctgatgcagctgcgacagaccgaatctctcggcgttttccactatcataagagatgcgttcggcacattcactccgacttcaataaccgtcgtggaaacaagaacgttcacttccccattctcaaactcacgcataacaacatcccgcgccgccgtcttcatctttccgtgaataagtccgactttcaactccggcagagctgatgtgagatattccgccatggtttcagcagctttcatcggcagcttttcttccttcaccgcgtcgtctataagcatgatgtcgcctatgttttcgctgtcctgctccttttcggcttcctccactgagggacacactacatatgtctgatgtccttcgtccgcctgcttttttatgaacgcgttaagccttgcacggtagctttcgtttactataaacgtgtccaccttctgccttccgcgcgggagctcgtctattctcgaaaccgctatgcttccgtatgtggcaagggtcatggtacgcggtatcggagtcgcgctcattacaaggcagtgtacgtcttcagctttctcgaacagtgccgcgcgctgagctacaccgaaacgatgctgttcgtcgataaccgcaagtccgagacggtctatttttacgtcctccgatataagagcctgcgttccgataacaatgtcaacccggttaagctcgtttacgtccgcaagtccggagagaatcatatctcttgctttcttcctcgttgagcctgtgaggagagcgcagtttattccgagaggggaaaacagcttttcaaaatcatcagcgtgctgctccgcaagtatctcggtcggaaccatgacggcggctctgtaaccgtttttcacggcacagtaacacgcggcggcagctactatcgtctttccgcttcctacgtctcccgtgagaatgcggttcatcaggctttcccccgacatatccgatattatctccgatatacatctcttctgcgcgcctgtcagctcatacggaagtccgcttacaaattcgtctatggcagtatattttatcgggacggaattgctctttttcgcggcattccctcttacgtcgagagagagcatcatgaggaacagctcgttgaacgtcagccgcctctttgcttttgctatgtcgtccactgtcgagggatgatgcacggcgtttatggcataggaatacgtcggaagtgacagctccgtcaacacatcggtcggcagaaactcggtcagctcctttgacacatatccgagagcttccgatacgagacccgccatgaacttctgcttgattcccgcagacagagggtacacaggaacaatatcctgaagcactgcaccgctgtagtaaggctcggatatcggatttgccatcgtcagcgcaccgttctcacgcgtcaccttgccgaaaaagcggaacacagaacccgtgtgcatggtgtttttcagatacggctgattaaagtaggttatatgcaccgctccgccctcgtcaaacgcactgaacttcatgacggtcattccgcggcgtatcattctcacgctcggctcggaagatacagtcagtatcagcgaaaaaataccgctctctccgggggacagcttttcttttatatccgtggttagcactgtgtctccgcggttctgatatgccctcgggaagcagcgcacaaggtcgccgagagtttctactcccatcgacaaaagcgacttaacccttgtctctccgacgccttttaatactgttaccggagtcgagagagtgtaattcatagtatattcattcctgttattcatgtatatttttgttgattttataactttctctgatgtaaattatattatcacatccgagtttgaattgcaataattatttttgtttttaagaaaataatacaaagctctcttttttcgcgaatttcggtgtttctcggtttatttttcactaaaattaagcacggaaattcggtgagttttgtcgtaaattgaaattcggttttttgtgtataaaaaatcaataaacacgtattgacaattcaaactccatgtgctaaaataaaaccatcttaaagcaaaggatcaaccgtaatgagaagcataatcgcggcagctgaatatttcttttattactcttacttttttacctgcaggaaatagtaagagtgtttttgccggaattttgtttttaaattatgatgtttaaaacgggctttcagtaactaacactgaatcgcccgtttatttttttgacataataagtcacacctcctttactcggagaaatattatttatacagaaaagggatacagaaatgattgcagtacttaaaaacggagttacacaaaagcagatagacagcttctgcgactggataaaggctcagggcgttggcgtccacgtatataacggagaatttcagactgtagtcggacttatcggagacacgacaaaaatcgacgcggaaatgctctcgggtctcgatatcgtcgacagcgtaaagcgcatatccgacccgttcaagagcgcgaaccgtaaattccatcccgacaactctgttatcgacatttccggaaagactactgtaggcggaaatatcttcgcggttatcgcaggcccctgttcggtcgaaagcgaagctcaggtgcttgaagtcgcaaaggcagtaaagctctccggcgctacaatgcttcgcggcggcgcgttcaagcctcgtacatctccctacgacttccagggacttcgcgcggacggaatcgagcttcttcttgaggctaagcgtgaaaccggacttcccatcgttacggaaatcatgaacgcaaaccaccttcccctctttgaaaacgtcgacgtaattcaggtaggcgcaagaaatatgcagaacttcgagcttttaaaggaactcggaaagacaagaaagccgattctcttaaagcgcggtcttgcaaacacactgaaagagcttctcatgagcgcggaatacatcatggcaggcggcaacgaaaacgtaattctctgcgagcgcggcgtgagaaccttcgagacttacacaagaaacacactcgacctctccgcagtaccgatgcttcacgagctgactcaccttcccgttatcgttgaccccagccacgcaacaggtatgtcacgcctcgttaaacctatggctcttgccgctgctgcctgcggtgccgacggacttatgatagaagtacacaacaatcccaaggctgctctctgcgacggtcctcagtcactcactcccgagcagtttgacgacgtaatgcgcgctacaagacgtgttcttgccgcagtaaatgaagacgaggtaaaggcatgactgtaggaatcataggactcggacttatcggcggttcaatggctcgcgcatacaaaaacagcggattcacggttctcggatgcgacacgaacgatgttgtactgagctgggcaaagctgaacggtatcgccgacgaaaacctcacgaaggacaatattcccgactgcgacctcattctcctcgcgataacaccgaaaagcgcagcaaaatggcttgaagacaacgctccgagcatagcaaaaaccacacttgtcatggatctctgcggaaccaagagatacatctgctccgtcggattcgctctcgcggaaaagtacggctttacatttgtcggcgctcatcccatggcaggctcgcacatcggaggaatcaaaaactcccgcgcggacttgttcaaggatgaaaccgtggttctcgttcccccgtgcagagacgacattgccctcttcgacagagctaaaaaggcactcgcaccggcaggattcgcacgctacaccttcacgacagccgacgctcacgatgagatgatagcatacacctcccagcttgctcatgtcgtttcaaacgcgtttgtaaaaagcccccgcgctcagacacacagcggaatctcagccggaagctaccgtgacctcacgagagttgcacagcttgacgttaatatgtggacggagcttttcctcgagaatcacgacaacctctcaaacgagctcggacttatcataagctcacttcaggaatacaaggacgctatcgactcaggcaatgccgagcttctcgcttctctgcttcaggcaggtgttgacgcgaaggaaaaggctgacggctgatatataaataaaatgaagaaaatcataaacgcgggcaaatacgatatcataatcgagaaaaactccctctgctctttcggcgaatacgtcaaaaccgcactcggcacgaataatgcaaagctgctcatcgtatcggacgacagagtttacagcctgtacggagacagaacgcgagaagctttaaaaagcacaggctttactctcgcagaggactatgtgtttccgcatggtgagatgagcaaaaacctctcaaatctcggcgaaatactccgtcacgctgccgatgaagggcttacaaggagcgactgcattgcagctctcggcggaggcgtcacgggagacatggcaggatttgcggcggcggtgtatctgaggggcataaaatatgtctccgtacccacgtcgattctggcaatggtggactcttccgtcggaggaaaaaccgctgtcgacattcccgagggaaaaaatcttgtcggtgcattccacgagccttcccttgtgcttagcgacaccgcgcttctctccacccttcccgaggattttgtctctgacggaatggcggaggtcataaaatacggcgttctcggcaacactgcgctgttctctctcctcgaaaattctacaagccttagcgacgacatagacgatatcgtagcggaatgcgtcaaggacaagcgcgacgtagtttcccgcgattttcgtgacaaaggcgagcggcagaagctgaatctcggtcacacattcggtcacggaatagaagcattgtccgggtacacggtatcgcacggtcacgctgttgcatcgggaatgtattttataatgaattgtgccgtaaaacgaggtctttgccccgaaaacgcgctcacaaggcttgaaaacctgctgaaaaagtattcgctcgacccgtttatctacagaagctacgacatacaaaaacttatctccgcgtcctctcacgacaaaaagaagaacggggacaaaataacgctcgttgttccgcgggatatcggagaatgcgagcttatgacaatagacttctgcgatatagaaaactttgtttcgggagttatgtgatggaaattacgcttttttcaccgaatccgcatggcataataagtgctatcccgtccaaatcctacgctcaccgtgctcttatctgcgccgcgctgtctgacggagttaccgaaatactctgctcgaggtcaagccgcgacattgacgctacggtgtcgtgtctgcgctccctcggtgccgaaattgactgctccgacgcgggattcacagtatatcccgtaaaaaatgtgccggaattcgccatccttcaccctgcagaatcaggctctaccctgcgattcatgctccccacagcggcggtactcggaacggaatgcgaatttgtcaccgaaggcaggctgtcctcacgccctctctcccctctctcggacgagctggagcggcacggtgcaaaagtcagattaaatccagtcagaataagcggaaaaatcggcgcgggtgaatattgtctcgacggctcggtttcgtcacagttcactacggggcttatgcttgctctgccatacctcggagaagacagcaccgtcgttttaagcggcaaggtcgagtcaaaaccttacatcacgcttaccgaaagagtgcttgaaaagttcggtattatggtcacggaagaggacaacgctttttctgtcagcggaaaatatcactcaccctcgcgcattaaagttgaaggggactggtcaaacgccgcgtttatgctctcctgcggtgcgctcacagacggtattacggtaacgggacttgatctcggctcatcacagggggacaaaaaaattgtcgatattctccgtaatttcggagcacaggtcagcataagcgaagacagcgttatggttaaaaaagctccgctgcacggtatcacagttgacgctgcggacataccggatctcgtgccgatcgtttccgtagtggctatggcggcttcgggaacaacagtgataaaaaactgcggcagactcaggctgaaggaaagtgacagaatagaatcggtatgcgccatgataaactcgctcggcggaaacatttcggtctgcggtgacgatattacggttcgcggcggaacagtgcagaagagcgacgtcacggttaactcctataacgaccacaggattgttatggcggcggctgtcggttcggtgctgtgctcttctcccgttacaattgacggatgtgaagctgtcgcgaagtcatatcccggctttttcgatgattttggaaaattatgtatgaactaaggaggagcgcatgacctcttacggaaaaaatatcaaaattgaagtattcggcggctcgcatgacagtgaaataggaatcacagccgaaaacattcccgcgggtattacctttgacatggataagctgcaagccttcatgcagagacgcgcaccgggacagagcaagctgacgacatcacgcaaggaaagcgacacgcccgtactcatgagcggatttgacggaagcaccacaaacggcgagaaaatacgcattataataaggaacgaaaacgcgcgctcatccgactactcttccctctcgtcaaagcctcgtccgtcccatgcagattatcccgctatggtgaagtccggtggtaaggttgatcttcgcgggggcgggcatttttccggcaggctcacagctccaatatgcgcgctcggcggtattctcaaagaggagcttgaaaaacgcggtatcttcatcggtgcgcatattgaatccatcggaagcgcgctcgactaccgttttgacccgataaaggtaaaccgctcggattttgaggatattctctcccactccctccctgttctcgacgaaaaagcaggcgagagaatggctcaggtgatagacggcgcgagaatgcagcaggattccgtcggaggagtcatagaatgcgctgctgtcggtattcccgtcggagtcggcgagcacatcttctgcggaatggagtcgcgcatttcgtccgctgttttctccgttcccgccgtcaaaggaattgagttcggcgcgggctttgcttcaaccgatatgtacggctcggagaacaacgacacgttctactacgacggagacacggttcgtacaaggtcaaacaactgcggcggtattctcggaggaatgactgatggtatgccgctgatattccgctgtgcgataaagcctactccctcgataggacttgagcaggacacgattgatttatccacaaagcaaaatacccgcatctcaatcgagggcagacacgacccgtgcatagttccgcgtgctgttcccgttatcgaagcgatgtgcagtatagctgtatttgacgctctgcttgactgcggagagatggaaaagtaagtctgaggtaatattatgaagaaaacaagtgaaatgaagtgcggacttatcggaaaaccgctcggacacagctattccccgctgattcactcctgccttgccgattatgaatacaaactaatcgagcttgacgaaaacgaagtcggctctttcataaaaagcgataaatacgacgcgcttaacgtgactatcccatacaaaaagaccgtcatgccgtttctcgacgtaatctctcccgaagctgaaaggataggctcggtcaacactgttacacatctgccggacggaagactaaagggagacaacaccgactactatggattctcctacatgctcgacaaaggaaaaatagacgtgagcgggaagaaagtccttgttctcggcagcggaggagcttcaatgaccgcacgtaccgttgtggctgacagaggagcgcgtgaagttgtgataatctcccggaggggtgaggacaattacgagaacatcgacaggcacgccgactgcgacattatagtaaacacaactcccgtcggaatgtacccgaacaacggtatctctcccgtatctctcggccgttttcccaaactttcgggagtagtcgacatgatatacaacccctcgaaaaccgcgctcattctcgaagcggaagagatgggaatcccgtgcatatcgggactttgtatgcttgtggcacaggctaaggcggcgtcggaattcttcacgggaaagaaaatcgagaacgccaaaatagacgagataaccgcgcatatcagctttgacacaaagaacattatgctaatcggaatgcccggcgtcggaaagaccacaaacggcagactgattgcacaaaagctcagacgtgattttgttgacattgacaatgaaatcgtaaagcggagcggcaaatccattcccgacatattcgcggagcagggagagggcggttttcgcgatattgagcacagcgtacttgaagagttctcgaggagatccggtcttgtcatctcctgcggcggcggaacggtaacaagaagcgacaacataaagctgatgaagcagaacagcaccgtggttttcatgaagcgcgacattgcgtctcttccgaaggacggcagacccttgtctcaggcaaacgacctcggagagctgtacaaaaagcgtcttccaatgtacctctccgcggcggatattgtctttgaaatggacggaagcccggagaaaaactcgcgcggtatcatagaaaagctgaaaaatctgtgaggtgagaaaaatgaagctgctcataattaacggacctaacataaatatgcttggaatacgcgagccggggatttacggaaaacaggattacgctgcccttctctcgcttatcgacaaaacctgccgcgaaaacagcatagaatacgagcactaccagtcgaatcacgagggggatattgtcgataagatacagtccgcctacggtaagtttgacgggatagtgataaatccggcggcgtacacacacacgagcgttgcgatacttgacgcgctgaaagctgtggctattccgacggttgaggttcacatttccgacgtcagcacgagagaggaattcaggcgtcactcgtttgtttccctcgcggctgtgaaaaccataatcggacacggactcgacggatattccgaggcgatactctggtttaaaaacaacatctgacacacaaatattcgggtaaaacggtatgattattcatcgctttgccctttttattttgtaacagatccgcagttgtttaacaaaaagtcatataataactacaatagacaatatgtacaaaaacttgtgtgatttttttattttaaaaatttagcaaaatgacgttgttcacaaatttataatatattttcaaaacaattcatgttataataggtggagtaaatatgtttatttcgtcaaagcaaaggaggaaggcagatttacggctgcgtcaacgcggttcttgatactgtcattttcagttttggaaaaagtatttgaatacttaaaaagaagcctgacgatcgcatggaaaagcgtatttttcaactttaagcaatacttttgcttcttcatggcaatcatcatcgttcaggtgctgtacggaatgatgtccgtttcggcagacaacaacaacaatgtcgaatacaagcacgttatggaggaatacaactaccatatggtgctcaaaggtcttaacgaagatcaggcgcgctatctcatcaaggatgaaggcacggtatttaaaagcgacgtgatatttgaagtcgtttcatcggagcaatatgtcaacgctctgacgggagacgaaagatatgacgtttacctgtacttcaccggcgaccttgaccagtgcatgaagcgctttgagaagaattatcagcccgaccttgcagctctcggtgacgccgacagaaccttcacaaagtccacgaccccgctcatgaccttctcgaagaatatcgcggcaaatacaacaacgttcgtctttgtcacgcttatccttctcgcagtgtcgatattccttctcacatcgctctacaacatcagaatcaaccagtacaaattccaatacggtatttatctgacgttcggcgctgacttcaagatgctgttctccaccgcgttctgggagctgttcatcatctttgttgtaacgttcatcccgtccctcggtatctccacgcttatctcatacctcatgtacagcgcgtcgggatacggattcattttcaacggtctttccatactgaagatattcctctttacacttgtcgttatcctcgcgtccgtttggactcctatgaagataatgtccgtaaaggatcccatgtctcttatcatcacggaagacaactcaaaccttgttacctcccccatgcgttccttcaacatattcgcggaaaagttcccggttaagtatgagttctactctatctggcgtttcagaaaatacaatatccagcttcttacaactgctatcgtattctgtgcgctgttcatcatgggtctgtacatggcggatatctacacgaccgacctgtactacccacgcccgcagtttgaagtaaacctcgcggagtccggctttgagtatgacgagctaatgagcgaagagctttacaatatgcccggagtacgcgcagttgagataaacgacaactcaaccgaatcctacgaaaacgcctcccacatgatcgtggaaaagaaaaacgttcgtccgttcaaaaacctcgtacactacaacggtacggaatttgacgtaggcgacaaaaactggcgtgtatcgagcgacatcgtatacaaggcaatgacagcggaacaggttcgcattctcgaggactacgactacacgggagacgtcacaagcgttcttcagccgggatatgttgtaatcggcgactcgatatcaaacgttcccacatataagttcaacgtcggcgacaagatttacatctcggtaaagaccggtcagataaaagcagtcgacacaaacgtaacgggtcgcgtgcttctcaaaaatcagattgaatacttccactatgagtatcacgaatttacaatcggcgcgatcctctacgatattccctcaggctctactccgatattcatgaacctcgacgattactatacgattaccgggaagactccgaaggctacatcgttcaatatttacgttgaaaaggatataaccacagaggaagtcaactctctttatgccgaagtaagacagtggagccacacatacggcgacgttaaggtatcgaacaaggacattaccctaacaaacgcaatcgcggcagacaagcactacaacgagctttacatctgcatctcgatactgatactcctaatttccccgctcgtatggttcttctcacagactctttactacacaaagagagaaaaagagttcaatattctccagtcaatcggtgcaattcagagggaaatcaagcagatttatctccaaggcggtctgtgcatggctgtaatgtcgctcttcgtttcaataatcctcagctatgccggcagctacattctcttctacatttataacgtaataatgccttacttctcgggtgaaaacgtccgctatgtattctatatgccgtggtacgctatcctcacgagcatcgtaatgtcagtggcgtgcggcttcttctcgacttatctcccctacagaagctactacaagaaccgctactctctccagaacggcggcgcaggtgcggaatattcgggcgacgaataatatcggcacaagactaatttatactacacaataataagtgaaaggtcaggaatacataaatggcagatacaatagaatatatgctgcaaaccgaaagcgttattaagcagtacaagcagtatgatacagttattacagcagtaaacagagtcagcatcaaggtagagcccggagaattcgtcgctatcatcggtacgtcgggttcaggtaagtcaaccttcctccatatctgcgccggacttgactcagcagacgcaggcagagttctcatccgcggtcaggatatcacaaaaatgtccgccgacgagcttagccgtttccgcggtatgaacatgggcttcatcttccagagacacaacctcatcccgcagttcacggcgcttgaaaacatcctcattcccacaatgatgtgcaacaagtcagagctttcgtatcaggaaacactccgccgccttgttgaaacgctccagctaaccgagagacttaaccaccttccgtcagagctttcgggcggtcagcagcagagagtcgccatcgcacgtgctcttatcaatatgcccgacatcgtttttgccgacgagcctacaggaaacctcgacagaaagaacgcggacgaagtattaaagctgcttctcaagacaagagaagaaatgggtcagacgctcatcatggtaacgcatgaccttgcaatagcggatcacgccgacagaatcttccgtatggacaacggtattctctcacttgaaagagactacatcggcggaacaaagcgcaccatcacaggatattaataatgttaaaatcgagaaaggcttcgagaaatcgaggtctttttcatattccgccgcacggtagcatattctttcgtaaagaaaatatctcggaggcgtaaattgaagcagacacagcgcatcgttttaaactacatcatattcacattcctattcatgggagcgtcgcttatcatcggaaagacagcttacgactcactcaccaccgaaaccgcgggaatcacggaagcaagtccgcaggaatatgtttttgttatcgacgcgggacatggtggtgaggacggaggcgctgaggttggcggtgtgcttgagaaggacttgaaccttgcaataagcgaaaatatagccgacatatgcacactgttcgggacaaacgtaaagctcaccagaagcgacgacagactgctatacgactactatggcagcctcgacagctacgtcggaaagaaaaaaacctatgacctgcgaaaccgtctgaggattggtgaagaagccgcgccggtgctgtttgtgagcgtacacatgaacaaattcacacagccgcagtacaagggactacaggtgtacttctctccaaacacgccggagagtgaagaagccgcaggaataatccagtcttacgcaaaaaatatctctcgcccggaaaacgaacgtgaaacaaagcgcgccacaaacgcaatatacattctgaaacgaatcacaattccggcggttttggtcgagtgcgggtttatgtcgtgtcccgacgagcttgcaatgcttcaaacaaacgaataccgtgaaaagaccgccgccgtgatattttcgtcctgccttgaatatgctgtcggaaagcagtgattttctcttgatatggcgcgaaaaatgcgttataatatgggtatctacttaaggtaaggaaatatcatgaaagcatcaaaatcagtctatgtgtgcagcgagtgcgactaccaaagctccaagtggctcggtaaatgccccagctgcggcgcgtggaacacttttgtcgaggaaacatatcaggctcccgcaaggacagggctgtcgaaaagctccgcatcgggaactaagctcgcgagggaccacgaacctgcccagaaattcgccgacttcacaatgcccgactaccttcgccacagcacaggaataggagagcttgaccgtgttctcggaggaggattagtcgaaggctccgtcatacttttggcgggagagccgggaatcggcaagtcgacactgctcatgcagctgtgcggacagataggaaactcgtgcaaggtgctgtacgtctcgggagaagagtcaaaggtacagcttaaaatgcgcgcggacaggctcggagttgacgcggaatttgtttatgtgctgaccgagaccgacatttcggaaatactcacccagttcgacaagctgaaacccgacattatgatagttgactcaattcagacgatgtacacggaagcgtcctcatcaatgacaggaagtgtgacgcaggtgagggaatgcgcgtcaatgctcatagaccgtgcgaaaaacaacggcgcgtccgtggtaatcgtaggtcacgtcaacaaggaaggcggcattgctggtcctaaggtactcgagcacatggtggacgctgttctctactttgagggagacagacggcagccgcaccgcataatccgcgcaataaagaaccgcttcggctcaaccaacgaaattggagtatttgagatgtgcgaggacgggcttgaagaggtcgcgaatccatcagccatgctcctcgaaggcagacctacgggtgttagcggaagctgcgcggtatgtataatggaaggaagccgtcctctaatcgcagagattcaggctcttgtcacgccgacagtcttccctgcccccagacgcacctcgaacggtatcgactacaacagaatgtgtctcctgctggcagtgcttgagaagagactgggactgaaattctcgacctgcgacgtgtacctcaacgttataggcggtctaaggctcgacgaacccgcgatagacgccgccgcctgccttgcgctgatatcatcactccgcgacattcccgttcccgacaatgttatagcattcggcgaggtgggactgtcgggcgaattccgtcaggtagcgtcggctgaacagcggctgaacgaagcgtaccgtctcggctttacaaaaatagcactaccgaagcgttcgcatcttaaaaccatcccggacggagttgagatagtcccgcttgtcggtatctacgacgccctgaagctgctcgcggcggagaataaggagaaaaaataaaggagacagcatgggtttaagcctgtgtggaagtatgttatgaaagaaatgaatccttatcttcaaatgttttacgatacaatgaaaccaaatctgactactccgcttgcatcatttgtgtcatgcacaatatctgatatagatgaattcgaagcgtattatggtaagcctatcactgatatgaatatggaattattcaatcatattatagaaggatggtttcattcatcttatcgaaagactgaaaatagaaaattaaaatatactgctgaatatttacgttggtatgataaaaatatcgggaaagtatgcgacctgcaagataaagttcaattgttagaaaatacaaaagaatattatgattatcaaaaatctcattattggggattgtttttaaagaaatttgatgaactatataaagttgcaaatatgtcgtatgttgataaagttcctgaaagtatacgtaatagtataacagctgacgttgttgtcgtggctatgattatttgttattcatcagggttgtggataaaatcagtaaatataaaatctgctgatatatcaagtgactacagtgaattcatttacgatggaacaacttataaaatttgtgatgaaggtgttccgtatctgaaattatattgtcagcaggattctgttctcaccaacggaaataagccgctatataaaaatgacagcgaatatcttatgaagtatcttgtaaaacaaagcgaagttgaagctaagcttaacaaaatctacccgtcaaattatttaaatcataaactgcaaatattaaatgaaaggtatcatagcatatatcccgaccttggcagaaatattaaatttactcctgaatcactatatctcagcggatatttgaacaaagctctctcagttttaccacctgacgcaaatttcaatgactggcgaggatatatctacaaaaatcctattaaaaactattcggtttctgaaataataacgcttaaagatttatacctgtcacaaaccatataacatcacaaaaccttgacaaaccccaataaatattatataataactcattaaccaacataaaggacacacaaaaatgaaaattacacctgtaaaaggaacggcggattatctcccgaacgaggtgctcatccgagactacctgcaaaacagcatacttgaaacctaccgttcatgcggcttcgagagaatctccaccccgataatcgaggacatcgaaaaccttgacaagagcgacggcggcgaaaacctgaatctcatcttcaagattatgaagcgcggcgaaaagctcgaggaagctctctctaccggcaacgaaaaggaaatcgccgacatgggtctgagatacgacctgacgctccccctcacacgctactacgcaaacaaccgcgcaaagctccagaatcccttcaaggtcatccagattgacagagtttaccgtgccgaacgtccgcagaaaggcagaatgcgcgagttttatcagtgcgacatcgacataatcggctcggactcatggacttccgaggttgagcttatcacaacgaccgcaaaggctctgcacaacatcggattcacccgcttcggtatcagaataaacgaccgcagactgctgaaagccatcataatgggcgcgggatttgccgaaaacgagtgcgattccatctgcatttcgcttgacaagctcgacaaaataggatttgacggcgttaaggctgagcttatcgaaaaaggctttgactccgcgaatgtcggaaagctcatagaatccatcggcacaactcccttcactctcaacgatgcggaaaagctctgcggaaagctcgactgcatcgacaacctcagaaagataatggacgcggcgaattcccttgcagacggctttgaagtcacctacgacatgactctcgtccgcggtcagggctattacaccggcacagttttcgaaatttccagtcccgacttcaagggagctatcggcggcggcggacgttacgacaaccttatcggaaaattcctcggagaaagcattcccgctgtcggattctcgataggctttgaacgtctctgcgctatcctcctcgagcaaaagtacaaaatccccacacagaagaaaaagtttgccgttatctacaacgacgacaacttcattgacgcgctgaaatacgccgacacgctgagagacgaatacgacgtcgccctatatcagtccgtgaagaagctcggaaagctgttcgcaaagctcgaagaaagcggattctgcggctgccgtgtcatgggtcaggatgaagtaaagcatttcggcgaataattgccattttttccgaaaaatctattgacaatccaataaaatagtgatatcatagtaatgtttataatgcgatgatggaaaaagagtagcgtgagtcacttctcagagagtcggcggtcggtgcaagtcgatgaagaatctttcgtgaatacatttccgtagcagcgcaccgaagggtttctaaatctgcgtaggctgcgacgtgtgatatacgttatagtatcggggcataataagtgcctgctgaggctgtactcgtgagggtacggtaaactgaggtggtaacacggtatatccgtcctctgctgtttttgtcggcaggggactttttgttttccgccgaaccgattttttcattacatctgtttgatggaggaactgaaaacatgataattaccgatcttctcgaaagaaacgcaaagctgtacccagatgatgttgctctggttgaaataaaccccgcaaatcagcctgatataaatctgacatggcgtgaatattcgctcatcgaaaccgctcccggaggaaaataccgtcgtgagatgacatggcgcgagtttgacacaaaagctaaccgattcgcaaaccttctcaagacgcgcggagttgaaaagggcgacaaggttgcgatacttctcatgaactgccttgagtggctgccgatttacttcggtattttaaagacaggcgcgcttgccgttcctatgaactaccgttactccgcggacgagataaaatactgtgccgagctggcggacgtgtcggttctcgtgttcggtcctgagttcaccgagagagtttcaaccgtgttcctcgatatgccgcttgtgaaggactacttctttgtaggcaagaatccgccggaatttgctgacagttatgacaagctcgtgacatactgctcttccatagctccagctgttgagcttgacgaggacgacgacgcggctatttacttctcatcaggaactacaggcttcccgaaagctatcctccacgctcaccgttcgctcatcaactcatgtcgcacggagcagaagcaccacggtcagacgcgcgaggacgttttcctttgcattcctccgctttaccatacgggagcaaaaatgcactggttcggcagtctgatcagcggaagccgtgccgttatcctaaagggagtttcccccgaatggattctgcgtgccgtatctgaagaaagagctacgatagtatggctgctcgttccgtgggcgcaggatattcttgacgctatcgacagaggggacattaagctcgacgactacagactttcccagtggagactgatgcacatcggagcgcagcctgttccgccgtcacttatcaagcgttggaaggcagtattcccgcaccatcagtacgacacaaactacggtctttccgaatccataggtccaggatgtgtacatctcggagttgaaaacattgacaaagtcggcgcgataggtgttcccggttatctctgggaggctgatatcgtcggctcggacggacacagctgcgcggcagaagaagtcggcgagctgatagtaaagggtcccggagtcatgaagtgctactacaaaaacgaggcggcgacaaacgaaatcctcaaaaacggctggctttacacaggagacatggcaaaacgcgacgaggacggctttatctatctcgtagaccgcaaaaaggacgtaataatcacgggcggcgagaacctttatcctgtgcaaatcgaggacttcctcagacaaaacgataagataaaggacgttgcggttatcggactgccggatgaacgtctcggagagattgccgcggctgtaatcgagctgaaacccgacgttacggcaacggaagaggagataaaccaattctgcctcggacttccgcgctacaaacgcccgagaaaaataatcttcgctgatgttccgcgcaatcccacaggaaaaatcgaaaagccgaagctcagagagatatactgcggcgtgtctcttgtagaagctcagacaacacgataaaatattcagcggtattcaacaaacgagtgccgctgtttttgtgttttctgccgtattttgatttttgccacgaaatatattgactttccactcggtatatggtataattttactccattttttgagttttttaagtaaaaggcggtgaaacaatgatcgagcttgacggcataacaaaaaccttccgtgtatcgaagcggaactcgggcatgaaggaagcagtccgcgcgtttttcaggcgggaatacactaccgtaaacgcactctccgacgtcagcttcaagattaacgacggcgagatggtcgggtacataggtccgaacggcgcgggtaaaagcagcacgattaagataatgagcggaattctgactcccgacagcggaaaatgtgtcatagacggtcttactccgtggaagaaccgcgcgaaacacgtctcccatatcggaatagtcttcggtcagaggtcacagctgtggtgggatgtcccggttatcgactcgtttgagcttctgcgcgacatctacagcatagacaatcgtgtgtacaagacaaatcttgacgagctgacgaccgctctcggcatatcggacatcataaaaactccgacgcgccagctttccctcggtcaaagaatgcggtgtgagatagcggcgtcactgctgcattccccgtccgtgctgtttctcgatgagccgacaatcggtcttgacgccgtatctaaaatagcggtgcgcgaatttgtcaaaaagctgaaccgggagcacggcacgactgtcattctcacaacgcacgatatgcaggacatcgaagccctcacaagccgcattctgctcataggcgggggaaagatactgcttgacggaaaccttgacgagttaaaggcgcgccgctcatctgtcagaaccataaagctcgaatattcctcgggagaagtctgtgaatgcgagggaatgaaggtttcgtcggcgcaaagaggtcacgctgtctgcacggtcgacatacaaaagctgagcgtatcgggagctatcgagtttatctcaaagtcggcggagattaccgatttgtcagtcgagggaacaagtgcggaagagcttgtcgtatcactctacaaggagttcgatatatgaaaaagtacctttcgctgttccgaatgcggttcatcacgggtctgcaataccgagccgccgcaattgccggaatttccacccagttcgcgtggggatttttgaatattctcctgttcaaggcattgtacgaaacaaatccgtcggcgtttccgcttgagttttccgagctttcggcgtacatctggctgaggcaggcttttctcgcgctgttcaactcgtggcagtttgaccccgaaatcatgcagatgataacaaacggcaacatagcatacgagcttgcccgccccgtcgacatatactcgctgtggttcgtccgaggactatcgacaagactttcaaaaaccgcgctccgctgtctgcccatcctcgtcatcgcttttctcctgccgcagccatacggattaacactaccgccgagctttattaatgccttaatcttcgttttctccatggctctcgcggctatttgcgtcggttcatacacgatgattgtttacataatgtgctgtcataccgtgaactccatgggtgtgaagattataatgcagaacctcgttgactttctcagcggcggtcttgttccccttatgttcatgccaagcggactgaggaaagtgcttgaatactctcctttcggggcaatggaaaacctgccgtttcggatttacagcggcaacattgcgggagaggaaatgtggagattcttcgccttgcagttgttctggtgtgtggttctcattgccgtcggaaagctgtggatgaagtcgtcgcttaagaaaatcgtaattcagggaggttaacatgagcggagtaaagctgtatttcaaatatttttcgatgcacctgcgcagtgttatgcagtataaaacatcgttcctcatgacggttttcgggcagtttctcacgtcgtttgcgtcatttctcagcgtattcatcctcatgaaccgtttcagcagcatctatgaattcacaatatacgaggtgcttctctgctacagtgcggtactgatgtcgttttcgcttgctgagtgctttttcaggggatttgactccttcgcttcgataataggaaacggcgagtttgagagaatgctgacacgcccgcgctcacttgtgttgcaggtagtcggctcaaaaatcgagttctcgcgaattggcaggcttattcaggcggctgtgatactttgctttgtcatcccgatgagcggtatcgactggaattttataaaggcgctgacactcgtgctgatgatagcgggaggtacgctggttttcgcgggactgttcgttatatacgcgtccctctgcttcttctcgactgacgggcttgaatttatgaacatattcacggatggtggaaaagagttcggcgcgtacccgctctcaatctacggcaaa

SEQ ID NO: 2588 - DNA, 27652 bp, Unknown
  16S sequences of unknown bacteria
attctaaggcgttttctgcctttagctgttccgttatgccctgtgcctgtttcatgccctctatgagccgttcaaagcgttcctgtgcctgtctgtcgatgtcggcaagataggcgttgagcctgccgcttgtgagaaaattggtgtatgtaactttgcggtattgcttcagataatctaaatgccgctgtccccatatgcctatcggctgttcttcttcggcgggtaaagtcatacatggaattagataatcctcttgtctttcgtatcttccgcccagttcctcaaataatgattttgccattgtatgttacctccacattcttttttattttgaatgtccgcaaaatccgtcctacatccgtcgctcgctcttgctttttataatcaagaacagacaaatgtttttcgtgcgagcctttatgttcccactcaattccgtgccgttccattacgaaagctaaagcggacttttctacgcttacccattgattccactcggtatctccacgagttccgcccttgaaaccttgtgcggctaacgcttgtttgagacttactctcgtatcaagtccacgcttgcttccggttgtgaacggaacaaaatcaatatgcaaatggggcgtcgcctcgtccatatgcagatgagcagagaacacttttaggttgggatttcgctcttgaaatccacggtaatactcatctaaaacctgccgtgcaagctgtccgttttcgctttcggcactcatattttccttatcgccaatctgcaaaatcagttcgtgaaacggtttttcttgcttagaatttctgattttttcatagtaattttctattctacggtcggctcttgtctgcttttcgttgtatctttttagtgcttcgtcaaacaattcgtgatagattttctttatcggctcgttacagtaatcaatgttcaaatgcgttctgctaccgtcaacattttccgttttgaacttgcggctgttgtgattgaccgagcctttacccaccattgcgcttatcgttctttgcatttatatacctccaatctcacaaacttgctcgtcctcgtttctgttactcttgtcaagagtaacgcaaaagcacttttgacaggcaagcccatcaaaaatgcaacctgcaagcaggttttgcgctccttgagaagcaggagtggctttttgaaaaaagccacctgcaccctgcaaaaactttaatgcgtgtcaaaccgtgacggtggtgacgatgttttcgacctcgtcatcgttctcagaaagtttgtcacggtcgtcacacattgtcacgctgtccgtatctttccaaagagaaatcttgcgtccaccgtgggtgcggcatgctttgtagtgaatgccataatctttaagcagtcggtttgcatttatacttaacctcaatgaaagaacatttggtttaacatcttctccgagaatgtcacatagttcggaagcagtaccttcccacactttactttccgacaaaagagttgatgcaattttttcaaatagcggctcaggcggctctttccacaattctgtttcggacttttcaaaattccaaattagtttttcggcatctctcacaagatgaattttcatatcttgttgatccctaccggcaacatcaagtgtggcattattagaagttcgtttttctttgctcagaacgaacgctccgtcggcggctcccatcaatccgtttgttcctgaaatcatatcgaaaatatcttccgctttttgcttgcgagtatggtgaacaatgagcattgtaacattatagctgtctgccaatgattttagccttgctacaatatcatagtcacttgcatagctgtaatcggctccgccggcttcacgaacacgctttaatgtgtcgataataatcaagcctgtatctgaatgttcttccataaagcctttaatttgttcgtccaagccttcgttcaatgttttgcattgcgtggcaaaatacagattatctgtttcctcagctccaaacattttaaacaatcgcttttgcaagcggggatagtcatcttcaagcgcaaagtaaagaacggttgattttcgcactttgtaaccccataacggtgtgcctgtgcttatgtgataagcaagctgtgccatcataaaacttttacccacctttggagagcctgcaaaaatataagtacccctttgtagcaaaccgtctatcaacggtgtttgaacattaaaaaccgtatcatacaaatcagccatcgaaaccgtttgcaaatacgaaggttgcatttgacgaaacatttctctttgcatttcttcaatttccttgaaatcttgttccaaatcggttatactatcagtacatacatttggtgactgctctgtatctgcgccaacagatacattcggagcggtcatttttttattttccattttaatcatctcctttaagtccgccgagaatatcggtaatcatttcgattaagtcaagcagttcgtcattgacttcaccacctgccttaattcgtttaagctccgcaagcacatcggcaaggttatcacgcagtgccttatacactctcggattgccttgcactgttatttctcggtgcgttaatcgtcgtgtgatatagtcctgcttatttaagccggacaaacgaacatatctttcgatttgctcccactcctccggcgaaaccctaaacgctaccgttttatttcgccagcggttgtgttcatctctgtttttaagcgacatattatctacctctttccatttccaatttgtctgccatttccgtctgctttgacgggaacaaatgagcataattgtatgttatttctatgctttcgtgacccacacggtctgcaatcgccgttgcggaaaatcccatatcaataagtaagctcacgtggctgtgtcgaatatcgtggatacggattcgctttactccggcttgctttgagcctcgttccatttctctgtataaataactttttgtaacagggaacattctgtcgtctaagcctacatcatagagcattttcaaatagtcctgtatttcatcgcaaagaaagttcggaagtttgattgtcctgttgctcttttctgttttcggcgaagttataatatctctgccgttcaagtgctgaaatgacttgttaattgtgacagtctgcttttcaaaatcgaaatcctcaggcgttaatgccaacaactcgccctcacgaatacccgtccaatagagcatttcaaaagcataataggatataggcttatccatcatcacatcggcaaatttaagatattcatcttttgtccaaaagagcatttcacgatttttctttttgcccatacttcctgctttttggcaaggattttctttcaaattatagtacctaactgcgtggttaaagattgcagacaactgattgtgaattgttttcaaatacaccggcgaataaggcttgcctttatcgtccttgtaattgataagttcattttgccaagtgataatttgctgtgccgttatgttgcacattttcagcttaccgaaatatggaacaagctttttatcaataatatgtttcttggtttcccaggtattttctttaagtcgagtctgcatatcttcagagtaatgttcaacaaaactcttgaaattcatatccaaatctccaccaagcttattaagctgttctctttcccacgcctgagcctcacgttttgttttgaatccacgtttttgtgattgctttcgttcgccattccaatcggtatagcgatagagaactcgccaagtatttgttttttcttctttatatactgccataaatttacctctctttcttgtcggcaccgtaacaggtgcgttccataaagtattgtttgtttactcttccggaaatcaccatatagccttttttggctaactcggcattgagcttttggacgattttgtaagcataggatttggaaacacccaattcctgcgccacctcatctactttcataaagcttgcactttccatttcatcacccctttctgttttagatataattttcttatttattgtcggatactttctgaccgcattccgatttgcccgagcggatacaccattaccgtgatgtatgacggttattcagttgtttacaaatagcttaacgctatttgcttaatgattatactaaacatattccgttatgtcaagtggctttcgtaaaaatattaaacttttttgttttatgttgcttgacatatactaaacatatatgatatactgattgcacattacataagtaaggagtgcattttaatggcaatcggagagagaataagattctttcgtaatctttgcggaatgacacagaaatatttaggacaggtggtcggatttcctgaaaagactgctgacattcgtatggcacagtatgaatccggctcaagaacaccaaaagcagatttaacaaataaacttgcagaggtttttgatatatctccgcaggctctttctgttcccgacatcgacgactacatagggttaatgcacaccttgtttacattagaggacagatatggattgacaatagtaaagactgaaaacggtgtttcaatgtatgcagaccctaaaaaaggaaaagatgctgccgagctttcagaaatgcttaatgcgtgggctgaacaatccgagaaatatcacaacggcgacataaatcgtgacgaatacgataagtggcgctacaattatccaaagtatgatgaaacttccagctttgtaaaagtaccgtcacagaatctcagcgatgctatggttgaagctttcaaagataggttgaagaacgattaaaaatgataaaacaaaaagagctatcagactttcaaaaaatctgatagctctttacttttacaataattcaaataatgttgccattttgttgccacaagggacactcaaatggctaaatccgcataactacgggctttttcacgggtgtgaaattattcccactcaatagttgccgggggtttggaggttatatcgtacacaatgcggtttacgcccttaacctcgtttactatgcggcgggaggcggcgtcgagcacctcatacggaatacgcgcccagtcagccgtcataaagtcgctggttgtaaccgcgcggagcgctacggtgtagtcataggttctgaaatcgcccataacgcccaccgagcgcatatctgtaagcacggcgaagtattgacctatctcacggtcaagccccgcgtttgccacttcctcgcggaagatagcgtcggcatcctgcaaaatagcaattttctcgcgggtaagctcgccgataatgcgaacgccgagccccggacccgggaaaggctgacggtacaccatattttccggcatacctagctctaagcctaccttgcgcacctcatccttaaataagtctctgagcggctctattatctcgtcaaagtcaacgtgatcgggcagaccgcccacattgtggtggctctttataagcgcggcgtcgcctacgcccgactcaatgcaatcggggtaaatagtgccctgaaccagataatccaccttgccgatttttttagcctcagcctcaaatacgcgtataaactctctgccgataatcttgcgcttttgctcaggctcgcttatgccgcgcagctggcccaaaaactgctcggacgcgtcaaccgatataagatttatattataagtgcctctgaacaggtcgtttacctgctttgcctcatcctttctaagcagaccgtggtcaacaaaaatgcaggtgaggttttcgcctaccgccttgtgcaaaagcagggctgcaacagagctgtccactccgcccgaaagggcgcaaagcacctttttattgccgattttgtttttaagtccctcaattgtgcgggcggtaaaggaggacatggtccactcgcccttgcagccgcagacgttataaataaagttccttatcatttgtgagccgagcggagtgtgcataacctcggggtggaactgaacggcatacagcctttccttggggttttccattgcggcaactgggcaaacatcggttttgcctacgattttaaagccgagcggcacctgctttatgtagtcggtgtggctcatccagcaaacggtttttgagggtatatccgcaaaaagcttgctgccgttatccacctttacctcaaccttgccgtattcgctggcgcccgcagttacctcaccgccgagcatatgcgccataagctgtgcgccgtagcaaatgcccattacaggtatacccagctcgaaaagctccttactgtaaagcacggcgttttcgccgtatacgcttttgggtccgcccgttaaaattattcccttatatcccgcagcctttatttccgcaatcggggcggtgtaggggcgaatttccgagtaaacgttattctctcttacacgccgggcgataagctgattatactgaccgccgaagtcaagcactaaaatcttctccattttaacctccgcttttttaaaaaagatacacatatattatataataaaccgtcgggtttgtctatcccgaaaagcgcagtttttaaatatttttattttctttgaaaaaaatagagacaagagcggatttttagtgtataatgaatttattatgctttataaggagcgaattcaattatgtgtggctttacgggctttacaaattatataaaggacgacggcacggtgctcgggcgtatgatggacagaatcgtacacagagggcctgacgcgtcggggcagtttgttgataccgatattgcgctcggattcaggcggctcagcattatagaccttgccgagggcggtcagcctatgttcaatgaggataagtccctggtgcttgttttcaacggagagatatataactttaaagagctgcgcgccgaattacttgaaaaggggcatattttcgccaataattccgatagcgaggttctgctgcacggttttgaggaatggggcgaaagcatggtgccaaggcttcgcggaatgtttgcgttcgttattttcgaccgccgcgaccgctcgctttttgccgcgcgagatatgttcggcataaagccgttttactatacctttatgggtgaaagctttattttcggctctgaaataaagtcgtttttagagcaccccgatttcaaaaaggagctaaatgaggaagcgcttgcgcattacctttcattccagtattctcctaccgaggaaacatttttcaagggcgtttacaagctgccgcccgcgcattatttcacctttaaaaacggcgaaatgaagaaaacgcgctatttcaagcccgatttcaacgcacaagacggcgtgcttgagtattttgccgaccttacagataaggctgtgcgcgaatcggttgcggcgcataagatagccgacgttgaggtaggctcattcctttcaagcggtattgattcaagctatatagccgaggcggcaaacgttgataaaacctttaccgtgggctttgaaagccccgacggcgaccgctacaacgaaatacactttgcaaagaaatttgccgatacaataggcgttgagaatatttcaaaaattataactcccgaggaatactggggcactttcccgaaaattcagtaccatatggacgagccgcttgccgaccccgccgcaatagcgctttactttgtaagtcagcttgcgagcaaatacgttaaggtggtaatgtcgggcgagggagcggacgagcttttcggcggctaccgcatttatcaagagccgataacccttaccgcttatgataagctgcccttcggtattcgccgcgttatttcaaaaatctgcgagcatttaccgcaaaaacacggcataaactaccttgtgcgccgcggcaaaacaattgaggagcgttttataggcaatgcctcaattttcagcaccagggagcgaaacgcgctgcttaaaagcgagaccgcgaaaaaagccgtatcgccgcaggtgctttgcagtaagttctatgatgaggttaggggcaaagacgatattaccaaaatgcagtacctcgatataaatatgtggcttatgggtgatattcttcttaaagccgacaagacaagtatggcaaattcgcttgaattgcgtgtgccgttccttgataaaaaggttatggagctggcagaaactataccgcttaattgcagggtgagcaccaaaaccacaaaattagcgctgagaaaagccgcagagaaaactctgccgaaattaaccgccgaaaaggataagctgggcttccccgtgccgataagagtatggcttaaagaggataaatactataacatggtaaaggaagaatttacgggagaaatagccgaaaaattcttcaacaccgaaaaattggtttcactgcttgataatcactgtgcaggcaaggcggataacagccgcaaaatatggacggtgtatacctttataatctggtataagcaatattttacggaggtttaaatcatcccgagggggattttatgctaaaaaggcgtttaaagccgcatggcccaaaacaatacccataatggctggctttctgtttttgggcttttcctacggcgtatatatgaatgggctctataataaatgttggggtaagcaagtagagcctacgaagaaaaaataagataaaataaaaaaggctctttgtcaatagttggggtaaagagttaataataattgaaaagctgaaaaatatacatgaataaaagcgcccccaccggctaaacctgaccggtggggacgtgttgttttatattcaggcgtttgccgcctcacggtcggcaatttcatccagctttttgtttctgaaatatagagctacgtctattgaaatttcaataaagttaagcacatagaagaaaaagcttaaataaaatataaagcccgagctgccgcccgttacctgtataatctttctcgcaattccgcaggcgtagcctataagcaaaaacacctcaaagaaaaggcttttgccctttgcggtgcgggagattatagatttgcgaatggaaataggccacgaaagcccaaagcagaatatagtcagcgcttcaagtaaatcggtaatcatttttaaaccccttatataatccgaagtccgaaaagacttcggatttttcgttattttatttttgccttctgtaatcaggcaaaagtttcggagatatggcgtcggtcttaatgcctgccgcctcgcgctcggcgtcaaatttgttaatgtgttcaagagttaatttgcccaccttaacgtcctttgattttgccgccgcgtttttgcccgcggttctgccgaatacgattatatcaagcagagagttgcccataaggcggtttctgccgtgtattccgccgacagcctcgcccgcaacataaagattttcaacgcatgtgctcatgcccgtaacgttaatatctataccgccgttttggtagtgcagggtcgggtatacaagtatcggctccttgcgaatatcaataccgtagcttgcgaacatacgcatcatagcgggtattctcttttcaatagtgccctcgccgccgattttttcaatcatcggggtatcaagccaaacagccttgccgctgcctgtatctacgccttcgtcgcggtcggagcactctcttataatggaagccgccgcaacgtcacgtgtttcaagcgggtgcataaataccttaccgtcgcggtttacaagcttagcgccgagtgaacgcaccttttcggtaacaagcgcaccgaatatctgctgcgggaaagcagcacccgtggggtggtactgcaatgtatcggcatacaaaagctttgagcctacacggtaagccagcaccagtccgtccgccgtagcgccgtagtggttagaggtcgggaagccctgatagtgcattctgcccgcaccgcccgttgcaataataacggttttggcgcgcgccaccataagctcctttgtctccatattcataagcaccgcgcctgcggcattgccgttttcatcaagaatgagctcaatagccgaggtgaagtccacaacgggaataccgcggtttaagacctcgtcgcgcagggtacgcataatttcggcacccgaataatcctttgcggcgtgcatacgctttctcgaagtaccgccgccgtgggtggtaaccatggtgccgtcgggcgttttatcaaactcaacgccgagttcattaagccacttaatagcctcgggtgcgtcgcacacaagctttgaaagcagttcgcgttttgcagcgaaatgaccgccgccgaatgcgtctacaaagtgtatagccggcgaatcgttcggtttatcagccgcctgaataccgccctcagccatcattgtgttggcgtcgcctatgcgcagcttggtaactatcatagccttagcgccggcattgtccgcttcgattgcggctgaagcgcccgcgccgccgccgccgattataagcacgtcaacatcatatgtaacgtcgtttaaatcaacgtcgtccgccttaatgcggctgtgcgcctcaagcatttcgcaaagctcgtgcggcacctgctcgcccttgttcggccctattttaagggtggaaaattcgctctttttataatcggggtggtaagccgccaaaagggcgtccttttcgtccgcggtcatacggcgcggctctaatgcaatgttatcttctcttgcagcctcaaccgcctttaaagatttttcaaattcttttgaatacataatctgcgcgcctccttatttctcaatttcgcggttgttgtaaagctctttaagctcttcaacaggcttgcccataagcgactctataatctcggtaaacgcgccctctttaatttcctcaacgcgtttttcaaggtgttctgacttcggctctatatacttgccgttaagtctgcgcgcaagcattgcaacctgcgggtgagaaatacctgcggggcagcgggatgagcacacgccgcacataacgcagtcaaacgattcctctgcgcacttatcaaactcaccgcgctgcgcatacgctatgtactgcataacgttaagcgactgcgtgcagctttttgtgcaggcgttgcagcctacgcaggcataaatttcagggtaaagctgcatcataatctgctcggtgggttttatcttttcaatatcgtaaacctgttttaccagcgggaagaaaggcagagttgcaacatacatattgttctcaaccttggtctggcaggcaaggcaggttttaagctcgcggtcgccctttatgcggtaaattgtggcgcaggcgccgcaaaagccgttacggcagccgcagccgcgtactaactgatagcccgcgtattccattgcgcgcattattgtaaggttatccggcacgctgtatttcttgccgaacaggtaaacatcaaccatagtatccatttgttttcctccttattccttatcagtactcgtcgggcagctcgtctatttcgtcaaagcggaaaacgggtccgtccttgcagacgtattttgcgcctatgttacagcggccgcatttgcctatgccgcacttcattctaagctccattgtggtgtaaacctgggttttatcaaagcctaattcctggagccccgcaagggtaaacttaatcattataggcggtccgcaaagtatggcgattttatcggttgtaaagcccagttccttaacataattcggaacaaagccaacgtgaccgtcccactcgggctgctcgcggtcaatggtaaggtgaacatttacgcccgtatcatttgcccattcgtcaattatttccttgtagtcaacaaggtcctgcttactgcgagagccgtaaacaatatcaatcttgccgtagcggtcgcggtagtggcggcagtagttaataaccgagcgcaagggcgcgagacctatgccgcctgcaacgaaaagcaggtcgtgacccgcaaattcggtatcaacggggaaaggtctgccgtaaggcccgcgtatggttatttcctgccctacctccatagagtgcagccactctgtaacgcagccgcatttctttattgaaaactccataaactcggtgtttgttggggaagatgtaattgagaacatagcctcgcccacaccgggaatggaaagcattgcgcattgaccgggcatatgctcgaaagcctttttgccgtcgggcgttacaacgcggaaggtcttaacatcgggagtgtctatcctgatatcggtaacaacgccgatcttcggaataagcggttctttaatatcagccatttgtgttacctcccagttttttcattacctttacaatgttcatctgtatcgggcattttgcaagacatctgccgcagcctacgcatgagaacataccgtcgttattcgtcgggaaatacacaagcttgtgcataaacctctggcggaaacgctctaattgagtcagtcgcggctgacctgcggacattttggtaaattcggaatacatacaggaatcccagcagcggaaacgcttaacgccgtgacccgtgttgaagtccttaatatcgtagcactggcaggtggggcacacaaaggtgcaggtgccgcagccaaggcagctttctgaaagctctttccactcggggcgatcgaaaaattcctttgtcttgccgtcgccgaatgcgtccgctttaaggcttgctaacggcagcttcgccattctttcgcgcgttaccttttgctgctcggccaccgccttgttatcggcttcctcggtaatgccgtcaatcgcctttaaaagtttttcgcccttttcggttttagcgtccatataaagcgcgtcttcggttttatagcataccacatcgcccgcaggctctgccgcgtctataccgaaggtggtgcaaaagcaggtttcattcggctttgtgcaagcaagcgacattataaccccatgctcgcggcggtttttataatagctgtcctgcggctctgccaaaaatactttatctaacacgtcaaagctcttaacatcgcacgcacgcacgccgaaaaccacaaaatcctcggtttcgctgcgggtgtctataacctctatctttttgccctctaccttaaaatccataagattttcggtttgggggaagaagaaatcctttgcgctccttacggtgttaagcgcgtttgaaagctttttcccgtcttcccatttttcatattttgcgcctgttttggtatcaaccggcatataaagcacattgttttctgcaatggcggagaaaagcgaatctattttttcaagcgatattttacgcattttcattcctccttacagcgtcgcccggctcaatatcctctgtggtgtagtttactatcggtgcgcgtgagcctacctctgcgcctgcctgatattcgccgtaaaagctgtcaatatcctttataaacttgcggttgagcaggtgcagcggaatgtgctggggacatacccttgagcactcgccgcaatcggtacatctgcccacaacgtggaaagcacggataatgtggaacattttttcctcaaactcgtttgaagccgccttgttttcaacgcccgaattggggttatcaaacacgcacttttcgcaggtgcaggcggggcaaacgtcgcggcaggcgttgcagcgtatacagcgggataattcgttctgccagaaagcgaaacgctcatcgggggtcattttttcaagtttttcaacctcgtcaaagcggtgagagtctaaaacagtcccgtcctcgcccaaaagttcatcataggccacgtgctttttggatttgcagtttaagcacctgtcgggcaaaagctcgtttctttcaagcgttatttcgccgtcaaacagggtttctattaccaccttatcgccgttatcggttaccttggcaatgccctcggcattgcttttaattttgcctgtatcaagcataccgttacacagcacgcccacggcgtaaaccttttcacggtcaaagcggtgctcggttaaaagctggttaaagctgtatgtatcgcagggctttaagaaaacaagaaccttgttttcactctttcccgtttcctttacaaggtactttgaaaagttagcgccgcaaaaatcgccccatacaaactctttttcaatatcctcggcagtagtgaaaagtgcgggggtaatatcgtaatcaaactcgccctttttccagccgaaaacacggtcaaccgtgccgtttttaagtagttcggaggctttattcactaaaacttcgcgttttatttcttgcatcttaaatcctccaatctcttgttttcacccagcgccgcaacggtctttgcaaaatcgttcattgtggcggcaaactttgcgccctctgccgcagatacccactcaacgcgggtgcgctccttttcaatgcctaaaaagtcaagcattgagaaaagcagagccatacggcggcgggtgtaatagttgcccgaggtgtagtggcagtcgccggggtggcaaccgcaaagaattacgccgtctgccccgcgctgaaacgcgcgtaaaataaacatcgggtttactctgcacgagcagggcacgcggattattttaacatcggcagggtaattaagtctgttgtttcccgcaaggtcggcaccggcataagagcaccagttgcagcaaaacgccactataagcggcttatattcgtttacttgcatattgcgtctacctccgccataatctgtttattcataaagccctttaggtccatagcgccggacatacaggcaaccgtacaagcgccgcagccctggcacacagcctcgtttacaaccgctacgcggcgaacctttgtagttctgtcgggcattctgaattctttttcaacatacgaaatagcaccgtaggggcaaaccttttcgcaggttgagcagccgttgcacatcatttcatcagagtgcgcaacgcaggggttacccgtaagtttatccttacacagaagtcctatgaccttagaagcagccgctcccgcctgagaaacggtttcgggtatatccttaggaccttggcaggtgcccgaaaggaacacgcccgcagtggggctttcaaccgggcggagcttggggtgcgcctcagtaaagaaatcgtttgtatccatactggcagtaagcattgtagcaagcggacgggcggatttatccggctcaatagcggcggcaagcaccactaagtctgcgtctatatgcagctgtttgccgtaaatcaaatcagagccctgaaccttgagcttattgccctcaggcgataccttgcccaccataccctttatgtagtgaacgccgtattcctcaaccgcgcggcggtagaactcatcaaagtttttgccgggtgtacgcacgtctatatagaacacataaacctcggtatcggggtatttatcccttataagcattgcgtgctttgcggtgtacatacagcatattttagagcaatattccttgcccttttcagcgcatgcctcacaccttgaacccacgcactgaacaaaaactatcgtgtgcggatgctcatgatcggacgggcgcagaagcgtaccgcccgtaggacctgccgcgttcataaggcgctctaattcaagcgaggttataacgtcctttgactgggaataagcaaactcgtcgaacttctccatggaaatggggttaaagcccgtagcaactactattgcgccgtatttttccttaacatactcgtcctttgcctcgtaatctatagcgccggcggagcataccttggagcaaacgccgcatttgcccgttttaagcttcatacagtggttcgggtcgatagtggcaaccttcggcactgcctgtgcgaacggaatgtaaatggcgctgcggttatccataccgaggttaaactcgttgggaaccttcttttgcggacatttttcggtgcaaagcccgcagcccgtgcatatatcctctttaacgtaacgcgcgcggcgcttaatggtaacctcaaaattacccacaaagccgcctacctcggttacctcggagtaggagaaaatgcgaattttatcgttctgtgccacatccaccattttaggggttaaaatacatgcggcgcagtctagcgtcgggaaggttttatcaagctgtgccattttgccgcctattgtcggcttggtttcaactatatcgaccgggaagcccgcgtcggcaatatcaagcgcggtttgaatgcccgcaataccgccgcctataaccaaggcgcgctttgtaacggggctttcgcccggggtgagcggcgcgttaaggtttacctttgcaaccgccgctttggcaagtataatagccttttcggtgcctatgggcatttccttatgtacccaggagcactgctcgcgtatgttggcaatttccaccatataggggttaagtcccgcagaagccgcggttttgcggaatgtagcctcgtgcatacggggcgagcaggagcaaaccacaatgccggtaagcttataatcggcaatggctttctttataatctcctgacctgcctgcgagcacatatactgataatcggtggagaaaacaacaccgggttcagttttaagagcctctgcaacagcctttacatcaacggtgcccgcaatgttggtgccgcagtgacatacgaatactccaattctttgcatacgttattttctcctttcctatttagaatatttgcgcatggcgctcattatcgcctgctggggaatatcgtcgttaattttttcgggaatatcattagcggtcatatggttgtttcccttttggcgtattgcttcaaggcgcaccgcctcaattatctttgccggctccacaccgcgcggacagcgctcaacgcaggcaaagcaggaaagacatttgtaaaccgattccgatttcataagggtttcaatatcgcccgtttccaccatataaacaaactggtgggggtggtattccatttcatcatatgaggggcaggtgcccgagcatttgccgcagcgcatacatttaagcggattaacgccgcttgcccttataacctgctcctttaaaagctcttttttatcaggcatttttatcctcctttacgcctaacgcctcggctaataattcggtgaagtaaacaacgggtatattgctgccgttatgcaccaaattgtacttgcaaagcgggcaggcggtaaccgccagctccgcgccgtggctttcggcactgtttgtaacggcgttgcttttacgttttgcactctcggggtcttcaagcgcaacatagccgccgcagcactcgtttctgtaagggtaaattacaggctctgcgcctatcgcccttataaactcctccataattgcggggttttcggggtcgtcaaacgccattaccttgccggggcgcaaaagcaggcagccgtaataagcggcaatttttctgcccgttaaggggtttacaaccttttctttgattttatcaaagcctacaacgtcgcgcaaaagctcgaaatagtgcataacctttgtctcgcccgaataaggctctcttttttccttatcttgcgcaaggtacaggttagcgcggtttctgaatgtttcgtcgttcgttatttggtaattagtctgtttaataacattatggcaggcggagcataccgtaacaagcggtctttccgcctctttagcggctataagcgcacgaacggaagataactttgatgctatctcgtcgttattgcttacaaacacgccgccgcagcactgccagtcctctatctcgcataattcaacgcccaaaacctcggcgcatttgcgggcataaaggtcaagctgtttagcttttgtgcggagcgtgcagccgggaaaatagctgaccttaatcattatttttcctccctgaaaaattaaaccatctgctcggggtggaatacctcgtcaaatttttcttcggttaaaaagcccaattccacgcacgcctgctttaaggaaatattgtccttaaacgcctttttggcggttttagccgcgttttcataaccgatataggggttaagcgcggtaacaagcataagcgaattgtgcagattgtgatacattttgtccttatttgcggtaattcccacagcgcacttattgttaaaggaaacaatagcttcagcaagcaaacgggcggattgtaagaagttgtaagctgcaaccggcataaatacgttaagctcaaaattgccctgtgatgccgcaatacccacagccacgtcattacccattacctgaacggcaaccattgttaccgcctcgcactgggtggggtttaccttaccgggcattattgaagagccgggctcgttttcgggaatgtgaatttccccgagaccgtcgcgcgggcccgatgctaaccagcgaacgtcgttcgctatcttcatcatatcgcaggcggtagccttaatagcgccgtgcgcaaaaacaaattcgtcctttgaagtaagtgcgtggaatttatttgcagcggttacaaacggcttgcccgtaagctctgcaacctttgcggcaacaagctccgaaaagcccttaggtgcgttaagacccgtgccgacggcagtgccgccgagagccaactcataaagcggctttacagccatttttaaaagctccgcgtcgcgttcaaggcttgccctccagcctgaaatttcctggctgaacttaatgggagtagcgtcctgcaaatgggttctgcccgattttacaataccctcgttttcagcctctaattttttgaaagtatttattaaaagctctattgcaggcaaaagcttatcctcaatagctacaaccgccgaaatatgcatagcggtcgggaaggtgtcgtttgaggattggctcatatttatatcatcgttcgggtggcaaagcttttcgcccgcaatttggttagcgcggtttgcaataacctcgtttgcgttcatattggactgcgtgcccgaacccgtctgccaaacaacaagcgggaaatggtcgttaaggctgcccgatattacttcatcgcacgcagcggaaatagcctttaccttctgcgccgtcattttttcgggctttagctctgcgtttgcaagcgccgccgcctttttaagtatgccgaaggcgtgggttatctcacgcggcatggtttcaatgcctacgcctatttcaaagttttcgtggcttctctcggtctgcgccgcccaaagtctgtcggcgggaaccttcatttcgcccatagaatcgtgttctatacggtattccatttctgtattaccccttatatgtcaagattgcttataacgtcctttaatgtatcggcgctcttgcgcaacagcattacttcttcgtcggtcatgggaacgtttaccttgccgcgcacaccgtagtgacctaccatattaagggtgcttaaagctacatcctcaatgccgtactcaccgtgcatcatggtagaaacggtcattgtggtgtcaattccgcaaagcaggcacttgcatatgtgacataccgataccgaaacggcatagaatgtagcgccctttcttgcgataacgcgagcgcccgattttcttacatactgctcaatctcgccgaaatcaagctcgggggtgttaatgccgggggtggttataagctttttgcactctttaatcggaacgttcgagatattggcaaccgaccacggaatgaaagaagaatcgccgtgctcaccgaaaacataagcgtgaacgttgctctggtttatgttgtagtactccgaaagtcttgagcgcagacgtgcggtatcaagaatagtacccgagccgattatgcgattttcgggcagacccgacatcttatagaaagtatatgtaagaatatcaaccgggttgcttactataatataggttgcgtccggcgcgtatttggtaatttcggggattatctgctttgttatgtttacgttagtctgtgcaagctccagtcttgactgacccggctttctcgcaatacccgaggttacaattacaatgtcggaattaaccgcgtcgcggtaatcgcccgcatagattgagcaagcgccgcaaaagggtgtgccctggcggatgtcgagcgcctcgccgagagccttttcgttattgatatctatcataacgatttccgaggcaagccccattacagtaagcgtataagcgatggtggaacctacgcttccggttccgataattgatactttgttcataatgcaccttccattattacaatattctacttattataacatatatcgagcggttttgtaaatacactatttgcataatcccattacaaatatgatatattgaaaaaagatgcaaagtgaaaccacacttcgcatcttttttatctatttataataagaaaactctatagccgttacggaatcgtttgtggggtcaatataaaccgttataccgttgcggcggtcgtcctttgaaatgaaataatcaagataataattattttcggcaagtccgtaaaaatgcgagggtgttccgagggtatcgataatatcggtaatcgccattttattattaacgccgtttacgctgaactcgttatatttttcggtattctgataaaaattattgtctatccgcaatttaacgatattgcactttttcattttaaccgagctttttgtggaattatagaaaaccgctttaaggactgcgcccgcctcgttttcaaaaaccgcgtctacagtgtcgcaggcgtatataagcgattcctcatcatacttgccactgtccttaaggtgccagccatgcttttctagcgcggcaagcgttgtgggcgcgtcaagctcgctgcccgcgtaatttacgttgaacctgaactttttaccgaggtaaacgtttgaataattttcctcgtcaaaaaggcttatatccacaaactgcggcataaccttatcgtccgacattatggcgggtcttttcacgttttcgggcgcttttttcgccgttttctgcacctttacgggctcgctgctctgaacgccgtaatccttatcaacgggggcgcaggcggaaagagaaagtataacggcaaaaaccgccgaaacaagtattgcaaaagctctttttttcatattccgctcccccttaaggtctatatttctattttattccacgcgaggaaaaaagtcaacaccaacttttaccaaagtgcaaatcagtgcccgcgcggcactatattaagtttatccttttcttccccgaggtctgcgcgcagtaaagctataaacaccacaagcagcggtatttccgccccgagcagcgccctgccctttaataccgtgcacagcagagccgataccaccccgcccgccgtgaaagccgctatcattgataggtgcataagcagctccgccaaaatatctttatttttgtggcgcagccattttacgaatttaacgcccgtctgccgcaggtggttggtacagaacgtggtagccattgcaacatggcgcgattgcctgaatgtattatactgcattgaagccacaaaatttattgccacctggcatatttgcggcggcgcgtcgtcgggaataaaggctatccctaaaaatgccagcatttcaaagcctataaagaatgtatcccaccgcattttaagcgtagagtttgtgtatttcggcataagctcggatattaccgcgcccgcgaaatacgccgatatgggtattaaataataaagcgcttttttaaagttgaacgtgcctatatttacggacattaaaacaaaattcgccgtttgcgcattgcagaataccctgcctttaagtataaacgtgtacgcgcccaaatatccgcccacggctatcatggttacaaacacccaaaatttttcacattcaagctcggcgcgctctgcctctttattaccgctcattattttctcccaaatcagtttgtgccgcgcctgctttcaccgccgcgtctcttaccgccccgtggcatgtaaacattattacctgacaattttccgaatattcccgtaaaaacttcgccgccgttttcattctgcggtcgtcatactgcgcaagcgagtcatccaaaaatatcggcagcgcgccagatgtctcaaatattacgcttgacagcgccagccgcaggcttaaatacgcctgatccgccgtgccgctgcttaaataatccgcctcatggctgccgaactcgccgtttttctcaacgctcatgtcaaacgcctttgaaataagcaccgagccgtaagcgccgaatgtcagccttgcaaaaatatccgccgcctttttctccagcgccgagccgtagctgccgcgaagctcggcaaagctgttttgcaaaatttcaagcgccgtatccgccgcgcggcaaaaatcctcctggcggcttattttctctgtcagctctttaatttccgatttaagcgtttcggggtctggcgcgtttttaaggcttaccctgtcctctgtttccgccgccgttaaagcgttgcgctttttggcaatttccgccgcaaggctttcgtattccgccttaatgccctcaaaatcggtattatccgcagtttcgggcaaagccgctaatttttcgcgcgcctcatcataagaaatattgccgaggtcgcgcgccaaataattaagcctttgctttatctgctttaattgctccgccttttcgctgagtgtatcaagcccgcgcgcaatttcctctgtactcgccgcgggtttataattgccgtaaagctcaaaaagcgttttttcggcggttttacaggcggtttccaactcgtcctttgccctttcgctttcagccaacagctttttctggttttcaagtgccgccgctcccattccgagcgaggtgtttatagcctcaagccgcgccgataaaagagaaatttgctgcaaaacctccgccttatccgtattaagcctttcagcctctgtttcaaaggctttgagtttattttcatactcggcaagcgcgcgcttatccgcggggcgcaaaagaaagcttaaaagcgccgataccgccgcccccgcggcaggtattaaagccgcgctttgcattttaaaggcaaaaagcagcagcgccgctaaaagcgcaaagcccgcaaccgtgataaatacaatatttatgccgctctttttccgcttaacgtcgttttcggttgctttaaggctttccgcgctctttttattctcggaaatattattttcaatttccgcttttttattatttaagccgtcaatttccctttcaatgctctcggctttttccctgccgcccttatcctcggcggtctcggtgctgtctttaagcctttgcacctcggcggtcttatccttcaatttttcggcggcggtttcaagctttgaaagacaccatctcaccttgccgacatacatatcgtctattactccgccgtccgccaggcgcagctgctcccttgccttttccaattcttccttggtctcaagcatttccttaagctttgcggcgttgcgtatatcctgctcggcgtcaattttcgctttaagatatgccgcgcgctcggtttccttttcaagcgtcgccttaatacggtcggcgttttttctgtattccgcgtgcctttcgtatacgtgctctgccttttcaagctcctcgttcagcagtgccagccgctttttgtttttatcacactcccccgctctgccgcttttggaaataagacttaagcgcgccttttgcagcctgtcgcttaccgtgttaaaagataccgattcatcccccgtagttaccatattagatagcttggagtttatctcgctctcggcggacgcgtcgctttccgccttgccgaactgccccacaaaaacgctccgttcaaaggcggcggcagaaagcccgaaaaacctgctccccacatcgcccgatagactctcacgcgtgcctgccgacatatcggtaagggttattttatcacttgaattggttttgccgaactcccgttctaagcggtagcttctgccgacgtgttcaaaatcaatgctgccggctgccctttccccgctccacggggcgtattttttgcgcggatttttagcaagggcggaagacccgcgctcgctgccgtagaacatcattttaataaaggtcataaccgtggttttgccgttctcattctcaccgtatatcacgttaaagccgtcttcaaaatccaccgttttgtttttaagcccgccgaacgcggcaatatatacccttttaattttcatcacagctcacctcgccgtcaaacgcctttaaccctaatttcagcgcctcttttaaattctctttttcttccttctccgctgcgttcagccttgaaagcatatttttaacgaacagaccctttaaagaaatttcgcgcgataattcatcgtaattaacgggcgattcggttttatcccgcagctttacaaaataaagggcgcccagcctgccctgaatttccgccgtgtttacgtccgctgtgcccgtaagttctatcttaaacaggttttcggcgtaattttcgccgtatttttcttttaacacggcaagaattttttccgccgccgcggcgtttgtttcgctgcccgtaacgtcaattttttcataaaggcacattctgcgcgccgtcggcagaaattcaaggcgattttccccttttgatatttcgcctatataaacgcccttttcgcccagctcgtcaaagcccataccctcgggacagcctgagtaagcgaaaaacgttttgccgagccgctgtatttcggtgcgcttgtgtatgtgccccagcgctatgtaatccattccgctgctttcaataaaccttggggtgacggaattataagccgagcccatatcgccgcgcatatccccgtgcagcaccattaaatttatatagtcgtcatcgggcggggcaagcgaaaaacgctcctcacctgccatatacacgctttcaaacgacctgccgtacacccgcagctttatatcgtcaaaggttatgcaatcgtcggtaacccccaaaacataaagattttgcggcagctttcgggttttaaagggcgactccgccgtcagcgggtcgtgatttcccgcggcaaataccaccttaatatcgggcacggcggctattttagcaaacacgggcgcaataagctcctcgggcacgttatttgaatcgaaaatatcccccgcggcggctataacctgcacgttttgctcccgtgccgtatcaattatacgctcaaaagtcataagcgtttcatatcttctcatattcgcgcccgcgccccaaaagctctgtgcggcgcctatatgtatatcggctaaatgcagaattttaacactgttcaaagcatatcatcccctactttttaatataacatttttacagtgatttcgcaagtatgttttgactttaacggtttaatgtgttaaaataaatttataatgaattgaaagaagtctgaaatatggaaaaaaacaattcaaccgaccagctttttgaggctattttaacccttaaaaacaaggaagaatgttataaatttttctccgacgcctgcacgcctaaagaaattcaggcaatagcgcagcgctacacggtaggcaaaatgctttacaacaaggcggtttacagcgagattatagaggctacaggcgccagcaccgccaccataagcagggtaagccgctctataaacgagggctacaaaatggtttttgaaaggctaaagcaggaaaatgagtaactacgaccgctttgccgaggtttacgaccgccttatggacgatgtggactataaggcgcgcaccgattatttgctctcgctttttgaaaagcacgaccgccgccccaccctgcttttagaccttgcctgcggcacgggcggtttttcaaacgagtttgcaaagcgcggcgccgacgttataggggtggatatttcggaggaaatgttagcctcggcgcggcaaaattccgccgagtgcaaaaccgacgtgctttacctctgccagcccgccgaggaattagacctttacggcacggtggacggcgctgtttgctgccttgacagccttaaccacataaccgattattccgctttttgcaccgcgatttcaaaggtatcgctttttcttgaaaaggacaggctttttattttcgacctcaacaccgttttcaagcataagcacatactggcggataatacgtatgttattgaccgcgaagacgtttactgcgtatggcaaaacgagacagaccccgaaacgcttgaaacggatatatcgcttgatttctttataagggacggggacgtttaccgccgcagcggcgaagaattttcagagcgcgcctattccgaccgtcaaattgatgaagcgcttatatcggcggggcttgaaaaggtggctgtgtatgaggatatgaccctctcgccccctaaagacacaaccgagcgtgcaatatatgtcacaagaaaaatttaattcgactataaaccccgagagtcagtttgaaagactttcggggctttactattttatcagttcttttagcggtccgatatcccgatcatttctgacggtaataaacccaatattttcatactcggacgcaggctgctcctcaaacacttccttgtttattaaaatcgcagcctttaaatactcattacacctttcaatttccgattccacggtgtcttgaatttccgcgtgggaaaattccgctcctcatcaagaataaaaggaaaatcgttttcaattgctataaaaaaatattccccccgcttgtctcccggaacggaaacctcctttaaaaaagaaatttttacgccgaatttttcaaattcaacatcattgccttcaattctgccgcaaaccacataatatgcttcatgatgaatcagcgagtccctatcattgccgaggtcccgggataaaatctcctcaacgctattgaaattcagtccgaaatcagccaaaaagccaagcagctcggggtttcttttaatatgctcgtaaaaatttctgcaatcccgacattcgcacgaatagatatgctctgtgtagtatttttcggtctcccctttatcgaaaataatttcggcagaaccgattttagcagtttcaaaagacataataagtccccctgttcattttaaaattataccatacacatccgaaaaatgccagccgcattttattatgatttttaagcataaggacataccgtagcgcaatacatatattatatacggagaaattcacaaaagcgattgcttctacccgcataaaccttttccgcacgtgcaaagcaatgtgtatacaccgcatattttaagaaaaatcaaaaaaatataaaaaagttcttgacaaacaggttatgttatggtaagataatgttcgtcgccggtgagtgatatgcaaaccgggcggtacacatgacgggagcatagctcagctgggagagcatctgccttacaagcagagggtcacaggttcgagccc

SEQ ID NO: 2589 - DNA, 7199 bp, Unknown
  16S sequences of unknown bacteria
tggtgaccccaacgggacttgaacccatgttaccaccgtgaaagggtggtgtcttaaccgcttgaccatggggccatctatattaaacgcgcttccgcgcggataatgcaccttaacgtttatataaaacggattttccgtgttgtaagcaatggtagcggcgatgagattcgaacttatgacctatcgggtatgaaccgatcgctctaaccaactaagctacgccgccatttggttgcgggggcaggattcgaacttgcgaccttcgggttatgagcccgacgagctacctggctgctccaccccgcgatatcaaaatgacctcttaaagcgtcgtttcaaaagaaactgacgcattcaaaagagctaattaataatactaaaaataaatcgatttgtcaactgttttttcataagtttccgaaaaaattcataaaaatttttttgcgcgacgttttgctcaaaaagtccgtgaaaagcaagggaaaccgcccgtttcccgatcagtcgttatcctcgtccatcctgttttctaaaaactttcttacgttgtatccttggcggtaaaggagataggtcattacctggggtgcggaaaagtctttgagcggcacttcttcgaaacggcctgcatcgagctcgctcttaatcatcttataaggcaggaagctgtatccaaatccttgttcgagataatgaaataatttggaagaattatccacctcaagacggaatacataatttttgggaaagagtgaacggataaacgcccctacttcgctcaacgcgaaattgcacatgagataggggatatgcgtcagttggtcctccgtaattccgtcgggataagcgttggcgcctttacccgtcaccaaaaccagcctgtccgaatcgaatacttcgcacacatagcccgtgcgtttcaagggaatagatgaaaatacaagatcgagtacgttatcctgaagtagctgaatgaggtcgatagagtgccccaaaaccacttttacggaggtaatgttgttgtttttcagacagttgtcgatcagaggccgaacgtagctttcataggtggcgttgatagcgcccactgcaaacttgcgcgagtaggcggacacggcattcatttcctccacggaggtttcctgaagctcgatgatgcgttccgcgtatttgaggaaaattttgccttcctccgtcaaggtaacggttttcgaaccgcgcgaaaaaagccgttttcccacttccttttccaattcgctgatacggttggtgacggtggactgcgcgataaacatctgttccgccgcaagcgtgaaatttttcactttcgacaaaaaaataaatgttttaagctcttctgtattcatagaaaaaagtgattatccttatcgattttatctattgcattaattattatagcatttgaaaaggagaaaagcaagcaaaaaggagcggaagataagattttacgcagtttttcttaaatctttgacaatcgttgacaaacgggcgggaaaagtatatactgaaaaggaatgaggtgaatgccaatggaattttcggaaatagaaaacaatgtaaaaaggctcaaggacgagatatcggcggggaatgcctacggggaagcggtgacgctggtggccgcaaccaagacgcagagcgcggaagcgataaacgcggcgatccgcgcgggggtagatgcggtggcggagaataaggtacaggagtttagggaaaaatttgaggcggtgcacggttgtccgcagcattttatcgggcatttgcagacgaataaagtaaaatatttggtgggaaagataaccttgtttcattcctgcgatcgtgacgagcttgcggaagaaatcgctcggctctctttgaaacggaacgtcgtttctcaaattctcgtgcaggtaaacataggcagggaagagacgaagggcggatatgcgcccgaaaatgcctttgaggcatatcggaagcttaaggagactgcggggctgaaggttcgcgggtttatggccatgctgcccgattcggacgacgaaaaattgctcggcgcgctggcggacgaaatgcgttcgctttacgaacgcgcaaaggcggacgatcccgaaatcgcctgtctgtcgatgggaatgagcggcgactataagctttgtgtagagcatggaagcaacatgatccgtgtcggttcgacgatcttcggggcgagaaaatatatgtaaacctttcttgtaaacaaaagtttacataaaagtaaagcggcgtttgctgacaaaatcgacaaaaagcgctatactttttctcaaaaagcggacgcggcaagcgtcctgaaaggagaaggtgacatgcacttttatcagaggctggcagggttaaggaaagatgcgggtctgtcgcaggaacagctggcggaaaaggcgggcgtttcccgtcagacgatattcaaatgggaggcggggcttgcctccccgtctatggaaaatattctcgcgctttgccgtattttcggcgtatcggcggacgaattgatcgggaacgaaacgcccgaggaaaagaccgaaaacgaaaaggcggaaagcattgttcaaaaccctgcccccgtcgatcgcctttttcacttcgaatataaaagcaagcgaacgctgtgggggcttccgctggtgcatatcaatgtcggcatgggattttacagggcaaagggaattttcgcaatcggcaaccttgcctgcggtatagtctctgtcggctgtctgtccatgggcctgttgtcgtttggcgccctcgcgctggggctgctcgttctcgcgggcgtgggtataggcggccttgcggtgggcggagctgctgccggaatttttgcggtaggcggagtcgcagtcggcttcgtggcgatcggaggcgcggcgataggcacctattccctgggcggggcggcaatcgcttcgaggattgctgcgacgtcgggtacggggtatgcgcgggcgccgctggtcgtttcgggcggggtgccgggcgggaattatgccgtgctcgtctccgatcttcaagggctgatcaatgcggccaaagagacgtttccttccgcgccgcgatggatactcgaattgctggcaatgacggcattatagctttaagcggataaaaacggccgaaattgcgtttgtaacctcaaatgatacgcggttttcgtcaaacgcaaccgtaatgcgcttgaaattgcgtccccgttaaggtataatggaaatatcttaaacgaggcaaggagtatgaaaaaatgagtttcggcagcaacgttcttttttatcgtaaaaaattcgggatcacgcaggaggcgcttgcggaaaagctggaggtgacgcggcagactgtatcgagatgggagacggacagtgcttttcccgacatggataaactgctgattttgtgcgatcttttcggctgcaatatggaagtgctcgtccgcggaaatgcggaggcggaaaacgcacagcgtcacgaggccaatctcgaagcgtataataaacacatgaacgtttatacggcgcagataacttcgggcgtaacgcttattctcgcgggcgtaacggcaatgttgtttttatctgcggcggggatcagggaagtggtcgggctggtgacattcttcgtctgtatcaccttagcggtgtttatttttgtggcgggcggcgtagcgcacggcaatttcatgcgggaaaatccccgtgtggaaaaatattctgcggataaagtgagcgcattccgccgcaaattgccgtggtttatcgcgggcgcgacggcattgattcttatcggcgtcatcgcggtggtggctatgacctacgaagagggatacgcgcccgaaggctttactttggaaggctgggaaggctttgccgccggcatacttctgacggcggtgacgatagcgtccgggctttatgtctatgcaggcatgcagtcggccaaatacgacgtgaaaaattataacaaggaatgtcgtaaggaaggatatctcgaggagtcggacggaggagaaaatgttcccgttcccgaagagcgcgagaaaaaatcggaaagattgatcggttcgatctccagcgtcatcatgctgtcggctacggccgtatatctggcgctcgggtttttacggaacctttggcatcccggctgggtggtgtttgcgatcggaggaatcctctgcggcatcgtttccgtcgtcgtcaaggcgatctacggggaaaaataaaacggatagaattttgaaaaagcgtcgtcggatttcggcggcgtttttttatgaaaaacaaaaatttttccgacgtttgacaaacgccgtgcaaatgtgctacaatgatatgcgaaatatttcaaacagccgcggctgttttccatagtatgaacatactatggctgaaagaaattagacggcttttaagggctgagagagatgaaagataaacaaagaaagaaaaagaacagaaaaaaacggatcgccattacgttggcctgtattattttttttgtttcgagcgtactgatcggtttgcagatcggggtgatttacaccgaccatacctggaagcattggtatcccgattacaagaaagaggacatttccgccgtgcttgagaaggaaactctcgacgaggcggattacgcccttttatacgcgcagacggggcttactaaaataggggttgacggattattgcaggagaaccctgcgagcggcaaagcgaaaatgctgaagattcaggatttctattttaagaagcatacggtttcctgcgatcggtttaatccttatacttactccgaaacgatcgaggcgcacgctccgctcgggcatttggaggacggggatatcatcgtctcggcgaccacgcacgtttcgggttttcggctggggcatgccgctctgattatcgacggaaaaaacgaaagaatggcggaagcgtttggcccgggatcgaaaagcgaaattacgagcgtgcattcctttacaaatcttgccgactttatgattctcaggccgaaatttgataaagaattccgcgaacaggtggccgcttacgcaaaggataacatgatcggcgcggattataatttttctatcgggatactttccaaaaagtacaacgaagaaaagtttacgcgcacacagtgcgcgcatctcgtttggtacgcctatcggcatttcggcgtagatctcgattccaacggcgggctggtggttacgccgccggagatcgccaattctccctacgtggaagtggtgcagatattcggcttcgatcccgtgaagctttggaaataaaaaaacgctgcgtgcctcatttaagcatggatttgtgtaataagtgacaaagacggggatttttgttgaaaacgaaacaaaatagttttatcgctttccgaggcgtttataagtagctatccgaagcggaacaagcggcggaaaaacggaaaggagaaagacaatgaaagattttaacgaactttgcagatcggtggaggagcttagccctttggaatacgcggcggtattggggcggacctcgctgaaaattatgcccgcgatacgggcgttttcggaggacggaaggacgtgcgcggaagtgctggcggcttttgtcatcgcttcggtatatgcggacggcaagctggacgaatcggaatatcttcttatggcgcccttgctcaaggcgtttttcggagaagatttcgattttgaggatgcgaaaaaattggcaaaggaatggcgaaaagaaggaagggctgtaaaaaaagaggtcgattacctcgtggattttctcggtaccctttcggaagagctgaaaggcgatattatttttgcttgtctgctgatgtgcgcggtggacggaaaagtgtcgttaaaagaaaaagcatacatcaggcagctgatgagatgattgacatcgaggtaaaatactccccgtccgacgcctgaaagcgtttgggcgggggaaaatttttttaagcaaagttcgacgcttgctattttttgcaaggtgtgatatgctaaagaaaaacagcgggaggaagaggtgaacgaagtctatacaatgatcacgggggccacaggcggcttaggcggagcgtttgttcgtctggcggtaaaaaacggcgaaaatcttattttgacaggccgtcacgaagagaagcttcgtctgcttaaagaaaaaattctggcggaaaacacgggcacggatgtgagaatatttgcagtggatctttccgatgagggcagcagggaagagacgattcgtcagatcgcggcggaacatttgaaaataggccgtctcatcaacgttgccggggcggatattcaaaaagcttttgccgaatacacgcaggaaaagctttgctttcaatgccgcgtcaatttcgaggccgccgttgcgttgtgtcgctttgctttggaacggcgcacagaggaattggaaatcctcaatatttccagcgtttccgggctttatcccatgccctattttgcaatatacagcgcgacgaaagccgcgcttacggccttttctctggcgttacgcgaagagatgaagggcaaaggtgtgcgggtgacggccgtacttcccggcgcaatgcctacccgcgcggatatcagagaacaaatcaaagggcaggggatttggggaaggctcgctgcgaaatcgcccgatttcgtcgccgaaaaaagcttgaaggccgtgagcaggaaccgcggaaaaatcatacccggcttctggaacaaagctatggccgcgggaacaaaatttattcctcagtcttggaaattacgatttatcgctcgccgttggagtaaaatttgcaaagatgctttttaataatcagggggatcataccgcttatattttctgtacggctgaaaatcgtgtgtaggtaaaaacggtaaaaaacagcacaaaaaaaggttacggcaaaaacgctgtaaccctttatttatatggcgcagagaagaggatttgaacctccggtaggcttcagacctacacacgatttccaagggacaaaattctatatttattcttaaaatattttgttttgtgcatataaacaaagatgatagatccattttgtgaataaatatcgtttgcggaaatgggaaaattgcaggtaaagcgcgggtaaatcaaaggagtttttccagccga

SEQ ID NO: 2590 - DNA, 4005 bp, Unknown
  16S sequences of unknown bacteria
atctcgtcgcgttcgagacgaccgaaagccgcgagttcgcgaataaattacagatatctcccgcgccggactcgcttctgcgcgtcgcgatacacataaagaaagtggactccgacccgggtctcccggagcagaaactcccgatattcaagagaattggctttgccgcggtcgagtggggcggacgggttcactgataatcacgaaatccgcctttatttccgaaaaaccggaacttttcacgctttttcgcgtctcatataaggaagaaacacaattccgtcagtgagcatcagaaattacgtgaaaggagacatatgcaatgaaaaagatcatcgcggcaatgataatattgttgttaatgaccggctgcggactgcttccgaccgtccagccggaggattcgaccaccggggcggatgatacgtcatccatcgaaaccgacaccgggacaacagcggacaacgagacgaccacagcggacacgactgccgacgataaaaccaccgatgaaacgacgtcccccgaagcgagagaggagtacaaaggcggcgccgtcatatgcagaggcgaaaagaccgtacttgtgcaatatgacgaccgcatttcgatctacgacggagacactgagtttgtctccgaccttccggtgcaggagtatgtctgggcgaaggagcgatggtacggcttccaggttttctcgaagtcgcgcgtgatgtacaatgtctcgatggatgtggacggaaaggcgacttcaactcccgcgaacctgcttgcgtcaggtgaatattacgactattcatactatatttacgacagatatgagtgcgaatcggtcatagtagacaaacacgacaaggtattgctctcgagcccgagtggcttttcgataaagaacggctggctgctcgacggcgataactattaccactggacaaacgcgtacagcgagaacctgacaaaagtgacgcctgaggacagccgcaacctgataggtccgctcgaagatgggcgaataatcatcggcgagcgcacatccttcaaggtccgcgagcagcccgacggcgcgattgaatccgagcatgacggctacgacaaggtttggtacgtcgcgaaggacaaagtatttgtgcaaaaagacgggcatatgtaccttgtcgatattgacggaaatgcagtcactgactacggagaattcgtgccggatgacgaagcatttgttattggctatcagtccggatatgggaacgatatgataatgacatacgaccccgcggacaccgacgagacaggcagcgcgaaaacatcgactgtacaatttgacgaagatttctactgtgtaacaatagaaggcgtcagaaagccggatcccgcgcccggatattcaacgaattgcgtggagtactactacattccgtcgacaggagaatccggacggattgataacatcctgatcggcgcaatcgaaaaacccgtcctctacctctaccccaccgccccgaccgaagtgacggtaactttcgcccaccccgagctcctgacgacggtctatcctgaataccgcgacggctggcggatgtttgtgcagaatgacggaacaatgactgagatcggcaagacccgcgagtactacgcgctctactgggaggagcgcccgaccgagccatacgagttcaccgagggcttctatgtggacaaaaattatcctgagttcctcgaggagaagctgtccgagcttggctttaccgaccgcgaggcgaacgaattcataatgtactggctcccggtactcgagaaaaacggcagaaatctcgtcgcgttcgagacgaccgaaagccgcgagttcgcgaataaattacagatcacccccatgccggactcgcttctgcgcatatcgattcacataaagaaagtggactccgacccgggtctcccggagcaaaaactcccgacattccagagaattggctttgccgcggtcgagtggggcggacaggtccacacgtgataacacgattaaacaaagaaaactaaaaggtacaaaatgcaaataaattacaagaaaacctccgcgcgtctgatgacgctgatcctcgcttccctgctcttagccggctgctcgaggacgacgagcccggacgatccggacacgaagatagtagccccgagcgacacgaagccaacgtccgatctggacaaaaataacactacaaagcccgaaacatcggcggataccgactccccggtgacagccgctccgccggaaacgacgtcctcacccgagacgtccggaacgaccggagccacggaggacgacacgttcccgggcttcccggagacgaccctgcccgcagacacaatcgcgccggtgactatcgcgacatatcgctatcagttcgtgacgtcctccgcgacgtattacgtggacgcggactacaacctcggtatatcgtccggaaacaacgcgccggtcttctattccggcaaaatgacggaaatagagctttccgatggcaaatatatgtcggtatattcccccgacctgaacgtcagcctcgtgataaaccccgacggcgcgccgataaatgtgataaccgggcgaattgtcaaccccgctgacgggcatattatcacttacacgagcgagaatgagttcagaatgctgaataaaaatttcgcctacgcgtccgacgagactttccgcggctggaacgatcgtgaggacggctgtctcgcgctattccacggcaaaggcgacatatggatttctgacggaaatcagattatcgacaagaaaacattcgacttaatttactatttcgctgatatttatttacttgtccgtgaaaatgaccatcttatgatgtacaacacgaatttcgagatgctcgaggattacggcgagatatcgctctcgaacaagttccatttcgacgagacggttcgcgagggcaagaaacgcaaccatttcacgttccactttgacgagggcacgttccgctatgacccgccggaggaggaaacggaaaatattgccggaaactcttgacatatcgcgtaatatgtgctaaaatatatacaaaaaggaggctgaaatcatgaaaaaacttgaaggctacatggcgggcgcgaacctcggccactggctgtcacagtacgggatcaagtcggacgagcactggtcgacttacataaccgagccggacatcgcgcggatgcgcggctgggggcttgatcacgtgcgggttccggtcgactatttcctgttcgagcgggacgaggagccgggcgtttacgatgagaagcggctcgcatatatcgacagaacgctggaatggtgccggaaaaacgggatgaatatgatcctcgatctgcatcacgcgccgggctttttcttcggaaacggcgcgaagaacgaccttttcacaagcgaggcgagccggaagcgttacctcgacatctggcgtatgttcgcggaacgctactcttccgagggcgacaatctgattttcgagctgctgaacgagctggtctgggagaattccgacccgtggaacgttctctggcaggagacggcggcggagatacacaagatttcgcctgcgcgccggataattgtcggcggaaacttctggaacagcgtgaacgagttacgaaatctcgcgctgaccgacgacgagcggataatatacacattccatttttacgagccgttcatcttcacacatcagcgcgcgggctggatgccgaacatggtggcgtacaagaagccggtcgcgtatccttttgacgtgtcggagcacgcggatttctggggagacgcggggattccggctcagctgaaggggcttgagaccgcggatcgccgcgcgctcgggaattacctccgcccggcgcttgatttcgcggaaaagacgaaaaaaacgctgtactgcggagagtacggcgtgatagcgaacgcggacgacgcgagcgccgcgcgctggctagacgatataggcgggc

SEQ ID NO: 2591 - DNA, 22047 bp, Unknown
  16S sequences of unknown bacteria
ggcggtgctgccgatatgatggatcgccagcaggttttcgcccagaatttctttgatcttttccgattccctttcaaattcttccgcccattcgggacggtattttaccacttcgactttcatatttttcctttaaaaacccgaatcgttttcgcaacggtttcagtaaagaattttttaaggcgaatacaaaacgtatccgccttttgcgtttttttaacatagtgccctatgctttttaagttttctccttccccgccctttccgtcgtccgcacgagtccggcagataaagggaactactcctttttattgcgcgtctttgtcaaatatacggcaataaaaaggattgcaatcaacgccaatgggcttgcggcatataaatataccgatttacgcaataggaatcccaaaggtatcagtataagtacagccaattgaacgatcaggtatatacctataaaaagcttcttcatgtttcaactttccgcgcctttccgctgctcggggcgattttcatcgtaaatcttatcgttcttagctctatacagctgccgaatccccacgggattcgcttccttttaacgcctctctttcgccgctatttacttaccaattcgcaggaggcgcgccccaatcgtcatcgtccgcatagggatcggaaaatccgctcgtcctgacgatatcgtcttcctcgaaataaatcacttccatcgacggcgtttcatagatctttttcatacgtttccccttctttcgtaaatttatgtttctattttaatatatttaaaaatacttgtcaagaattttccagacaaattatttttttcatccgtcccaaaggatacggaacgtccttttcccgataatattcgacggaaacgacttttccccgtacccgctcgttctcttctccgaaggggacgacgactttttctcctatggaaatctcctctccatcccaaagataggaatactccttgtcgttcttatccgtcgatatctgcacatatctgcatattccctgcggaatggattttccgatgtccgaccttctttcgtacttctccaaaaaaacgttcaaaatatctttcagcgcatccctgctcccctcctccatgtcgtccaaaacgaattttatacaactcccgtccgcataaaaaagacgaaagaaattgacgacgtaatcgagatagggcggggatgaaatcccgtgatgggcgacatatatttccgcgaaattcccgagcgtccgcaaaaatcgcgccgcttgctcttcctctcggacggcgaggggcgggcaggggaaaatatcgctttgaaagtccagacaaatagtcccgtcctttgaaacgacgattttgtttttcacctcgcctctgatcccgaatctgccgtcgggacgattgcgcagcaaaacgtccgcccgatattcaagctcaaactttaccgccggcttttccgttcgcattttccccccttttttcccttgcatctctatgaaaagagtataccatatttttccgaagttttcaaggggctttaaaaacttttcccccttttaagatagtttggacgctccatttgacgtacggcgctttgtaaaaactcgtttgaaaaacggcggagtcgtcttttgatgagcgaggtcgcagcgcccttatataaggtcggagtgttttttcaatgcgcaacgattgcccgcgctccttcctcgcgactatcgcgcggcattgctttacaaagagccgctcgatgaccgcacgactcttttacggttattttattctctccgctccacaaagaacggcttactcctccaaggaatcttccgcaacggcggcctcgtcttcttcgccttccatcggcagccaggctttcccgaactgaatatctttaaacagggcggcaagccccgtaatttgtttgagtcttaaaatttcatccttttccataccgagatgtttggaaatccaggcgtccgaacgccctatctcgtgcagttccttgatgatattgctcatcagatccacgtcgtgagagcccctcgccctgttgtggcgaatggtgctcgccattctgttggagagggacttgtctatcacggaaacgggcagcattccgccttcccgttcataaatatcgggatattcgagcatcacgcgatagcggtgaaagccgtccacgatcacgtatacatcctttgccttgttataataacagacgaccggcatcgtatagccgtcttcctttatgctgtcgtaaaggagtttcatttcggggggagcgacggtgttgggattgtagtcatttggcactactttttcgacgggaacggcgatcacgccgtacaccggactttgatatttactttctgtcattcagcatccctccgtatttttttttgataagttctatcttcgactgttcctgtcgggtcagtccaaatcccataaatctgcaagtatggtcgtttttcaatatgcaatagcacattctcttccagctcgggatatctttcgtactctttatatcgtccgtatgatcgggaatcgcgccgataaacaccacccgcgtctttctgtcgagcgtgtaattcgaaacgccgtttctcttaatatgatagccgtgttgaatcagctcctttatcgactcctcggacaagccgccgcccgtattccgccaaaaatcaagggaagttttaaattttttgacgtagctgttttgcaggcgcttcggcagggtcgccaacagaaatttcgtatagctcttccacgtatgtccctcgggcagggtaatagttctataccccagcgccttggtcttcccgtagatcgcgccgaaattggcgccgcggacgcgccccaccagccttgtccatatttccggatcgattatcctgtataaattcaagctgtccttcgaatagtcgttaaacggcgaggcgacgcgcatctgactcgttcgcaaccccgccttataatataaatcgtaaagcccgttataatcgtaattgaacagataatttgccacccagacgtcgttgcacgaccaatcgtaaagcggagaagcgcaccagatgtctttgaattgtcttgttacccagcattctccttcatagccgtactttttattgagaaaaccgctgtatctttgcaatgattcgtccgcccggattccgagcaggcacaccgtctttcccccgtcgtgcttatctttataaaacctcccgaactgtttagccagatcctcctgatgcattttgtatcggtaataggtaaacggttttcgcatatttatgacatagggataatcgggcatcggccgtacccacaactctttctttttatcgtcccacggataccaaaacatctcatagctgctcaacgcggtccttgtcgccatcggcaaacacacccaataaggctctacttcgtctttgattcgctcgaaagtccgtgttacatattcggtagtaagcgaatattgcgcttcaaaatcctgatgaaacactccgatcgtcctatcgggatagtgttctcttttatagtcgagcaatagattcaacaataatccgctgtcttttcctccgctaaacgaaacgtaaatattgtcgaactcctgaaaaataaattcaagacgatctaaaagcgcatcatacacatttgtacataaatattcttttttcatcatctgttatttaaatttttgcgctttatccttcgcgcagaggttccgtgtattctccgaagggcaagcgttccgccgtttgacgacacatcgctttgaaattgacgtccgcccgcttgtggcaaagcgcctctgttcgcctctaccccccgtatacaataaaccgtgcaaaaaacagcgatacgcaaaggctgcttttcgggcgacgagttttcagctcttttgtcactgttcccgcctgccccgtttgagtgctcgtatcatcctttgcctcgcattccccacatcggacttcgccgttttcgtctttcagtgtctgccattatgtaactcatcctttttccatatttttccatattataccatttttcgtcaattttttcaacagctttttatgataagataaaattttttcgattttttatagaaactcgctcgttgcgtaccgacgcggacagcttctctgaaatttataaaaataaaaagcggcgctgcgttcccccgtaaagaagacccatgtcgctttcttcgtttactactctcgaataagagtctatcccctttccaaaagggcttgaatttttccgatttaaaagacaaaaatatcctaataaaaacaaaaagcctaaaccgaacaagtagttcgatttagactttatctggtggagctaaggggagtcgaacccctgaccttttgaatgccattcaaacgcgctaccaactgcgctataaccccgtgcttcattcaagcgttttttattttacaggatttggtgtgctttgtcaagtaaaaatccactctttcctcaaatttgtattttcattttgaaaaatttttttcctcggcaaaaaagaagccgctgcgttctcttttcccaaaaggtcctttcccttttcacttcgctttctcacccctccgcaaagacgcgccctttccttttcccgacgttctcttttttcagttcacttgatcgcaaagtagaaagtaaaggacttttttcggggaatcctgaactcttcggcgagcacgggtccgcacgagttcgacccgatccctgcctgcactcccacgaacacctccgtccacttcgacttctttaactcgaagtcgtgcttcgattccttcaactcctccgccttgtactcgatcgcgcaaaagtcgaacgactctttcgacgtgagctttatctctttcccaaacttcacatactccgtcgaatagtgattcccgctctcctgcggcttgatatagtgatgatacatctcctccgcttttccccggtacacgtccttcgcgcatcctcccgtcctgtcgcaatagctctccgcttctccgtatccgagatactctatctccatccctcgctttttcagggaaaatctcagtcccacgcacggcagccactccgcgtactccggtatttcatactctgacggcactgaaatccccgaccttttttgaaagacagccacaggcggaaaagacgcctgtggctaaaaaatattctttatttgaccgaaccgagcatccccgccacaaagtgtttttgaagcaaaaagaagataagtgcggtaggcagggtagcgatgacgatgcccagcatgatcattccgtaatcgggcgtatacgaagatcccattgccgaaagcaataacgggatcgtgcggttatcccccgataaagtgacgagcggccaaagataattgttccatgcgttcataaaggtgatgatcccgccggcggcgtacgtcgatttcataatcgggatatacattttaaagaaaataccgatttccgaaagtccgtcgatacgcgccgcttccagcgtttcccgcgggaaatacttggaattttgacgaaaaaagaagattaaaaacgccgtggatacagtggggagaatgacggaggaaaaactgcccaagccgaatatgcccccgagaagctcgctggatttattgaccgccgcaaacatacggtacagcggtaccatcagcgaacagaacggcaccatcatcgagcagagtaataaggagaacacgcgatccttattcttagagcggaatatctcgaatccgtaccccgccaaagaactgataaacaacgcgaatacagtggtgagaacggaaatgactgccgaattgagaagccctctcgcataatccaaattggcgctgtcactgaaaaggtgttttaaattcgccccgaattcgtttccgaaccacatttttcccgcgatgacttccaccgtattattggtggaacagacgatcatccaaaagaagggaaagatggagatgaacgccgcgacggcaagaaaagcataacgcaaaatctcccctattatccgacgcatacggacactgtgaaatttttgtcccgcggcaaccgcgctttgggtggaattttccgaatcagtctttgacggcatcttttttatcacctccgattgcgaattgaacggccgagagcagaataatgaaaaccatgacgacgaaggacatcgcggacgcgtaaccgaaattgggggtatatttgaaacaggtgttataaatatactgcgaaatggtcatcgtcccgtttgcgggtccgccctgcgtgatattctggacctcgtcgaaaagttgcagcgtcccgatcgtggacgtaatggccacgaagagaatgatcggcttcaactgcggcgccgtgatgctgaaaaaggtcctcacggggcctgcgccgtcaagctccgccgcctcgtagatcgacggatcgatattctgcaatcccgaaaggaaaaagatcatgttatatcccgtccatctccacgtgatggagatgatgatgagcactctcgaccaaaaggaatcggtaaaccaatggatcggtcctacgctgaaccagccgagaaatttgttcatgatgccgttgtcggcaaagatgctcttcataatcagcgaataggaaacgagcgaggtgacgcacggaaggaaaatcgccgtgcggaaaaaagattttcccactagtttcttgccgttgaggagcaccgcgataaacatggcgagcacgatcatgacgggcacctgcacgatcaggtaaataaacgtgttgataatcgatttataaaacagcgtatccgagaacatcctcgtgtagttcgtccaccaattccattgcagattcgtccccgcccccgttttctgcgatagaatgaacgactgcaacatggggtaaaagacgaacagcgttattaaaagcgtcgcgggaatgacgaacagccatcccgtcagagcggttcctccatatttcttttgtttgataggtcgtttggcgggaacgttcttcgtaagttccttgacgttcaccgcggatttttccacaatcatagtatccctccttctccgaaagagaaagacagccgcctttgatgttaaaaaaacgactgtctgttcctgattccgacgattcgcgcgttacttaatcaacttagcgacttcggtctgaccgttgctcagagtcgtttccaaggtctgagttccctgcacgaaagcctttacctgcgttgccatgatcgattccgcgtcatacgtgtaattgccgtaagtgaccgcgggaatctgagccgtccaattagaaaaatcctcaaatattttctgctcggagaaaaacgcgttgggagtcgtgtagttagaaagggtcttggcgtccttcaaagaggataccagctgaatttctttcgccagtgcgttcatcaaatccagattggagccgaaggtagaggcgagaaatttcgcggattcttccttatgtttggagctgttgagcacataccaggctccgccgcccaagttggaataattcgacgcgtttttcgtcgcttccaaacgaggcagaggcgctactttccattttccgctctgatcggtctttgcggaaatagagggcgctatccagcagcccgtgggcacggtggccacatccccttgctggaacgcctgcacaaaagaattccagtcggaaacgctcttgacaacgcctgcttcgttgagttttttatagacttcgatgccttccttcaacgcttcgttatcctggatatacgccttgccggcatcgtcgacataccacgatcccgccgactgcatcatcatgcgaatctgaccgatgtcgctgggatcgagcgtaagcagcgccttgcccgtcttttctttgagcgctttgccgatttcgatatattgcgaccaggtgatgcccgactgcatagccgcgtccgttacgatgcagccctcgccctctccgacgatgccttccagcatatccgtgcggtagaacagccccgccacgccgctgtcgaaaggaacgccgtagatctttccgtcgaggcttgccgcttccaccttgtactccgcaaatttcgccttgtcgagatagctggacagatccatcagactgttgtcgtaattggtgaggtattgatgcgcgcgatagtcctcgatcaggacgatgtcgggcatatcggtggcgaccccgctgctgaatgcggtgttcaattttgcgacgatgtcgctttgcgccatattgacgacgctgatctccatttccccgtcgtaatacttcttcgcctcattggcggctttaatgttgaaattttcgtcccaagcccaaatgacgagcttgtcggactttcctccgcaggcggacacggacgttgccacgcctccgacgatgcctaaacacaggaccgttgctaacactctactgattttacccttcatgaaaaatcctccttacaaaaatttttcccattgcaagcagtttttatccgttcgcttgttgcaaattaagtataacgcgaaaaaattttgtctgttagaaaaaactttgtttcatttgagaatttttatacgggtttcattcaattctcacaaaatattggtgaaagtttcactcaatcggtattttttcaaatttccgagtcgtgcgcacggaggaacaaacgcttaccgtcgcgtcctctccgcccgacgatttttcttttacgcctttccgaaaaaagcttgttcccggcgttgacgttttatgccgatttccgaaaaacgagctttttccttcctcattttctttttatcccgagtcgaaatacgtgccgtcgcctatcatcccgcggacaaaatttttctttctcacggcggggaagacgagaaagcctgtcctttccctcctcggaaaggcatggaagaaagaagtttcccaaaacgaccgtaaattgagtttcggcgcgaagtattgtttccgcttctttcgttacgcaaaaatcggcagaatattctccgaagcggatttgctgcaaatataagttatttaagcgttttgcgctcttcttttaaagggacaatccctttttcgcattgccggtcctcctccgcaaacgggaaaaagctttaaaaaacgcgcccgcattttcgtccgccttcccgacgcgcaaaaaaagagcgtttaaaacgctcttttcaatcctgggaaagatagtttgttctcgcctccgtttttctttttcgaagaaatcggaagggcttaaagtatgtccgtcattctgtgatccgggcacagggaggctgaggagcatcttaaatccttttttcttggaattgtgccttttccaagtgcgaggaaaggcggcacggagaaggattacgagcttctcttcgcatcggaaaagcagattttcgtatcccttctttttccgctcagagtaaaagtccctttaaaatattcccccgcttcctttgtgccgcgctacgctaccaacagccccaaagcgatccgcaaaattccgcttgattcgcgctgcccgtacagttgccgcagccgcagccgctattccccccgcagcaggaacagcagggacaacaagggcagaccttcggacaaagatcgtaatagtagcgcgtttctttgactacgggattttccacaacggtcgtctggacgggattgctggtcacttcgacgggcgtcgggccggaattatctgttactttggaaacattcgtaatcgtaatcatctcagtttaccttgacgtcaaactccaccgtaacgcttgcaccggccggcaggttgggcaaagcaaagcccgtcgcaggattataagtcggataagacgttcctcctatttttacgctgcccgccacaaaggaagtcccggcggggatatcgtcggtgaaaaagagattgattttctcttgggtcccggaattggtaatcacggaagtgtaatgcagggtatcgcccgaaacggcgagcgccttatccacgctcttcacattcgtcactccgacggaaaccacatcgatggaaacgtcgtttgtatcttcggaataagtgacgggtcccctgatggggtcggtgaccgtataggtgagattcgcgtgattgacgacgggagtctgcgtcatcgggctgtcggcgcggatggtatacgtgacggtgacgctgccgccgggggcgatatcggggagcgtgaatcccgcgacgaggtcgtaagacggctgcgcgacgccgttgacgacgacgctgcccgcgacgtagctcgcgccgccgctcatgacgtccttaaagaaaacgttttgcaaggtgacggtggaattgttggtgacgaccaccgtttgctgcgccgtttctccttcagaaaggaacgtatgatccgaacttttcacctttgtcaccgcgctggtgagaatttccgtattgacgatgttgctgctttgttctccgctctgcgtcgactgatcgggcagaacgtaatcatattttacattcgattgattggttactatcataataaattctcctcataagctaatgctttcagttgactattacccgaaaagccaccgtagtgctctgtccggggagtaaattgggaagagggaagccgagttccggattccccgcgggaatagcgacgccgtccaccaaaacggacccgggaacgaaagtcgtccccgcgggaatcgaatcggtaaagtagacgttcgttacgggcagcgtccctttattggcgatcaccgtggtatacagcagctcttccccgctcgcggcgacgcccttatccacgttttttacgggcaagatttcgacgtggatgatatagcataccgcataattggaattagaaacgcccgtcaccgtattcccggggaaaggactgaacgtatatacgacctgcgccacgttgaagatcgggttttgagcgggaatggcatccacccgcacggaaaattccacttttgcggacgcccctgccgcgagcggtccgaacgtaacgggaaggcttcccgcatacgtcgtgccgtctatctttatagaaccgggcaccagcgtcgcgtcgttcggcagaagatcgccgacgaccaccgtttctgcttcaatggatcccgtattggcgatatccagcgtgtacccgatctcttcgcccacttccgcgtaagttttatcgacgctctttttcacctgtaacgaggcgcctttgctgtcgatctgcaacgccaggcaattagggacgtaaaggtcgccgtccgtttcaaatcttaccgcggcggccgtctgtcccgcggagaggcgggaggaaacgtccacagccgtaatatcccagccctgacgacagcccgacgtattcgttcccgcagcggcgttggcgttacgggtcccgaaagttcccgacgtgtccaaggcgccgttttcgtcgtttatctgcgaggcgaaaaagttgtctacgggattgttcggtcccgacaagggggtcaaagacgccgtatcctgtccgaaaagcagcctgtcgttttccaaaacggcatctccctcctgcgccgatacgaacagctttcccgtgacgggaagagagtcgggggtgatgaaatcggtgagcgtgatatccgtacttcccacggaaggagaaacgaccacgccgccgctccataccgtgagatcccgaaggggcagcgatgcgttttcgtatacgaccgccagagtccagcccgcatggttcgtttcggaggtgcgggcgtcgatcgcctcgatgagagcgggcaccttcccggtgctgtacgtgccgttcatggcgttttttacgagagtcgtcacgtttgcggtgcgcacgtaaaatcccaaggtcaccccctcttcggtgatattgaagttttgtttcgtggaaacgtcgggagcaatgctgttgctgcccgacggagtgataaattcgacggggttatccaaaagagcggaaatattattcgcgctcgaacggaacaacccgccccataccagttccgcatacaacacggtgctgcctgcgggaagatttaaaacggcggcggaaccgtttttggtatagtcgagcgtcgtcccggcgggaaacgtagacacttgaagggaagtatccaggctgatgaaggctccgatggagcctaacacgccgggcgaggcaacatttgccgccttgcttaatcccaaggtatttcccgtaaagacgattcccccgttttttatcgcagagtatctttctataataggcatatttaacctcaaacaaaaaatattacataccgatcggacaacaaccaaatcttcatgtaatatttctttcatatatagttgttgtatattattctatgaaaaaacgctcctccgatgttcctttgcggaaactctataaggagcgttctaaacggccgcgccgattctaagatttaaaatcccaccggctttctctatcttttccccgtaagaaatttttacgattgccggagcttttatttcgcaaatccgtcgctttttcaagctcaaatattcgcacaacgcgccaatcgaaaaaagaaacgaagcactcccctataagcacttcgtttctttctttatttttccgaccttccgcgcaatttgttttttgagagaaaaaattgagtttcactataatatcaaaggcgcttattactcgttcgcacgcctattttctccaacgccttgttgctttttgcgagtatcgctcgcgtcggcagtcccgttccccctaaacgacgttttttgaaagagagaagatttcttacccttccatcgactgggaatgcgtgtcgatcgccgccttatgattgagaagcaaagcggggcgggaaacattcgacttgcggataaactcccgggatttttcgggagccgaaatttctttttgagggagagaaatattcgagagcgctataataatcggcgcgctcaaacagccgaccgttataaaaacgacgggcaatatactgccgcaggcgaccaaggagagcgcgcctaccacgacggcaaacaggagcgaatcccaagtatattttagaatttccccgaccgtaaacctttccgattgcttcggcgtgacgaggaataccgcttttttgcccaaagtacccaaaaataccgttttcagcatcatgggagcgagcgacgcgtaagtggcgatattgacgaggaaataagggagcagcaaaaatatgtttttgctcttatgatacacaaacagatccggaatcaagggcgagcacaggaacaggatcatcaccgcataaataccgagcgaataacgtatgacgggatagccgagaaatccgagcgcgatcgtgcagattgccagcagaaagctcaatacgggcacgataggcagactgtaatgggagagtttgatgtccaacttttcaaaccaacgcattttcgagcggttgatgtccctgtcgtattttctcatatattcgagattgccctgcgtccatttgcattgtctttttttcagggatacgtagttgacgggaaattcctcaaagcagagaatatcgggcgcatagacgatatccattcccgcgttcttgatctcaacggcaaaggaaatatcctccgccacgacgagcggaaagccgcccgtagcctcatagcacgcccgactgatcgtcatgccgtgcccgatcagggcatttgcgccgtaaaaattcttgatcacctgtacggtcgttccgttgctgcccacgcacagccccatcaggcgctgaaaaacgttttcccctttctgcgccgcgtgtcttgcctgcaccgccccgcatttcgggtcgtaatggaaatatttaaggattttttcgatataatcgggaggaatcacctcgtcgctgtcgagaacgataaaataatcataatccgttcttccctgcaaataatggttgaggtttcccgccttatagcccgtcttatcctctcggcgcacgacttccacgtttttgtgctgcgccatatatttattcacctcacggcgatattcggcctttgtactgtcgtcgagaatcaccgttctgaaattcgaatagttctgctttctgcacgccgaaagcgccttcgcattaaagtcgttgcacgtgcagtacaggagtaaaaaacgaggctcgtcttccccgccgcgttcgcatttttctatttctcggtagtgcctgtccagctttttatgcaggacggcgtaggcggcggaaaaaataaagtccttgatgctgccaaaccaaagaatagcgagcacagcggtgttgatgacgagcagagagatgataaagccttgctttaccgcggaatagccgttcaaatgtatgatgatattcgccaatgcgtatcctaaaagcgccacgcagccgagccagacggcgatgatgataatgtatagagtaggtctttttttcataagccttttatccgaaaacggacagcctccttttggtctatcgggtgaccgacacttataaaacagcgaagtatcgaaaattgtccacggatagtcaaagaaattttttctctcccgattttttcttgcgctttccgttccctcacagctttactttgcccctccttttatgctataataatacaaattgaggcaaggattcaagcgacgatgaaccgtgaagtatacgacaaaattgaatatgcactcggcttgatcgcggaaaagaaagacgcgggcatcgatttgttgtaccgatatatgggaaaaaatatgctgttcgtcgcccgaggcatcgtcaaggacgcctttgccgccgaggatgtcgttcaggacagttttatcaaaatcgtcaaacatatttctaagtacaaaaaaggaacgaacggctatgcctgggtgtgcaaaatcgtgaggaatacggcgctcaacagcatcaaggcaagcaaaaaccgcctgccgcagaacatagacgaattttgcggtatcgccgacggcgtggatatggaagaaaaatccaccacccgtctgctcgtcgaaaaattgatgaactctctcgctccgcccatcgtgaaacagatgatctatatgaagtattttctcgatatgaccgtgcgagaaatcgcaaaggaaatcggaaaatccaaatcctacgttgcaaaagagatcgtcaaagcggaagaattcatgaaaaaaatgttgacggaatagtggacaaaacgacgagatcgcttgttttataagtaagaggtgcgttatgaaagacgaaaataaaaaagacgaacaattaaacgcgctattcagggaatacgtcgaagaggaaaaatcccctcccgaaagcgttaccttaaaggcaaaacaactgatgggaaaggaaacggaacgggtcgaagaggtcgtgcccgcgttggcagccgaagcggaaggcgggacggtcggagaaaaacggcgccttatcaatacgaaggcgctctattttgcgattgcggccgtcgcgttgcttatcggtattttattgatatggcgctttgcggcaaagccccaagaattccccctgcgtttatcgcccgtcagcttatccgcgcttacggaaaaggaatccgcctacgaggaaaaagattttcttccgtttatcgaaaaagattcggttacggtatacaaggaatatgcgctgaaagaaaacgcggagaattatcgcgcgggggacgttgtggcgtattatctcgaatataccttccaaaacggaatcagagggaaattatacgtggaggcggagaacgtttatctcgataatctcgcatcctacaaactgttcgagagcgaacagaaaaccgaaaggaacacatattatatcgacgataccgacgtcaataaaaaagtttcttacttctatttttcacacggctcctacggatataatctcgaagtttcgaccgtggaggaatcggaaatcaaaaccatccttcaaaatatagataacagtttttaaaaacgtaaaaataaaaagcccgtccttgtgcgcacctcaaaaaaaatgccaaggacggactttttataaattcggcaagaggctgctttttctacaagtcttgactacgtttatgctgattcaccttacagcaaactttatggcaatagcagacttgatgggcgccccgttgaacaggcaataaaaactcacgggcatatgtacgaaagaaacaaacgctcttttatagaaaatccgggatagattgggcgacaaaatttagtaacaaaacgcactaaaatagcgatgtatgggcgtatataatagaaaaaacggtcaatttttaaggattttgccttaaaaacgaccgtttttcaatttgtcaacggactataaaaaagatttttttgcgtttcttcatttggaattgaaccgtcatatcactccgatataagagttaaaaattcaataggtatatcataaaaaaacactattttgacattttatgttctttttaatgtttatatataacacttttataaacttaatagtgaaaatccattgacttttctttttccttggtgtataataccatcagaaaagaaaaggagatttttctatgaaacgtcttattaccgataaactcatcgaatggaaaaattcgtcatcccgtaaaccgcttttgataaaaggcgcaagacaggtcggaaaaacctatgctttgttggaattcgggaaaaattgctacgataacgttgtttatcttcattttgaaggcaacacggaaacgttaaacaagatatttactcccgatcttaatccgaagcgcattatcgaagaaatttccgtatacgcaaaacaaacgattttcccgaataaaacgcttattatattcgatgaaatccaagcgtgcgaacaggcgctcacttcgctcaaatactttgcggaagaagctcccgagtatcatatcgttgcggcaggaagtcttttaggtcttgctatcaaccgtggcaaattctcttttcccgtcggaaaagtggatatgcttacgatgtatcccatgtcctttgaagaattcttactcgctacagacaacgatactctcatagagaaaatccgcgaatcttattcttcttttacgccgcttgcggacatttatcatacccttgcattagacctttataaaaaatatctcgtcgtcggcggctatcctgccgtagtaagaacctaccttgaaacggaaaacttcgactccgttcgttccgtacaagctgatatttcggattcttatattgcagatatgacgaaatacgccacccctaacgaaacgatacgtagcatcgcgattttcaacacgctctcatctcaactcgcaaaggaaaatacaaaattccaatacgccgttataaagagcaacgcccgtgccaaagactatgaactctcattgcaatggttaaaagcagcaagcgttgttttggaaaacataaaagttaccgaagggaaattgcccttatccgtttacgaacaaatagattcgttcaagatttattactccgacgtcggtttactctgtttcaagtccggtactcttccgcaagatattcttgtaaacagctctatatccgacagggccagaggattgcttgccgaaaactatgttgccgaacagcttgtcgcacaaggatatagattaaactattgggaatcgggcggtaaagctgaactcgatttcattattcgtcaaaacgattccgtcgttcctgttgaggtcaaagctgccgataacgtaagagcaagaagcctgaaagtatttattgataaatacagtccgtcctattccatccgtatctccgcaaagaatttcggctttgaaaacggtataaagtcaataccgttgtatgcggtgttctgcttataaaaaatccattcggctacggctacttgccgcagctttttctatccgcgcttttaccaactgaaaatagaaaccgtctgcctgtatttctgcaagccacgccgcaacttcccgctcccatacaattattatccattacaacttcgttttctttcttataggttttgataaaatattcaagaaacacacttcttacgccagattcacgcgttcttatctcttgcaaatttcagaataagagttcaaaatttaataagtatatttttgtcaatttctattttccaattcctgtaaaacttccaagccgcctacaaagacgattttgatttgttccttcgattcgaccactatgcactctataatctgtcggacgattctgtcatcatattccatagggtgatttttcaatccgtcaagtatggtaaatatgtcatcgagacgggttttgacattcgcgcgcttttgtttccgttccgctatctgtgcaagttgctgctgtaaattattcttttcattcatcagtaccgttgctttcccttcatcaaacgcttccaacgtttcactcgataccgcattcagcattgccttgaattccgcttcgatttccgcgattcggatctgaatatccaggcttttatcttccgtttcgctcatatccagtcccattcctatatggagctttaaggtccgcagcacctccgcattctgcatcgccgttcttccgatcgccttcataatcgcacactgaagtacactctcctctatcgtcggagatttatggcagtatttcttgccgtaatccagccgattgatgcagcgccacacgattttcttttggcctttcatcgtccaagtgcatctgcggtacggagttttacactccccacacaccagcagttccgtcaacgcatatttgctcgaatactttccctgttccgtctttgttcctttctgtttgatctttggcttactcgttcttctcgctaactcctcctgcaccaacgcatacttttcgcttgaaatgattccctcatgattattttccacataaaattttactcgctcgccgttatttagccgtaccttctttgaaatacaatcctctatatacgttttgtttataatcccgtctcccttatatttttcattcttcaaaatcgactgtatcgtcgaataatgccactcggctttcccgctcggagacggaatcctcaactcctcaagcttgtccttaatcccaccgatactgtctcccgataaaaaactatcgtatatgaactgtataacttgcgcctgttccggaacaatttcaggcctcccgtcttccccctttcggaagccaagaaaatttttataatggaacgctacctttccttctcttgcactctgttctttaccccatttcacattcgcgcttatattttccgactcgctctgcgctatgctgccgtatatcgtgatatagaactccgcaccgggttgcgtactgtggatgccctgttcttcaaaaaacacgtccactcccatctctttgagctttcggatatacacaagacaatctactgtatttctcgcaaatcgggatatggattttgtaatgatcatatctactttaccctgtctgcaaagcctgatcatttttttgaattcgtcgcgcttttttatactcgttcccgtaattcctttatctgcgaagattcccgccagcgtccagttgggttccgcattgattttttcggtgtaataattcttctgtgtttcgtagctgttgagttgctcctcctgctttgtagatacgcgacagtaagcaacgactctcaactgtttgtatttctcacgtatcgactcctgcgtattgatcgtcgggggaataacccgcactactctcggcggtcttattgattccggtatttccatattatcattaacctctatgtctgatttcctgtttattttcgagcacgatcccgatccttccgtctgtgtacatccgtatctcatccaccgtcctctctaacagctccgacgaaaactttttcaaaggagcggctgtcttaaaaatatcttttacccgctgcgctttaccgagcacagaatcaaattcagcatatttcagcgatgcatactcgattattttttctcttaccgtgtcacggttgatctgaatgctgtctaataaccttgctatttcattattcagccgtcgcagttctatgctcggctcgggggccttttccggcggtatatctatgcggtcgggatcggctatcaattcgttcatcacttccgtcagttcttctatcagactttcatccgttttcccgatattcgtcttacaattcggcgtcagacatttccaccagactgccgtctttcgacggttatcggcctttcgacgcagcataccgctgcagttcggacaacgtacggggatcgttatttgaaagatatccgcttgccgctccaagtccttttgcaaatatttttcatcttttagtgtttgaatcgcttcgtaagttttccgatcgattaaagcgggatatttttcattgcccatatatcgctgatcgctcaataatcgcataatccttgatttattccatccgaccacgccgggcatatattcaatctgcctttcattcagccgttccgacagcttcaatagagagttcccttcgaggtatgccttataaatttctttcattacctccgattccgtcggatgaaatacaagttttccttccgtataacggtatccgaacaggatgttccttattttcatgccgtcttacaccgtcctttttctttgatttcttcggtcagtttcaatccgccgattaaacagaacgtcaatttcgtgctgtcctctacgatgattttttctacgatttgactgaacagatcgctgtcgaactcacttctcggctgatattctttcatgatttcgttcagcgtttttaactcatcgagcagcatatcggtttcatcctcggtgagctttttgcggcgttcgcttctcaaagcggtgattttgttcccgatttctgatgtctgctgcgtatattccgttactcccattaccccgcttgtatgcaaccgcgtgatcacatgatttttggcacttaaatccgcgattgccttgtcgatttcctgtattctttctccgttttcgctcgttcggctttgcagatattcaagcctttgaattgtctcctctattatctgctgtcggtgtgctttgagcttatacgtcatcaccgtaaacgtttcatacgccatatcctcacgcactcgtcggcttttacatttgccggcttgtaccgcaagcaacgcacaattccaatatgctttttgatttatggtttgtcgacgaaacgctcttccgcattccgggcaacgcatccgtcctgtcaatgcatatacttttactccgcctctatcttcacgcctggacaatatcaattcctgtaccgatatgtacttttctttactgattatcgccgggcaatactgttctacgtaatattttgtcttttctcccttatttcttttctgtttatatggcagactttcagtcatatatgttttctcaagcactgcgtcacccatatatttttcgtttctcaaaatataatcgattgccgtcatatgccatacgcaataccctcttcgtcttggttgttcttcctcgttcaacaggcttgctatcgcctgttttcccataccttgcaggaacagatcaaatatcctccgaattattatcgcttccgcttcgcataccactagctgtttattttccaacttatatccataaggcggattcgagcaaacgaatgctccgttttccatttttttctgtattccccaacgtaaattccccgatatggccgcgctttcctgttgcgccgtcataccggggaatgttacaatcatttccagattcagttggtttgtgtcaataccttgttcttcgaaatacacgctcactccctgttccttcagcaggcgaagcatgataagcatttcttctgtatttcgagctaagcgtgagacggactttgttatgattcggtctatttttcctttcttacagtccctcaaaagacggtttaattcgtctcgcttttccatttccgtgcccgttatcccttcgtccgcgtaagtactttatggggtacacagtaattacgtggagcgtattttgttgt

SEQ ID NO: 2592 - DNA, 6792 bp, Unknown
  16S sequences of unknown bacteria
catcctgtgttaaaatgctcgttaatccgacaggataaactgcgcttttgccttgtatgtgagaatttttcttaccgacaaaattcttcgacctgaaatgagcgtagtaatgagggattttcggtgcaaaggaacatataaggccggcgcctatatgcgacgacaagccgaaaagcaccgttaataggctgtttcaggcgtgttcggatatgtgcgctatggttaaccataacgcacatatacggacatgattttgacagagaaaccccgtatatatagtgctaaacggccgttaatcagacgggtatacaaaaaccccttttcctcgggcacagcccaaaggaaaaggggtttaatcataattttaagctatccgggtcaagactttatcagagctttgcgggaaatccggggaagctgtcaatctgctttaccgcatactgaagtataagcagggcgtcggtaacggtgatgctttcgtcgccgtctacgtcggcatttttaacggccgcgtcgctgagggttattttgctcaccgaatgctgaagaaccatgagagcgtcggtgacggttacgtcgttgtcgccgtccacatcaccggggaccgctttggtgttgagcatttcgcgaatttcctcaagcttttcaagaccctttatgtgcagcttggccttttcctcgccgtaggaatcgataaagcttgcaagaaggtcatcggcaagctcgaatgcggttttggtttcgtcgctgacggggaggggaatgacgtttatggcttcgtcgacggtggctgcgttttcgagcatgacgtcatactgatccttaaggtttgcataggtcgactcggcgtcggtcagagtctgatagttgcttatcttgtctgaaaggtcgccgtaggtcttttcaagcgcgtcataggcatctcttgcggcctttataagctctccgctgtcctcgctgttatcggggtcgtatttgacctctccgattgcattgattttggcaacgacatcgtcaaacaccgatgcgtcaacggtctgcttaagatcgattgacttaagtgtcaggctggcgttgttgccaacaataagagcggcgcgataatcggcctcttcatcggctataaggggaaccgagataattccgtctgcgggaagagtatcgtcggtaaaggtttctccggcataatgctctccgtttttggtgatttcaacggaaagtgtgacgcagtccggtctgataaatgtgtaatcgagggcatattcaaaggtgtagtttcctgcggggagggtctttcccgcattgcccacaaaaacgctttcaacacagtcctgtgtatttccgaccgaaagataaatgccggggttcagaaaaaggttgtcgcattccacatagtgctcggggtcggcaaggtgctgaggaacgttgtaggggttggagagagaagcgtccatgttgagcacgggagaagccaaaaacggatcggcggtctcatcgtatacaagcattttatagtgcttgaagttggtaaaaccgttggtatagaaacggaattcggagcttcccgaggggattatagtttcgtttccgtcctgaaccttatcaggaatttcaatggtcatctgaatggatttgtagggatagccgtaggtttcatcataggagaccggggcagcttcatacatctctcttgtaagaggggtggaggtgaaggtcttgtcaacggggctgtaaacccagcagtcggcgttgaaccagttgtcgacgctgtcggtccagtctatggacgacgggtcgggggtaatataatcttccacccaaatctgcgcctcgcaaacgtatttatgacccgctgtaacatccaaatagtttccgacgctgggcgaaagataagcccagatgccgtagcccttatttcctatggaaagaaggcggttggatgacgaaagctttccttcaaggtcggtggtaagtcccgagcccttaaggtcgtttagatttgccgcagaccagctttgaatcgtaacggtttcggatgcgggcgcgccctcgccgtcggccgaagccgcggcggtggcaatgctcgctgtcatggcgacagaaagaagtatggataaggattttttcagaaatttcataagtgtctccttagatgtgatgcttgatagattttagtgctttttatgctttgacgatgggaagggagattttgtcaaccgaagcctggagaattgccagagcgtcggtaacggtgataccctcttcgccgtcaacatcggcgttcttaagaacggtctcgtcaagggttatcttgccaaccgagtgctgaagaaccataagagcgtcggtaacggtgattttgccgtcgccgtcaacgtcgccgtatactgcgtcggaaagcttgtcgaagtcctcgcgggcttgtttaagttttataattccgtcgccgatgtgaaggtcggccttatcctgtccgaagtattcgataaagctgttgagggtttcctcggcggtgacaatggcgtcctcgctgtccttggtgatggggaactggatggcgttaatggcctctttaacggtttcggcattttcaatcatggtgtcgtactcttccttgaggctggcatagctgctctcacaggaaacgagaagctcataattttcaaccgaggaggacatatcaacgccgctgtatttttcgcaaagagcggtgtaggcgtctctggcggcggtgatgagctctccgctgtcctcatccttgtcgggatcgtatttaacgtcgccgatagcgtttatcttttccacaaccgcgtcgatgtcggattggtcaagagcaacgccgagggcaatggaattgaggcagaagcccatctgatcgttgatgtagagctcggcggaatattttccggcctcggctgcggtgaactcaacggcgatgttgccgtcggcgggaacggaagccgcgtcaacgtcataggaggcaacctctgcgccgtccttcatgaccttgattgttgcgacggtacctgcggcgccgtccttaaggatgatgttgccgagagaataggtgaacttatagtcgcctgcggcaaggtctgcggcggcgttgccgaacagcagagtgttgttgcagtccttggctttgggcagggtaacggcggcgcacttggcaagataaagagcctcaagctctcttgcgtttgtgttgccgggcttcacttcgctcgaaaagcttgcgttgctgtcgatgccgggcttgagggtgacaacgggctgtgcgtggaagggatcggcggtctcgtcgtagattctgcactcatagaagttgatgtcgcccacggcatagctgtcgcggtcgccctggtttttaagggtgaggcggttgtaatagatacggggctcgctgtaaccggattcggtagcggttaatgtgtcggtgacggttttgtatttataaccgaagtctttgttgtagtttacggaagcaacgtcgttaaaatcggcaagggtgattccgttggtgaagtaggtgttaacggtggcgtcgtcaacggcgtcgtgattgtaaaggtcgccgtagaagaggacttcttccttttcgtcctcggcaacgtcgtttacccaaacgtcaaattcataaacgtatttgtgtccggcaattgcgttaagatcgcagccgtagctgggatagccgaccatgccgcaggcgttcatgccgtatacggtgggacgggcatataccgaataaagatttgtgtcggaggtggagagattgtctcccgcgtcgccgacaactgcggcattaaactgatccacaccccaggtcttgaggtctacgtattcttttgcatcttccgaagaggtttccacggtggcgacaagattgtcgatccactcggtgtggtctccgccgtagttcgagcagctccagtgcaggaaaccggtgacgtcggcataatcaaagttttctccgatgattgagggggtgagggtgacggtcacaaaggtttttccgtcgtccgagagggtgtagttttcaaaagcggaaacgtcgaactgcatcattctcgaaacaagctcggcgtcgttgagaatggcgttttcgccgttgacaacctctctgaatccgaaggacgcgggatctccgccgctgaagaggaagagatatttgtcggtgggctcggtgagaatgccggtgttgtttgcggcaatgtcaaaggaaatggatttaagtccggtcagatccatgtggttgagggaggtgccccaggcaactccgccggtgtgggggtatcttatggaagcggagccttcggttttgacttcggtgtcaaggaaaagctcgtctccgtcaaaggggaaccagccgtcaaggctgtcgcagtttgaaagggttatgtttttggtggttaccgcgggagcagcgtaataaacttcatcggtggtgagtgtaagacggatggtatccattccgttcattacctcattggccttcatgtcgggagcgtaaggtctgttttgagtgtcatgcacaacaccgtcctgcggggttgtttcggaatactcgcgaagtatgcctttgagctcgcctcttgaagcggcggcatattcctctgcgggggtagctccgcctacaaggggaaatcttgtttcataataaagatttccgttggaatcaaatccccaatggttttgatcccagtttccggcgagatattcggagtgaacctccgaggtggcaagaccgatgccccattcggcttcaaagccgtaagtggcaaggtcaacggcatttccgccgttgagagcggtcagttgttcttcggtaaggttaaagatatgacgagtggcaagtaactcgtcgccgtcttgcggtttcatggccacgattgcagtcattgtgtaatcggtgtccgccgaaacgatggcggcggccgaaaccacgcttaccgtcatcatcagcgacagaagtatcgccaatgattttttcagtacttttctcatgttttttcctccattcttgcaaggggcttcccgcagcgccgaaaaacggttgctcggaagcattaccactattgcaagcacattttacattatgtattacaaaaaatcaagcattttatataaaaaaattttttcatgacaaataattttacgttgattttacaacagaaaaaatggcagaaccgaaaaaaggctctgccaaaggtgatttttattgtatattcgggttattcttcagtgcttgtaacggcaattcccagctcatcaagctgtgcggcgtcgacgggagcggggcactcggtcataagctcgcttgcgttttgaaccttggggaaggcggtcacatcgcgcagggtgtcgcagcaaagcagctgcatacaaagtctgtcaagaccgataccgattccgccgtggggaggcgcaccgtatttgaacgcgccggtgagaaatccgaatttttgttcggcctcctccttggaaagcccgagcatgtcgaaaatgcggctctgcaggtcggggttggtgatacgaatggagccgctggcaagctcaacgccgttgagcaccaggtcataggccttggctctgaccttggccttgtcggtttcaagatagtcaaggcattcgtccatgggggaggtgaaggggtggtgcatagccacaaactgacctgcctcgtcgtcccagtcaaagaaggggaactcggttatccaaagaaggtcatagccgccggggatgacgtcaagctttttggcgacggcaaggcgcagcgagccgagcaccgaaagggcgagagaggcgcgggcgtcggaaacgatgaatataacgtcgccggtttttgcgcctgcacgctcgattatggcggtcatttcctcttcggtcatgaatttggaaaaggaggaggcgattccgtcgtcggtcagtcttacccatgcaagacccttggctcccatgccctttgcctcctcggtcaggcggtcgataaccttgcgggtgtatacgccgcaggcgttctcggccttaaagcctctgaccgttccgccgtctttgacggtgttggcaaagacgccgaatccgcagttttcggcaatgtcggacaggtcgaaaagctccattccgaaacgggtgtcgggcttgtcgctgccgaaacggttcatggcctcggcataggtcaggcgtttgagaggcagcttaatatcgatgtcgagagcctctttaaacaggcgtttcataaagccctcgcccatggcgatgacgtcctccacgtccacaaaggacatttcaaggtcgatttgggtaaattcgggctgacggtctgcacgcagatcctcgtcgcggaagcagcgggcaatctgcatatagcggtcaaagccggcaaccatggtcagctgcttgtaaatttgcggagactggggaagagcatagaatttgcccttgtgtatgcggctcggaacaagaaaatcgcgggcgccctcgggggtggattttatgagcatgggggtctcgatttctataaatccgttttcgtcgaaatagtcccgtgcaattttggtgatgcggtggcgcatgagaatgtttttctgaaggtcgggacggcgcaggtcgagatagcggtatttaaggcgaagttcttccttgacgttggagttttcgacaatttcaaagggcggggtctccgaaagaccgagcaccttaagctcgctgacggcaatttcaacctctccggtgggaatgtctttgttcaccgacgaacggcggcggacaacgccggtggcggcaagaacatat

SEQ ID NO: 2593 - DNA, 4817 bp, Unknown
  16S sequences of unknown bacteria
aaagcccgtaatatcaaggaaaaacgcaccatagagatgtttagtacggtctcaaggcagctcgtcgcgcaagccagttctccaagagataaccttactcccgaagataaacctaaaaccatcgtttcggcggtggttttttgtgttgtacaggcgtatttttcgggaatatgctcgcgtagatttgaggtgaatttgcaacaactaacaagcaactaacaaatttcagcagtacaaatatctccccccttgacaagtccgcacccaaaggtgtattatatacgtaaataaccggaaagtgtgaagcaaatgaataacctaaaacgaatccgaacagaagcaggcgtcagccagtcccgactcgcggaattgtcgggcgtaaacgtcagaatgatacagtactacgaacagggagtgaaagatataaacgccgccggagcattgaccgtgtataagctcgcaaaggctctgggatgcgcaatggaagacctcatagaattaaaggatgagacgtaaacttatccttttttgttgttctcgatacggtgattcgccgccttaatttttcttcctccgtgtacttgacaaaatccgacggatatactataatattcccagttaaatataaaggctgtgacgaagacagaactggattgtgcgccgtacagagagtcgggaacggtggaaccccgatgggcggatttcagatttcgcatcacttccgagccgagatttcaaaagcttatgcgagtagatttctccgtgcaggctacgtcagtgcataggacttgtttgagtccgaaagaggtgcgtgaaaacgtgcaatttgagtggtaccgcgggtaggatacagtaatgcagacccgtctcaaagagatttgaggcgagtcttttttgtttgaaaaggggatataagatgaaattaagcaagaaaaataagctggtcgtgagctttatgctcttctcgttgttttttggcgcggggaatttgatttttcctccgttcctgggacaaaacgcgggaaataatacagcctgggcaataacgggatttcttatgacggcggtaattttacccgtactcggagtagccgtagttgcaaagttcgacggactcgataaactcggaagatatgtcggaaaacattttgccattgtttttgccgttttgatatacctttcgataggaccgggactcggtataccgcgcgcggcgtcagttccgtttgaaatggcggttgctccgtatctgcccgacggagtgaatataagactgtgcatggcggtgtattcccttgttttcttccttgttgcaatgtggctgtgccttaatcccggaaagctcgtcaatcgcataggacattttctcactccgagcctgcttgtgcttcttttggtgctttttgccggctttatgataaaaggagaggtcaatatagcggaggctcaggaggcttacggcaacgctccgtttctgaaaggattttccgagggatatcagacgatggacaccatagcggcgctgaatttcggcttggttatatccactacgctcggctcgttcggaatgaaggaaaaaagcgataaaatgcgcgctacagtacaggcaggcgtctttgcggggattattctcgcggtggtttacgttttgctcgcgtacatgggcatgtgcagctcgggagtgtatgatgttcaggaaaacggcgcatggacgcttcgctgtatcgtgtatcaggttttcggcgctccgggagctgttcttctcgccgccatcttcactcttgcctgccttactacctgtgtcggtttgataaactcaatatcgcagtatttttcaacgctcttcgcaaaggtttcgtataagaaatgggtgtttgttatcacaaccttttctttccttatatgcaatctcggattgaacgccatacttgccatatccataccgatactcaatgccatatatcccgttgcgatagtgctgatactcctcggacttactcataatctgtggaaaaataacagatttgtatatccgcttactgtcgcgggagtcgggcttgtcagcgttgtttatgccctcgataccgccaaagtaccgctcggagctgtgtcgaaccttgcgcaaagtctgccgttctatgagtccggtttttgctgggtcagcgttgcgccggctatgattcttgtctctctgcttgcgaatgctatcattaaacggacaaaatcgggtgcggaaggattaaaatcgtgattccgacaataatcggctgaataattcggttgttttgccaattgaaataagcagccgcatgagtatatactaacctcagcggtataaatcatattctattgattattaactacacaaggggacattacaatgaaaaaatcgacaaaaatcatcgcggcgggggcaatgtgcgctcttcttgcggcaacctcattcgcggcgggcagccttataaatattgcggtagacccgtctattaagattctcgtaaacggcgaagaattcaaaccgaaggacgtgaacggcaatgatgttatggtgtttacatataacggaacaacatacgcgcctctcagagctttggctgaggcttacggtcttgaggtaggctacgattccgaaagaaaaatggcgacggtcggcgagtattacgacaacagcagctataacgagagcggatattacgaagaatcggattgggaagaggaatttgctcctatcgtttacagcggaagcggtgattctgtcatagacattgacccgccggaagactgcatgtgggtgctctatgtaagcggcaacgatggttcagactatttcggagtacagggatacgcggctgataattccactactgagctgtttgtaaatacaacaaaaccctattcgggagtgacgttcgacccgagctttaaaaccacacagcttgaaatcagcgcgacgggggactggtatgttgaaatccgctccatatactcgtgcgacgttatagaaacctctgatacatactacggaagcggcgacaatgttgtccttatgtatatcggcgcacaaacggctgaaataaacggaaacgatgatggcgcttactttggcgtaaaatcatacggagacagcgaggatctgcttgtaaataccaccgagccttacagcggaacggtaaaactcaagtacgatcccgaggtgctcgagataacggctgagggcgactggaatgttacgctgaactggaattgaattattaaaataatcccgagaaaatttaaaaactgcgaaacattttaccgcctgtcttcgtctaatccgctatcttataagagacgtcatatataaaaatctccgctgtacggcggaaaaaatagaaagaggtatagctatgagaaagaattttggcgcaaaaccgtgggtatatccgcagccggtgctcatgataggcacatatgacgaaaacggcacacctaaccttatgaacgcggcatggggcggacagtacggcggaaacaccataatgatctgcctcggcgcacataaaactacagaaaatattaaggctaaaggcgtgtttaccgtaagcttcgcgactgcaaaaactgccgctccctgcgattatgtaggaacagtttccgcaaacagcgaccccgacaagatgaaaaaatccggcttcactaccgaaaagagcgaaaatatcgacgctcccgtaataaaggagcttccgcttactctcgaatgcaagctcgttaagttcaacgaggacggcgttcttatcggcgaaatcgtcaacgtaagcgcagacgaaagcatactcaccgacggaaaggtcgactacaaaaagctcgacgctatcgtgtatgagcctatcaatttggcttacctgagactcggtgaaaaggtcggcgacgcgttcaaaatcggcgacagcctgaaataatttaataatacagcataaattttatattatacagtgagggttatattatggcaaagaagcagactgcgggacgcgaacgtctcggaaaaatcgcaccgaaattcgcggagcttaacgatgacgttctcttcggcgaagtttggtcaagagaggacaagctttccccgcgcgacagaagcatggtgacaatagcggctctgttttcggcaggactttatccgcagctcaaaagtcatctcgcgataggcaaggagcacggcgtaacaaagaccgaagttgtagaaatcgttactcagctcgcgttctactgcggttggcctaaggcatggagcacgttcccgctcatcgaagaagtctacggcgaggacgaaggcgaaggagcgaaaaatctttccgtattcccggtaggagaaaagaacgacgctttcgccaagtattttatcggacagagctatctcgcgcctgtgtcgacctcgcaggttcctgtatacaacgtaacgtttgagcctgcctgccgcaacaactggcacattcatcacgcgaaaaacggcggcggtcagatgctgatttgcgtagcgggacgcggatggtatcaggaatacggcaaagagccccgcgagcttcatcccggagacatagtgaacataccagccgaggtaaagcactggcacggagctgcgaaggacacatggttccagcacctcgcggttgaagttcccggagaggaaaccggaacggaatggtgcgaacccgtgggggatgaggaatataatatattaccttagactactttattcctctaagaaactccacggaaatgaggtttcacttaggttttaagtgagaaggaagaagaaaagactggcgtcttttcgattt

SEQ ID NO: 2594 - DNA, 2619 bp, Unknown
  16S sequences of unknown bacteria
gtgatttttttcttaaaggattatgcagacaagaccgttgcagccctcatttatcacgcgttctatcgtttcctgaatcctttgccttgcgtctgcgggcatacgggaaagcttggtgtgcagcccttcgtttacaagctcatggagcgattttccgaatatattagaatcccatatcttaaccggatcctcttcaaactcgcttaaaagatacatcaccagatcctccgactgcttttcgcttcctacgatcgggcttacctcggtagtgatttcggccttcataaggtgaattgacggtgcagaggcgcgaagccgtaccccgtagcgcccgccctgcttcataatttcgggctcctcaagctttaagtcctcaatttcgggcattattattccgtagcctgtcgcctcaacctcgtcaagcgcgtccttgaccctcgaatatttctttttgatttcggcaagctccttaacgcactccataagctcctgctcatcattgattttaagcccggtgctttcggcaagcacgctgtaaaaaagagagctgtttattttaattgttatctccgcgctgcccgtgccaagatttattccgttgattgttgctccgtcggcgttttcgctgtttgcgaacgccgtttcaaagcacctgatatcccttatatgccgtacattttccgccgattttttaatcgtatcggtaagctccgcgcgcagcctgtgttcaagcggaagcgagtttatccagcgcggaaagcttatgcatatctctttaatcgggaattcaaaaagaacgcgcgataatatttgctttatatcctcctcggataattcaagacagtttaccggctgtaccgggattccgtatttttcggtaagcctttgtgcaagctcctgcgcttctgccgattcggggtacatacagttgagtaatataacaaacggcttgtttattgccttcagctcatctatcacccgctcctccgcttcctcgtattcgctgcgcgggatatcgctgatgctgccgtctgtcgtgatgacaagcccgatagtagaatgctcgtttattaccttgcgcgtacctatttccgccgccatgttaaagggtatgggctcttcaaaccacggcgtcattaccattctcggctgatcgccctcaatatatccgagcgcgctcggcactatgtagcccacgcagtctatcagccgcacattcattgccgatgaatcgtcaattcttatttcagcgcccttttcgggtataaacttcggctcggtcgtcattattgttctgccggatgaggattgcggaagctcgtcgttcgccctttcttttaaataatctccggctatgttcggcagcacgagcttatccataaactgctttataaatgttgattttcccgtgcgcaccggtccgacaattccgatataaatatctccgccggtgcgcgcggctatatccttataaatgctcacatttgtcataattcttcctccatatgcttttaactcgcggcagtcaaactgtcttttggtaaagcatatgccgaggaagggctgattatgacggattatacacactttttacaatgcggaattattaatattaaagcctgttgttatcggttttcccgacagcaacaggctgattttatacaaaattattatgttgtatatctttgcagacctatatttaatatctaatttccgatataaaaaactctcatgctcacgccgctgtcctgtatgagtatattcttaggcatgcgtgaaaatttcacggctgcaaacagatcccccgctgctcccgaaatattgataagctgaatcatataaacgatccagaaccattcggtcgggacaaagaaattaacggcagccagcacggttccccaaagcacgatgggagccagcgctataaaaatatacgattttttatcgtaataatcctcacttcccgcaaacgcatataagccggtaaacccgtattttaccctttttgtaccgcataacttcatcgcaatgccgtgaaccagctcatggagaaccatatacagcaccattaaaacaattaaagcgacaagccttaaaaaatagcggactatccccccgctcatatcaaaaacggaggtcacgggtacgaaaaagttcatggataccgccataacagccgcaatggcaagagcaagtaaattaacgattatcgccgtcctcttatccttttgaagattaagcgagtatatttccccgtaatcttcgggcaataacccaattgccttcatttttctctcccccgatcttattccgaagcctttcgacagtattatgctttaatgcagcttatccgccgttttccgcgcagcatctcaccacgtgttatctttcttaattgccttttcctgcttatcgcaaagagcgttgatacggttggtaaggatcatcactatggacaatccgaattataccacagaacacagaaaagggcaacatcttttaaacgaagaacggtacgaaattgtacagtcgtcaatgataggttacacttttctcaaaaaaatatgatgaaaactacattgagtaagactttggatgtttggaggagccgaaggcgac

SEQ ID NO: 2595 - DNA, 1994 bp, Unknown
  16S sequences of unknown bacteria
catcgcggggcgggtgtagcccaaatcagccatgtgccgggccaggtattcgttagcattgttgcccgctgatacgatcagcgctcgtggcatgggtacgccccctttccgtgtaaataggtgtcaaatcaccaaaaatccatgggtgcgttcccaaacggcggggtcgggggcgttctcgtagccgtggcaaagctgggtctggtactcaaaatatttgttctgcagggccagcggcagctcggcggcgataaagtcgctctgggccgccacggtgatggcctcacgcaaactgtggggcaggctctccaaaccaacggctgcgctggggtggaacaggttgcggttcaccggctccggcaggggcagtttgttcgcaatgccgtccaacccggcagccaaaatcaaccctataacgagataggggttgccggcagggtcaggcccgcgcagctccacacggcacaggtcgccgctggcgctgggcaggcgcaccagctggctgcggttctggcggctccagctcacatacagcggggcttcgttggcgcccagccgggcgtaggaattgggcaccggattgcagaaagccgtcagctcccgggcgtgggccaggatgcccgccacgaaatacccggcctcgctgtcgggggtcaggtcgccttcaaacaggtttttgccgtcccggacaagagacatatttacatgcaggccgttgccgctctggtcgtgcaggggcttgggcataaagctggcatacaggccgttgcgggcggcaatagctttgacagcacttttaaaagtgtttaaattatcagcggatttcagcgccggggcatagcggaagcagacctcgttctggcccgggccgctttcgtggtggctgtgctcgggctgcaggcccatctcctcgatggacaggcagatgtcgcggcgcaggttctcgcccttgtccagcggcggaatgtcaaaatagccgccgtggtccagcggaatatgcgtaggattgccgctttcgtccgtctcgaacagataaaactcgcactcgcagcccacgttgacggtcaggcccatggcgcgggcgcgcttgaccacgctttgcaggtagccgcggcagttgccctcaaagggcttgccgtcgggcagggtaatgtcgcagtacatgcgcatgacgcggccctcggcggggcgccagggcagcacggtggcggtgtccgggtcgggccagaggatgaggtcgctctcctcgatgttcatgaacccggcgatggacgagccgtcgaagctgatgccctgctcgaacgcgcggggcagctcgctggcaaacagcgagacgtttttctggttgccgaagatgtcgcagaacgtcagcttgacgaacttgacgtcgttatcctcgacaaaattgaggatgtcttgtgcggtacgtttcatgggggacctccttggataaaggctcccctcaaggggagccaattagaggcggacatactcgaaaggcccaccgggttggggcgggcctttcgagctggtgtaagaaataggaaaaggagaatggcgtgattaaggaatcctctgcttcgccgcaaacccgcgttcgcgggccgacagcagaggaagcggccttcgctcttcgctccggcctgttgttttataccgaggtattactcggtataaaacaacatacgagagtagcacggcagcggccagaagtcctcgtcgaccagttcttcggcctggtcggcggcggcgcgcaggcggtccatggcggggatgacctcgtcgtggaaggcgtgggccttggcggcttcgttgtccatgtcgctgaccttgtcggtcacggccttcaggtcgtcggcggcatcggacatctcatcggtgtatttgctaagcgcgaccagcaccttgctctcggccttggtggagatgccctccacagcggcggccttggcggcggcagagctggccagctcgcccatgtaggcggaagcggc

SEQ ID NO: 2596 - DNA, 3338 bp, Unknown
  16S sequences of unknown bacteria
gcccgtaggggcgaccattggtcgcctcttttcaaattatttaaactgtttttcccttataaaacaacaacccaaacaaaccgcaaaacaggctctctttggtgcacttgtttaattgtaaatcggcattttaagcccaacgaattgcaaggctctctttggtaaagagagctgtcagcgcagctgactgagagattgaaaaacattttgtttatatacgatgttcagtcgcaaattaggttgttgtatcaaggtcaatccctccggttttcttgcgaaaaccacctccctttaccaaagggcggcaacgctgcggatttttggggctactatttgtaacagaaattcgatgtaaacaggttgtttatgtgcaaacctgcggtttgcataggcgttcaatgaacgcccctacgatttaactttataattactgtttatgaccggcaaggcactttatttttttgaaatattattctgcaaccgatgacagtaaatcacaaacagcccgtaggggcgaccattggtcgcctcatttcaaattacttaaacagttttttctctataaaacaacaacccaaacaaaccgcaaaaccggctctttttggtacacttgtttgcttgcaaatcggcattttaaaccaaacgagtggcaaggctctctttggtaaagagagctgtcagcggcaactgactgagagattgtttaaacaaattatttgaccaaatttccgctataaaatatcaatccttaatctctttatattttctgtacattttaacaaacataccggtgtataagaccgtaagaaaagagtatattaaaaattcggcaatataagccgttctgccggcggctacttgacccaggctgaaaaccaggaagaaaatttccataatatacagcaatccaaggattattcccctgctttttataactctctccatcatttcgatttttgaccgactgtcgctgaaaatctcccgttctttatcccccggctcctcttttttcctgaagtagctgtaaccgaacttgttaaaaatatactcccaaccacagtctttaaacatttgcaaatagccctctttgtcatttaccgacgccttgttgtaatccaagcggtatgtaacattttccggctcgcatttttcaaagtgataatccataaaacctatttttttaagcctccatccatttttgtgcataagggaaagatattcttcctcttcctgccaatcggctattgtaaaaaacttaaactctgttttattcatattttcgcctccgttgcgtttttgtaaagcctttctatcctggctgtttccagctttaaaacctccctgcccaggggggttattttgtacatttttcttttatcttcctccctgacaaactctataagtccgtctttttccatttttgaaagactgccgtacattgtccccgggcttaaattcacctgaccgccggtgatttcccttaccttttgcactatgccgtagccgtggttttcatttttaaggcacagaagaatgtaaaatgcggtttccgtcataggcacataaaccttttttatatgtgaatccatattccctccgatttaatatcgcagtgcgatatatcgctgtctgtattatatcgcagtacgatatatatgtcaataaaaattttaaaaaattgttccataaggaacattttttacttatataaataaatcggtaaaatatccctgttcttatcacatcaaactttaataataaccctttttaggtttgaattaactttttccccctatttccaaacaaaaagccgccttttggcggctttttgcggataagcggataagaagaaattttatgcactactatttattattatttattattatttgttattgagataatcgtatgcacactggcaataaagagccacacccaatggaagaacatcctcgtcaactttaaaggccgggttgtggtggccgtgaatatagccttcttcaatgctgccggagcctacattcatcataaccgccggcacttttgcggcaactgcggtaaagtcctctgttcctccctgaaccgggcgcaaaacaggttccataccgatttcttcggcggcttttgcgccgattgcggctattgttgggtcacaaaccagtggagcaatgccgtaaacatgttttacaagggcttttcctctgtatgttgccgctacaccctcgcttatttccgtaattctctttatcaaaaactctctgttttcctctgtctgggctcttacggaaacctccaattttgcatagccggctgttgtgttacagctgtcgccccctgttattttgcctaccaaaacaacgctggactgatcgcttggtatctctcttgcgattatttcttcaagggcgattactatatgggcggcaatgtttattgcgtcaacaccctcgcaagctcttgaaccgtggctctgcttgccgaaaacctctatatctattgcatcaccggaatagagagccgggccggaagaatagaacattctgcctaccgatgagccgtacgaaccggacgatgtgtgtatggcgaaagcggcgtctacatgggggttttcaagaagtccccggtctatcatatccaaagcaccctgcaaaagctcctccgccggctggaacataaatttaaccttgccgccaagctccttttcatgggctttaagtatttttgccgcacctaaaagcatgcttgcgtggcaatcgtggccgcaggaatgtgtaaagcctgttttgcttgcaaaaggcacatctgatgtttctttcataggcagggcgtccatatccccccttaaaagaacgcatttatccccccggccgatagttaccacaattccggctttgccgcatttttctccttttaaacctatttcttcaagcttttttaacacaaaatcccttgtcagcggcaaatcaaaaccgccctctgcattccggtgtatatatctgcggtttgcaacaacttcgtccttaatttcaagggcttctttcttaaaatcaatcattttggtatcctcctgaatgtttgtgtattgggacaaacaaaaaagcctttgccccatgtaaataatttactgggacaaagacttgaaaaatctctgcggtaccacccggtttgcgatataatcgcccctcaacgcctgcataatacaagctctttactgataacggataaagaccccgtcggccattacttgggtttcccctttcctgccgccctcacaagtccattcattgtcgttctgcactcctgtttgcaccaaaacacaggttctctgcgccgcagta

SEQ ID NO: 2597 - DNA, 2362 bp, Unknown
  16S sequences of unknown bacteria
catatggagggggcagcccggaagcggctgagcgagatgggcatcagcgcgggaacgtcgatcatcttccgcggcacgcttttgtggcgcgatccgctgctgtttgagacgagagacgcgatgctcgccctgcggcgcaaagatgcgcaccggatcgaggtgagctgatgaagcactatacggtggcgcttcttggcaatcccaatgtgggcaagagcgcctggatcaacctgcttgcgcatgcggacttcaaggtggggaactggcccggcgtcaccatcgaaaagaaagaggcgcgcgtctatgatcagggcagctgttatcacttcatcgatcttccgggcgtgtattcgctcagcgaggatcaggatgaagggcggatctgcacggcgttcttgcgggaaaatcacatcgacctcatcctcgatatctgtgattccacctgtctgggccgttcgctgcgcctgtgtctggcgctgcgggagctgcaggtgcccatgatcgtcgtctgttccctggcggatgcggcagataagctggggatccgcatcgatgaagcgcagctgagcgatatgctggcactgccggtgcttctgctcagcgccaggaggaagaaggatgcgaaaacgctctggacagcgatccgcgccaatatcggcgcaaacgggatccacaagccgctgtatgatcctgcacaggcgaagatcgcgcgcgagagggaagcgcagctacatgagcaggatgagagagcgcgcaatgcgcaggtctatgcgttcatgcgcggggaaggggatgacggccgcctgagcctcgatcttcagcaatggcggcgcgccaggacggcggacgatgtctggaaccgctatgatgccctcatcgatgcgatcatggcgcgctgtgtatgccagaaagaccgctcccgttatacgctggcggaccgcatcctgccgctgtgtgcgttgttcttgctctggctgctgcagatggtctttaccggctctgccccatggagcgcgttcatcatggaagtgtgcgacgactatatctgcccatatctcttatactatatggaaggcataccggaagtgatccagcgcttcctgctggagggcgtggtgcgcggcgcggccagcgtgatcagcttcgtcccgttgatgggctgcctgtatttctggctcgccttcctggaggaaagcggatatatggcgcgcatcgcttttctggccgataaagtgatgtcttattttcatctcagcggcaaggcgctggtcgccatggtgctgggctttggctgcaatgtgccgggcatcatggccaccagggcattggaaagcgaaaagcgccgacgcatggccgcgctgcttgtccccttcatgtcctgcggcgctaggctcccgctgtatctgatgtttgcggcgagcttcttttgcggcaaggaagcgctcgtcgtggcttcgctgtatgggatcggccttctggttgcttttgcggccgccctgatcctcagccgcctgcagtatttctatgatgagcgcatccaggtcatggagctgccgccgtatcgattgccctctcttggcgcgatgggcaagacggccttccatgagatgatcgcctatctgcgcaaggcctgcagcgtggtgctcatcgtcatgatgggcctgtggtgcctttcttatcttccctcaggggagcgggagagcagctatctcgccgctgcggcaaaggcggccgcacctgtgttcgagtcgctgggctttggggacagctgggtgtgcgtggcctcgcttccggccggcattgccgccaaggagagcatcgtcggctttcttcagccgcatcaggaagagatcacggccaggccgatcgatcttgaacaggatgtcccccgcctgatccagcgcacgctgcaatgcgcgaaggcggccacgctgctgcagaaggaagaagcgcagcctcagccccggcttcagctgtgggaagggaatgacgccgcgctgcgcgcatacagcttcatggtcttcgtgctgctcagcatcccctgcgtgatgacactgtcggcgctgctcaggctgtatgggcgctcgatgatgtggatgagcgtggggatgatgacggtcatcccgtatttcgcttcgctgctgatctatcagatcatccatcttttgcaaggatgaaaccagtgaaaaagggagaaaaacgtttacatttcccgataaaatcttacattatgtgataaaatggggaatctctcttgtttagcccccaccctctatgttattataataaaggttaacgaccaggcttcaagccgattgatcatagacgaatggagggaatggtatgaatttactgttcatcc

SEQ ID NO: 2598 - DNA, 13481 bp, Unknown
  16S sequences of unknown bacteria
acaccacaatgaaatggataggtaccccctaaaccccaaaagaatttatagagccgtccttctttgatactctcacattcttttgcttatcatattgtttacctccgtctatggccttaaacagaaagcagctattattcccccagtcccataatgaacattatcccaaacaatataattataactcctgcagataacgatgcaaccactagtgaaattacgcttagtgcagacttttgttttttaattcccattactgcaagaacaattccaactaaagcaacagctatcattgacactaataatgcaagtgaagatgtaggagtaatccattcaaatatcagaaacccacaaactagtccgcctagaaataatgctaaagtgcttaacttgttgttttctccaaggttcttcgcattagcagccttctgtttacgaacgggttctgacttcgtatattttcgcaaagccttaattatcagataaaacggatagattattacgaggagaataacaatcagaaacagaattgtatttgaatactgcattagaccagatctcatttttagctcccctttccttttgatattcccataataacgataattctatggttgcaccatcaactatcgcgcaactttccggttgcgtagcattaatgaacactaaagtaaatcacgttttgtcgatttctatattcccttaactttaatgtttcaggacacaaaagtcaattaaacttgtgtgaataaaaaatatgatgattcaacttcattccgtttccgtttgaacacaaaacacgacaatagcggttctgcattgcaacagaaccgctcggccatatcacttatttcttcttgaacaacgccgctttcacaacgcccttcggatctttcaataacaggataaccaaccagatgatgagcccaagagctgcaaccgacagacccagataaaaatcgttcaacatatccacaggagcatgggtaaagtactccgcaccaagttctgcatactcaaaaatggcatccaccagccacatcagagatgccccccaatacatccagcaaagagcaccaactttcatttcactttggggagcgcccttataccagacgaccgtagcaattattgctgcaaaaaccgttgtcagtaatgtcatactctacattccctcctttacgagcttgcaatcccgtatcgctctttttcccataaaagaagaaacagcaagcataccgcaccatacagctgtaaccagtaccgccatcataacgcctgcgcttcccatttctgccagcatatccgcggtttcgccgttttcaactgccgttaggaacggaaaaaacggtaccacttcgccgtgccacaggtgttcaaacgctattttcacagatgtttctacgccaaacaaaaaaagaaggcgtaccgccccccttcagaggagccgtataccttcttgtgtatacatcatcgtcatctgttattcgttttgaatgttttatcatcggacgcttctgcatcactactcaacttcctgtatgagtatatgataattttaccactgtataataagaagcgcaagaatctgcggttagaatattgttatatttccttcagaacttcttctattaagtttccgacagacaggtgtgaaaccccgacaatggtattatcgcaatgattcacaggaatcagcagccgttttgctctgctttgcccaacagctaccgccatcgttggagtcacttcgccaaacattgcatcggcaataacaataccaatcggtccaataattacgtcggcggtccggcatccaacaacaactgcattttctccggtcgccgcatgattggcgccggctttcagcatcgccgctgtggccgtactgtttgttccaactgccgtaatttctatatgtggctgtttgtgcttaatcgcggcgactacttgttttccgattccgccgccctgagcatctattactaatactttcatgcaatatgtcctccaaactgtcgatggcttgctatttcatttccacaatttaaacatttcactatcgttcaccttctttcgacttcggtctcagcttttgcctgggcaacctctgctgtaatcttacctgcatcctatcaagctttgaagttcaatacagaaaagtgcattatgaagtttccgtgaagtgttgtgcatttccggcaatttaaccctaatctgcacaacatttttgcctaggaagcagttctttgtctggaattagagaaagcaccaataattaatggatcatcccgttagaattaccccgaatttcctcgaaaaaccgtactatttttatgccgaatcgggtcagatgcacatcagctcactgtgtcgccttagaaacgttagcgcaaaaagctgattccgacggcaatatgcataacgtttcacatcaacttcacaatccgtcccggtgactactctaattttgccgttttccaccagctgaccagcgtccgcgttccgcccctcgcaatcattgcctcataggcaaagtttgcgaatctgcaaacgtgaatttagcgttcactcatatattgttttatttcatcaggcgtcaattttcgtacttctgtgtgtggatattctttatactttccagcactaaacacgggcatcatttgcctgcatttcttgtctttattctttttcaaaaatagatttaactcatcattccctggaaatattttataagataatcttcctttattgttctctatctcataaataccacacgcactcttcgttgtatagtccgctgttcgcaaatatagttttgcaatttccaatgacttaaaaggaaaattccatcgttgcaatcctctatttgggtcatgctcgatacaaatgcaccgtccacaagttccacaaatatattgagtgtggttctccaaacagtccagcggatttagtaaaggcgttattttattttcattagagtaacattcctcacacccttttcttttcactccttataaaattccgagtttagcgtttccataccattgtaaattccttttctcccgtattatcatctacacattcagataggatactaaattcttctcgtagataaaattgaattgctcgctcatttttttgataaacgttcaattttagagtggccctgattttcttcacctgatccaataactgttttccgattccctttgactgtgctacatcttttataaagattccttcaatatagtcgttatttaatccaataaatccatctatttgatttgcattgtcaacttcatatacatatatttctgcaagtggcatcatttcttttaccatatcgaagttgcttttccagtaatctagagatataaaactatgtgcctgaatattcgtattcagccatatttgcattactgcatctatatcaccatcaacgtatttcctaatcatttcatcgtctccacaaattccgatttgtaactcggttaaaagcatagtagcacacgtactcgacaaagatctattcatcaatcagcaatcacagaaaaagcaaaggacatttatatagaataaagtatatcacaggaagcacttcaaattacagtaatccagtggcaaaacataaaaacaagggctccgaagtattgatgactcatacatcaatactccgaagcctgtcgctcgccgtcatcgggtccctctggcaacgtgtagctcattcgattcgagtttcgctccgctcactttcatcggagctatatctttcgcaggagacagcatgtcgccgtcccgaaacctaccgctctgccttcgctgccgctcggcaatcgcggggtttctctggcggactgcgtctcatctgctcaagcgtcgacttcgtctcgcttaccgtcccgagaccatcgattccggcttcgcctccgctcgccgtcatcgggtctctctggcaacgtatagctctatcgattcaagcttcgctaacgctcgctttcatcggagctatatctttcgcaggagacagcatgtctccacatgcttggtcatcgggaagttgtcgtaggatttcatgtatacgggttcgtagccgttcattttgaagagttccagattcatgcacatggttttcgggttgcaggagatatacaggatttccgggatgtcgtaccggcacagcatgtgcaccactttgtcgtgcatgccggctctcggtgggtcgaccacaatcatgtccggtttttccgtcagctcgtccagcttttttcgaacgtcgccgcacaggaattcgcagttggtaattccgttcagctccgcattgtgccgagcggcttccacggaatcctccacgatttccacgccgtagactttcttcgccttcagcgccatcagctgcgtgattgtgccggtgccgcagtacagatcgtatactgttttttcatgaatgtccggcagcaggttcagcgcatcggaatacagacgctccaccgcattgatgttggtctggaagaaggcgaaagccttcacctggaatttcagtcccagaatttcttcgtaatagaaatcccggccgtaaaggattttcgttccctcgtcgattaccgcatccgccaggctgtcgttgaacgtacgaacgatgcccaccagcgtattgtccagctccagcccctgaagcagctccacgtatccggcttcgtcgaagccctcctcgctgctggtgatgatattcaccaacacctcgttagagcgaacaccatggcgcaccgccagattccgcagcaagcccatatgagtttttttatggtaaaaagaatattctctctccctgcagaagttcagggtggccgacagaatccgattgaaatcttgcggtaccagctgacattcatcgcaggtaacgatggacatgaaacgtcccttctgatgcattcccagctccaaaggtccgccgatttccacatctccgaaggtatattccatcttgtttcggtaccggtacggggtctccgccggaaccattccctgatacacggaggcatccacgtggaatcggtcgaaaaggtccagcacctgctgatttttcagtcgatgctgctcttcatagggaacgccctggtgcaggcagccgccgcaaaggccgttcagcttacattctttaaaattctccatatttgtcatagaactccttcttgtattcgacgaaacggtcttcctctatggattttcgaatatttttcatcatgttcaccaggaagtgaatgttgtgctcggagagcagcatggagctgagaatctcgttggatttgaaaagatgtctcaagtacgctctggaataatttcggcatacgtagcagtcgcattccggatccagtgtgctgaaatctctctgatgcaccgcattcttgatgttcacatttccgtgggaggtcatggctacgccgtgtctcgccagacgggtcggcagtacacagtcgaacatatccacgccgcgctcgacgccttcgaataagtaatccacggtgccaacccccatgaggtagcgcggtttttcttttggcagataatccacacaatcgtccagcacatccaacataatgtccttcggctctccgacggacagtccgccgatggcatagcccggcaggtccagatccacaatctgctccgcgctgattctccgaaggtccttgaacattccgccctgcatgattccgaagagagactgctgctccgtgttctggtggtggtccttgcatcgcttgagccaacgagtggtccgctccagagaacgcgccacgtacggcttctccgcttcgtattccacgcattcgtcgaaggccatgatgatatctgcccccagcgcattctggatgtcgatggacgtttccggtctcatcatgtgtttggaaccgtcgatataggatttgaaggtaactccttcctctgtgattttccggaatttacccagggaaaaaacctggaagccgccgctgtccgtgagaatcgggcgattccagttcatgaacttatgaagtccgccggcctctcgaacgatatcctcgccgggtctcaaatagagatgataagtgtttcccagaatgatttcggcaccggtggcctccacatcctccggtttcatggctttcaccgtagcctgagtgcccaccggcataaataccggggtttcgatggtgccgtggggagtggtaatccgtcccctgcgggcacgagttctggtatcctgatgaattaattcatatgttactgcgttgctcatagtacctctttatttcttgattaatattgcaatctctcggggattattcaatcaacatcgcatctccgtagctgaagaagcgatatttttcccgaaccgcttcttcgtacgcttccagaatgtgttcccgatcgtataatgcggaaatcaacatcagaagtgtggacttcggaagatggaaattggtgatcaatgcttttacaatcttaaattcatatcccggatagatgaaaattccggtgctgttgtggccggcctgaatccggaagccctccggcgtctccaccgccgcactctccaaagttcgggtagacgtggtgcccacggagatgatccgctgacccgcgtcgatggcgtcgttgatgatcttcgcattctcctccgtcaccgaatactcctcgaaatgcatgtggtgctcctcgatgttctcgcattttaccggacggaaggtgccgatgcccacgtgcaaggtgacataggcgattttcacgcccttctcttcgatctccttcagcagctctttggtaaaatgaagtccggctgtcggtgcggctaccgatccgtcaatacggctgtataccgtctgataggtttctttgtccgcgtcctccgccggccgttcgatgtaaggcggaagcggcatgcttcccagctcttccagccgctccatgaaaatgccttcatactcaaaacgaattttccgtgttccctgatccggatcctggaatcccagaatatgggcctggaacaggtgctcggaatcgaacaccaccgtgtctccttccttcaatctctttcccgggcgaaccatggtttcccacacatccccttccagccgcttaatcagcaggaattcaatgtgggctcccgtcactgcttttcgcccgaacagtctggcgggaattaccctggaatcgttcaggaccatgcagtctcccggtttcagatagtccaaaatgtcgtggaaatgacggtgctcaatgctgttcttctcccggttcaaaaccatcagccggcaggaatctctttgctgcgccggggtctgagcaatcagctcctccggcaggtgataatcaaaatcttctaatttcatgtgttcccttctttatatatataatatgatttttcgtttcgttcggctttcccgaatcttgtttttacttttccgaatagagcgccatcagccccagatgctcgtaggccttccgggatgccatccgccccttctgcgtccggtacatcagctcggactgaatcaggtacggttcgttcacatcctccagcgtcactcgctcttcgccgattgcggaggcgatggtctcaattcccaccgggccgccgttgaagcccttgataatcgtggtgaggatctctcggtccagcttttccagacccaggtcatcgacccccaaagcatccagcgctttccgggtgatatcgatatccacgtttccatcctgaatgacctccgaaaaatcccgcacccgcttcagcatgcggttggcgattcgcggcgtccctcgggaccgtttcgccagttccgtcagggactcttcatcgatgtgcacgttcatcacccgcgccgaccggcgaaggatttccttcagttcctccacggtatagaaatcgaatttgcaaatgattccgaaccgatcccgaagcggtgccgaaaggcttcccgctcgcgtagtggcgccaatcagggtaaaatgagacaggtcaatccgaagggaccgagccgatgggccttttccgatgacgatatccagcgcatagtcttccatggcggaatacagcacctcttccaccgatcgattcagccggtgaatctcgtcgatgaaaagcacatcgttttcattcaaattggtcagaatggcagccagatctccggctcttccgatggccgggccggatgtgattttgatatccacgcccagctcgttggaaatgattcccgccaatgttgtttttcccagtcccggcggtccgtagaaaagcacgtgatccagggattctccccgcatcttcgccgcctcgatgtatatggacaaattctctttatttcccgactgtccgcaatactcgctgagatattgaggacgaagggtatattccccctccaaatccgagggctgcatctgtcttgatgtaatctgttcttccataaatatggtaacttcctttcctacatcaggaatttcagggacttcttgatgtattcttcgatggtcagatcatcctccggcacgtgaccgatggcttcttccgcctctgctttactgtatcccaaagtggtcagagccaccaccgcattgttccgttcgtcggagaacagcaccgccgattccgtcgcgatttccgcatcctgaatcggaacggcactcaccttgtccgccagttccaaaatcacccgttccgccgttttctttccaacgccctgtgccttcgcaatggatttggcatccttatgcatgataaacgctttaatctggttcaccgtgccgatggacatgatggccagaccggctttcggtcccacgccgttcaccgtcagcagttgctcgaaaagagtcagcgcatcccggtcgttaaaaccgaacagggacatgccgtcgtccttcacctgcatatacgtatacagttgaaccacatctccctcccgagcattcagcaccggcgatgtatccgccacgtgaatccggaaaccgattccgccctgcgtttccaccacgatggatcctttctcataaaaaagatattttcccgtaatatgtctaatcatcctatcaccctgttatttctggaatgcgcatggcaaatggccgccgccaccgcatccgccgtgtcatccggcttcggtacttccttcaaattcagaattaccttgaccatattctgcacctgttttttctccgcccggccgtagcccaccagcgcctgcttaatctgcagcggcgtgtactccgaaacccgaagtccgttccgctcacacgccaaaagggcaacgcctcttgcctcgcccactttaatcgccgtagttgtattgctgttaaaaaaaagttcctcaatggacgcctcttccggctgatatttctgaatcacttcattcagcccgtcaaacagctgattcagccgctgcggcatcggtgtatgcgcctccgtctcaatggatccgtaatctacggttcgaaaacgatttccgttataatccaggattccgtatcccatgatggcataccccggatcgattccaagtattctcattcttctaaaactcctcgggctattttaccaaaaaacgcttcctttgtctaatagcccggccggcttcgcatgcgtccggataatgatccggcgaatcatcgaaaaaccggccgagccgggggacgtggtgcttcatctccctccagcccttatttcttcgtcgaggagcaccacgtcaggcgactcaaacacgtcagtcggcaccgcatgcgaccggatgttgcaaaatctcgatttttctcgataaatgtgtactgaaggggatttttttttatggcataatcagcataaggaggtactatatgacaactgtatttttaaaagtaatttccgacattctgcagcagcacgaggaactgcttcggaagtacaagaagaaggcgctggctctaaaggattacgacggaatctttctcaaggctcgcacaaccggcggacgaacctatttcaccggttacaggcccggcaagaagccgaaatatatcggaaacgagaagcacactacagtacaacgaattcagaatcttcgcgcagcaaaagttctgatttcgatgctggaaagcaacatcgctgcgctcaagcattttcaggataattacattgatatcaccacggaagcaattcgaaaaaggctcccgaaatgttacgttccggcgaaccttcgcgaagcggaattgtcattagatacagctcagaaatggtatcagaagctcttggattaaaggaatctataccggtgaaatatcccgaaaagtgcactgtttccaccattgacggaacgctggtgcgcagccggattgaagcgattatctacgaccacctggttactgcgggactgcttgtgatttatgaatttccgattatcatcgaaggtcgcatcatctatccggattttctgattctgcatccgctgaccggaaagctgtatattctggaacatctcggttactggtatcatgatgcgaagggtgccgggtaccgcaacaatttttgcatcaaaaccgtcgagctcgcctctctcggttttgttttgggcaaaaacatcctcacaaccttcgaagacggcggcggtaccatcgatacagaaaaaatagataaaatgatccaacgagaattctttacgagtccgaccgtccaggaaaaaacaacgggcgtcagccccgaggaatttctgaaacagcaaatgcaggcacaggcagcggcgcggatggccggataggaacaacttttatcgaattatataatattcatgataataaatttttatccgtttttgtgaatgcctgtgatataatcaaactaatcataagatgggcgcagacccatgcggcatttcaggaggaccccatgcgttattcgagacagaacaagatacttgagattatcgccaacaatgtagtagagacccaggatcagcttcaggatttgctgaaccaggccggtttcaaagtgacccaggcgacaatttccagagacatcaaggaacttcagctggtcaaagcattggccggaaacggaaagtataaatatacagccgggaaatacgatgaacagccgatttccgaccggttcattaagattttccgcgaaaccatcatttccaccgcacatgccggaaatctgattgtcatcaaaaccctttccggctgcggaaatgcggctgcggaagccattgactgtctggaattggatcacgtggtgggttctattgccggcgataataccatgctgataatcgtggacaaagaagagaatgtcgccgagattatcagcctgttcgaaaacatgatttccaagagggatagaaatgattaatcgaattatcatcgataattttgcaaccatagaacacctttccttcgatttaacggaaggactgaacattatcaccggtgagaccggtgccggcaaatccgtactggtggaagccatcagtactgctttgggtggccgggcggacatttccatggttcgaaccggaactgccaaggcccgcattcagattgccggaactttagagggggaagacgtcatcatcgtccgagaattgatggcctccggaaagagtatctccaaactcaacggagaaatggtgaccctggcccagcttcgaaaattctgcagcacctttgtggatatccacggccaatacgacaaccaggttattctggacccacagaaccatctggaaattacggaccgctaccgccacaaggaactttccggcgaactggatacactgcacgacctctaccaacagtattcggaacggaagaaatcctacaactcccttcgctccgaagaggcggaagcgctgcggcagcaggacttctaccgatttgaatcggactacatccgaaacctgaatctctatgacggcgaggatgatgagctcaaggaacaactggagctcatgaagaacagcgaaaaaatatattccgcggtgaatggagcgtacgacaacctttatgaaaaggacgagtccgtgctttccggtcttcgaaaagccatcgacggactgcagaccatcgcctccctcagcgaagattttgagagtttcgcccagaccctggacgagaactactacagcatcgtggacatctccgatgcccttcgggacatgcgatcttccctgaactactccgatgcggacatcgaccgggcttcggaacgcctcagcatcatcgaagatgccaagcgaaaataccgcatgagcatcccggaaatcatcgcatacggcgaagagctggcgggaaaactaaatatcatcgacaatttcgatgccgagattgagcagcggcggaaggatatggatgaagcctatgctcggctggaaaaacaagccgaccgagtcagcgatctccgaaaggaaaatggggaacagctcacccgggcgttgacgcgagaactgaaggatttggctttcgccaattccgaatttgccattcgcaccacgcgccttccggaaatcggtcccaacggctacgatgccatggagtacatgatttccaccaatccgggagagcctctgcggcctctttcccgcatcgcttccggtggtgaaatttcccgaatcatgttggctttcaaacacatcatcggcgacaacgattcggtggaaaccatgattttcgatgaaatcgacacgggaatcagcggaaaaaccgccctggtggtgggcaaaaaaatgcgggagatttcggagcatcaccagattctctgcatcactcacctgcctcagattgcggcttacgggaattccaacttccggattcagaagagcctgtcagaaaattccacccacacggatatcctccggttggatgaggacggcaaaatccacatgctggcgggcatgatcagcggagatccggacagcaccagcgcactggatgccgcacgggaactgaacgcctctgctgcggtaaaataaaagtgaagaacggaaagaatctaattctattttctagccaatgagtatacaatctcatatgtctggaaatacaagggctgttcacgctttttgactgaaaactcgaatttagcgtgaacgcaattcgccgctcttacggaattctaattttgaagcaacggattaccgctgatgattcacgccaaaatgaggaattccccaaaaaagcgtgaattttttcaaaagaatagtatgcataaagaaaatcatatggcgaaatcgtgtatagcaaaaatattattcacgctaatcatcaaaaactgtaagaatagcgtgaagtcgctctaaaattctaggtttatttaattatacctattttatgagttctaattactggatgaacacttgttgaaaaggcgattataatccaaaaaaaaagtgaagaccccctgttttgagggtcttcactttttttgtaccataaaagtgtaagtaaagagtatcaaccagatacttggaaacttg
